United States Patent Application Publication US 2015/0354009 A1 - sequence listing, part 14

SEQ ID NO: 347 - DNA, 2298478 bp, Homo sapiens
cggcgccgccagccagcctcggcggggagagtgcaggtactttgccttcagaataattagcaggacccaagccggctttccgagcgcgctttctttttcttcctttgccccctccctccggaaaagaagatcccacttttgaaacaatcagaaatcgaagcaccccaccaaagccaaaccctgacgggctgctgtgcatgtgccatccctttttgcagtttattctgggcctgtgtggaatagaaagacaattctttatttgactggtaggaaagaaaagagaagactcctcagggtttccaaggaggactggagcggctgctttagtaagtaaactgtgcttctgtctttcttttctctaaagtgaagcatatgctgatgcttttcaatgcccaatgtccaatgctgtggacagtttattcattttacctgggaataacttgacttatataacttcagtagctcctatttgagaagtggttcgctaagcatttttttcttttttttttttttttggaagagcccttagaagacttcgatatgggatcagtatgggcagccttactggaaaactgatttttaaacgtttattgttcaagggctattggaagcctgctttgttaaacattggttggttctaagatttaagggtggttatctagaaaaagcttgaaaaatctaaccctactggctcacttctcctgccaccttcaacctcagccctaatccatgctaactcccaccctactctgacttcagttggttggttgttttatctttagttctgaaaagctctagaaaaaaaaagggggggggggcggaaaagggaaagttaataaggatggtttgaaagaccagatgaaaattctgttgcgatttcttcatgcctgtaaggagataataattggaggaaaatcctggaactagaatagttggagaattagaatgaacttaatttggagagagaatgtgaaaaatactttggagagggcagggctgagactgtgactttgacacagcgggttataaactctgacagggctcagcagccagtgacaggtttaaggtgtctcctaaggctgaatatctctgcatcaaaaacttttgcaggcagtattcctcttggggctaacatcaccatgtcagtagctgtagcatttctttttacagaagtaggacactcttctttctacaaaagggttaataagttcattatacatatatataaaaaacatgtagtctaacatttgccaatattttgtaatatctaaataaaacctttgtgttatgtcaggaaaaatatagttgactcagtttgttttgcacaagagggagagaatcaataacatttcagcatttttttctttatcactgccaaatggattctgaatctaattcttcttgcattgttacatatacagtagatacagtaggagttgcaacttagacaaaacagacctgatttttaacaaatcctaagttttttgacatggtagtacttatactgactagagtctaatagtgattagaaaaagtttatcccttttatctttaactgttaatttctttctcagtataatacatactttttaataaaaaccccttataagttaaaaaccagattgaaaagtaaaagtacttatctcagagaatttctttcaataaagcagcttattattaattatacctaagggcttccttgtatttaattgttgataatggtagaatgagtatatttttacctccttatttacttaagtgagtatataaaagcatctgtattcatgggggattggttttagaaattataagagtaagctaagttacaattattacaaaaaagtagagatgttttagagttgttttgattactcagtgttgaaagctctaaatatcttgggccataagtttttagggtaatgagacaggacaatagaacagttaatgaattggttgacatgaagttatcatatatggaatcatttgagaaagatgtgtcattgtttcttgattattatttaatttcttatccaaatgagttttcttagacatattactgctcttagctaacatttctattattggtttaaaaatgaatttaagtgatttaaaatgaagcccttggctgatcagatttggattatagcacataacctctactcatttctgacctcacatgtccgagaggctatctgatatttggaaaaaaaaaaacttaattattgaaaaataaaggggaagattgtacctaagtagggcaaatttaacagtggttcaaacatgttattacatatattagtataggacatattttacacagtagagaagacatgacagatttgtgcattctttttgaatttctgaaagcaaatatttgtaagtaacattaaaactaacctgacatacattctgcctctgttgtaattatgtcatagtgctaaggaaaatagcctgaatgaaagctgtttctagtaaagcttgcacatgcatttgatccctgtctctatataataacagataaaaatggcaaagcaggatgggtgattaaattgtcacctttttggccaccagctctctgtcctgtacagaggtagttgcaactttaaagttgagaagaaagttgctagtgtcagcagtaatgtgttttattatgcaattgttcttgttattcagatcagataatggcccgatgaaatacataagcagtctgcagggaatgaatgattaattcctcttacatgtgcttactaaaggggttctttctaataaagtgctgtatacctgcatttgctttcagttgctgttggtgaaggcaaacatgtttttcttttcttttaatattaacataaaatttacaagcctactcttgtaactatagcaacataaagatgattttgttgaccacatggtcttatattttatggaactcaaggcatgattactatttactaaatacacttaatttagaaagaaaacaatgctaattagatgtgatattggaaggttgagctattcataactttttttgctttattctttatggaatgccatgatatctttcctgtgtattactagtaggatgcaggaatccaaatgtatgcaggtgcagagttctgcaaatgcacatttttctttaataatgctggagagtaagtgaaaagctaaaatattgctagttatatccaagaattagcagaatattatgttaaaattttaggaatgactaatagtgcacatgacaattattgtggttaccactggtgtaaactgttctgcagttagagaagtgtgattaatgtaactttacaattctaaaactggattatggtagagggtggtgagtgaacagaatttatataataatttgataataggtgacctgaaatgcatgttacatgtttgaaacttacctacttaatgtctttttagaaaattctgaaaaaaatgtgattttcaaaattacagaattaaatatatctatccatgtgtctctattgatctagctactatctatgtatgtctcacatttaatgcagcaaataacattatttcaagttctctctgttgtttggaggaaacactttaatttcagttacatatttttgggcttacacctatcctgaatttaataaactttaacaatgcaaatgatatgacaaatattcaagaatgctaatttaaaagttataatgaaaattaaataagtagaattttgtacccagttcaatgccatttgaacttatcttcttatgtattaaagtgcaatttctttaccactactgtcggttcactgttttatttttttaggattgtcaaaagcatttggcatccgtaaagaataaataaatgtctcctgatacagtcaaacaatgtagacattaactgtacttgtaacaagcttttcaaaactcttaaaattcactgaatgaagaagaattaatgaagaatcaaaaaatgaacattacccgttaggagaacactgatgtgattgtagtaacaaaggttttgagtttatctttcatcactacaattggaagtgtgaccctaaggaggtaatctggactctctgtacctctgtcaggtaaataaattggcttagcaatttgaaagtctttcaagctatgtgactaatatactgaatataactgaagttgcattttgcaaattctcagattatactgtggcagtttgagaatcctgtaggagttaggggcagccatcttgtttgaaagagggctaaggaaattgtcctgaagtcaggtcagcagtgcctggacactcttgttacgtagattgagattgaatgtttatttggagtgtttttgaaggagcaggatggagattatggaagggaagaggtggactcaagtttctctaaatgaccctatgctgctgccactgagagcatattacatgtataattatttttggattttattactgtacccaatatcagaaggatatgagaagaaaataagtaaaaggggatgcttagtgtctttggtcttcctttttcccactctgaaatctctatgtatgctattttgcagcatcacatttggataaatatgcacaatttaaataaatatatattattccttacatacatgtagactgtaagagctagaaagaaccatagaaaaaattatttgaacccttgcattttaaagaggaaattgagaacttcaaaaataaaagatatcaaagttggttgaatatcccagtttcacagagaggttttccatccttgttcagtaccatctcacatgctatattgccaagtaaatacacagacaataatttttacacctctaactacattatcaataaaatagtttcattgatcttgtaggatacaatacattaactttaaaaaaatgtaataacaaaacttccaatcatggaaaatgaatacaaagaaggaatatatgcaatgttaattttaaatgcttgcttttcttaaagaaaaccaataatttatttttcattataattcatgtgatataactgatgaaattggaaactttttttttcttctaggaaaatcaatatgaccaattgttttctatatgtgataggaatatttgagttgcagcaagtagatatgtatctctatgaaatgtacattttaaatcactgaagtctgggagatcatgctatacttatttttttaaattgtaaaatatagccaatatagctgattaattgtagagacttcaattgcattttattttgtgtttgcatgtgagcatttatgtatctgtgtgtgtttaaaaacatctgttctcttcaaaataggacttagtgaaaatggtgtactcaaaagtttaaaagtgtatgtataataatcaaacagtcaaaaagaaatgacttagactagtatgtaacataacaaattgctctctaattagttcttaaatcaaagttcaacaatacaccatattaccaaagcgttgcctttaataatgagtccatgtattttctaaatactatattataataagtaaatattttaaatttgaaataaccatgaagcaaaaatattttacctctatattctcaaatacatttacttacattagatgctaaaaaggaagagaataatttcatattcgattatatacatttcacatgagatcagagatagcttaaattaaatgtgtgtcttttctactgggatgccttgtatgaatcattgcatatataatgctatctgatttactctgtaagggaacaattaaagtattatgattaaatacagaattcatgaacttttgaaataattcatttttaagtttgcaaatatttacgtaatcagctacagaagtctcaatgcattcatcatattagaacttctgtgaattatagattttacaaactgtccaaagttatagttctcaaatgtagtttgtgttaaaaaggggactccttcagcagctacacgaacagagaacaaagccaggcaagcattgtgttcacatgcattttttactactacccacatgtaacatgacatacgtatcataggaatacttccattcccttgtctggttaaatagtccttgctcagttaagataaaggcctagatatagcttctttataccacatagaaaataacccaaacctcatattttatctcaagttccaggaaaggttaatttagagcacagaaacagaaaaaaaaaaaaagaaaataaagaagaagtaatggagtgtttcctgtttctaaagtggaaccagtgtaggccacttacgaaaaacctgtatttagaatttaggaaaaatactcacataagctagcatccttgggattttttcccaataattggcctcaaatctttataatcaaagttagaaattctactcagtggaaaaggatggagggggtagagaatggtagaaggagtgactcattaatctcacgctagagacagaattatttcatttcttattcttcacccaaatggttatcaggatgaaagataaatctttcaccttggggttaggtggtcatcagatttctagggaagtctggctcacacttttatcttgtcacttttccgtttttttgctgttgataacaatataaccatctggaaccattgagaaggacagtttattcatgaaccatagtaattcctgtttgattttgctacagaaatcaaggataggacaataattcaggtaccatattcacattatgcactactcttagaagttgcaccctcttctattttcaaactacttgcagaggttgcaccctcttctattttcaagcttgtaaatgttgtcaagtcagaatcactagtcaggattatgcaatatgcataatacggcagcataaatcatataatattatctagtcccaaatatgtattgagtctcctatgtgtcaaggagtgctgagtaaaacagccatgtgctagcaatttgaaactacccaattgtgaccatcttatggtcttataaaatgtatccacgttatcataaaatttttgattccatagagaaaaaggaatctcttccctaaggcatttctccctttatatcacagaaaaatttccagatacgtatctacacttaccttattgtccttctcctttgctgtcatcctgagtcacagctattgcttttagaacctaggtggaagctgtgttgcttattaggcagttgcagtctatgctgttttccactggaatttcttggcacccttcatcatcttctcactccagtgctaattccttatgtgtgttcaactctccaaagttctagaaaggcagtaaagcatgataaaaatacgccgtactatcctaatattgacacaatataaaaacacaaataaatcgccagaccactgcagcagtttacagtctatgcaccagtcccttatatttccaaattcatagaatacaatagcagttacagtcaagactcatgttattttcagctataaccaaagcataatagcagaagtgctttggttttctcaggaaagagaatagacagagaaaaatgaggaaattcttcctgtaccttttgaggtgagatattcttataagaggacttataatgtgtactttggatcaaataaccaaagaggaaggcaaaagtgcaatttaaatgtttagaaatgtagtgggattgttagatactgctgaagttaataagttaccctaagttcacgtcttgatttctcttaaaaaaaatcatggaaacatctatgacttaagtttgaagagtttccttttttattccccctgaaaacctttatcaaagtactactcagcaggaacttttgaaaaacagtgccaagatgatatattgtttcaccttcaaaaaacttttatacctgtaaattttaaagctaaattatgtgcatcacaagtatagaaaaaatatttcccatttgtaatttcctattttattatataatacattcaattagttctcaattaacacttatctatggtacctgtttcaatggaccatggcttataattttagtgtgtaagaattccagtggcaactcctctgaatagatgtatttattgtgtgtcatatgtgctagccatttgttttctcctaggaaacatatgtggttagctctgaaagaatagcttagcctcatcatttatacctgtgtggttgcaagcaacaaggctttcttgcagtataattgtctcagggattaagtctagtgctttattctcccattttcctgcccctcaggaggatattccttcctttttatttttattttttttaggggcttgaagtcttcctattttcccatacacctctcccacttggaaaacatgccaggatttaataaaacaaattacacattcactaagacacattcatactggctttttgaagtattacatcagtgcattctgagagatattctgatggtattatagatacagatatagatagctattttaagagaaaggaatttcaggccatattcaagaatgctttggtgtgaatcaaatgctgctgaatacagagatgaagaagctaggtcagaatatggtcagaataggtcagaatatatggtcctcaccatggcaggcttttctttcctccattactcatcagttctcttcctatttctgtttctattgccaagttcccctcttctgcctatgttttttaacttcatagggagctatggtgacacacaggaatgactatgttggccttatgaacaattaaagggtgtgttattaacattattaaatagattatactattgtctgtattgtgcatttctcttacaactcattcatccttctcatccatataataatctgcagctcatatgtagtttatcacttcttgtagtgggattaaaagaagtatgtaattacacttttttgtttctaaatcagagatggtttcaaggtcactatgatctttttattcttcttggtttcttgaattttatctcttatatactgcctcatgagttcttgagaaatcttcagatagaaggtaataataatagccaacacttattgactgcttcatatctgccagtcactattttaagtgctttccatgcattaacttatttatacccatatcattcctgtgaagttggtacaatcattatctttgatttataaatgagaaaactaaagcacatagaggttaagttgcctaaagttaataacgtattttcccagatgtgcatattagtacggaaggtaaatgctacagttatctagattctgtacatgaaaagcagaaaaagtgtgagattgtggatctgcttttataagacaaattctttcaaatgaagtgagcacaagttatcataagtaaatgatcacaaatgtgaatgcaggaggacagatactgtaaaagtgctgcccaggggaacaaagaagcagagggcaaatcatatcaaggaaaactaactccagtgtatctcctcccaaagttgagagttaagcgtggcacaaatgcttctgagtgtatttttttcttcctttgggatttccaatctgtcagaaagagaacctgctgtgctctctgcctttccctggggtggcccttcaagctcgggtcccttttcctgggaagattaattcattcagttcctaccactctaacctctacagcctcttggcgtcagattttatggtatatcagctccttaaacaccttgttgtacttgataatccatgaccaaaagccacaatttttgaaccaaccaagagttttgagttagttcacctcatatgagaggcatggtggaatagcaacgtggaggtagggaagataagctcatggtggagtggagtgacatttaggatcaacagggtcccatctgccagttactataattcagagtattttaatgcatgccccacataataatgaaatgagactgttgtgattaactgatgcaagataaaatgtaaggatactgattataatcagcaaagaaatgagtaggaagcagaaaaccaaaaattggccttctaagagtcattttaattacaattatttgtggtgaactatgtattacctatgcctcattgccatctattctgtctcttatttacaccactgcgtcacattgtattaaatttgttgaaattttacttgattataaccgtaaattacttttattttcttatttgtctttctcatacgttgatcactgttcttatatctagcatggctgctcacctgacacagagttacaacataactcatggtttaatcttcagattacctggagatgaaagtgaaactgttatctccatattcatcaaatttttttaaaaagttgaataaaataatcctcagtaaacatttattgggcttctaatatatgagaaatgctgcctgtgtattgattgaaacctggtgccctaattttgaaaggacaagagaaacgtctttgttatatgaaattatcagaaatgttatgtgaattttaaaaattgaatgaaaaatattacctttgctctttcacagcgaattggatcgacacttcttatgtctcaggtatacatttgtcaggttaaaattttaattaataccacaagatggcaaagcacatatacaaaattgcgtttccctacattaggagggatgcataaaatacatacaaaaatcggaagttaaaatatataaaatagaaagttaaagttgagttgttttgtgacatttatttcatgagcaccaaatctcttcctttcaggtgtgaaagatatgtaaacacgtagtgaacaggataattggattatcttttcccctatgagacagctcctttcttccctaaggtcttctgattacttgttaagaaaattcaatgaattttcagttgtaaatgagaattaaggagtagaaaatatgccaacctgagcagtttttgatgatgtaaacttttccactggagaccttcatggaactgctaaactcttaaactgtttgttatgagctagagtttttgccttctgtcgctgaaaagcttggagaaggagcagtggttaaaaaagcaacacaaagaagtcctcaaatatttaacacatcagcaataatataattttatttcctttatttttacaaagaaagaagatataaaattcaggtccaaagtttttgttttgtagtcactattctagatatttaatataatcattatatgcaatataatttgaaaatacagtatatatagtacaagatatattggattaggtctccacagacaaacagatgtagtaagtccagttatttagctaaaataagcaaaatttgcaactgtaagacagtatattactttagaaatgtaggttgtctcatcaaatttatggtagcctccacatttagcacagtaggggcctaccataaaaatgatacctattagtgatcaagtcctatcaggccaacattttttttttaaatcaaattcttccctttggccataactttacttcaaggccttaccaaatattacttggatggctacctactgtctccctgactctaccttacttactctattcgttttttctgccaccaatgggaattttaaaatgcaaatatgatcatgattaaaatattattatttttaatttaatgtagggtaatgttaagaaaaaatcttggtgtgacatcaaggaatcttcattacctaaattgcaaactaccttttcatctttatttcttgctattttcccctgtagaattttataataaagctaaaaacaccttgaagtttaaattgaataatttagttagcttatgatgaaaatgatgtgataatgaagatttataattgccttttctctgttggagaggctgtctcatattttgtaatattatatgcattttctcttcaagcactaattttgaatctgatttcagagtatcatatatagtactctgtatgagacttctttctagttaataacatatataccatgaaatccaacttttgagggacctctgtttttgtggatttgctcatgatgaaccacctactatattattctgcacaacaaattgatcagttttctgttgtttcccagcagcagccagtgtctgccatacaaagtaatgacctctagctaaattttatgttgtgtctcccctgccaactctgaagtggttagctacctttggctcaccatcctggagctgtgtgagtttcttacttagcctggcctctgtagacatgtactttgttgctcacagattggctgagctccaggtctttgttgctggagatgttgctctaacatctgttgagtatggcatgtatagagttactctcatcaatcttaagaaattgggtgtactttctgggcttgtggcacgcattgtacaacataaaatctacattgaaaagaaggatacagattaaaaagggagagtgtatatgatatgattttttaaagtgtagctttgataataagaaattccagaaaactttttttaatatttatataacatatgaccaagtttctatggaattaccaattaaaaaagatctttaaagaaaattgatttatataatggtttaaacaaatcattttaagttgatcaattttgatatgtcttaggaaaggtaatccagattttgaatactatgtggtaaaataaagtaagtaatacaattacaacctccatctctgtattttaaatgacctttaaatatattacatgaacactttctttaggtcacaagccaaaaataatgtggcaattatgaaaatgtcaatattatcaatagtaaaatattcctatcatctaaagaacccataatattgggagactgcttctttgagtcagtgattaagcatgatgattattgatgctgatctgttggggagattgaaataactgggaagcgtaaaagcctctgattagaaggggaaataatcaagctcttctgttattgatgaaaacttcgagaagtgaaggagaaaaataggctattttttaaaatagagcaatcttgaatcatttcaatatgtgtaaaatcttaaaattgagttttctgattaagtaacttaacaaccaaatgaatagaagaatagtttggaaattttcatgaccaaactttgaagaaaatgttgcaatatttgtcctggcaaacagtggttctttgcctatttgtttatttatgcccatagaatagccagtctaagaattcttaaccaccctgtccccaagttttggggtcatatgtcagaattcctgattaatgtcaaatcaaatacatttaaagtatttgttaacccatatgctacactgcagtagaaaagtgcatattataatttaaatattcagcattcattgttgtataagttaaagactaagctactgtaaccataagacttcccaaacaagtataggaaacaaagtggaattattggtcattataatcatcatactcagataataactcaattataatcatttaacagtcgtaaggtgagtagttcaggctgatgggatgacatggtttttttcatggtcattcgtagatacaggtttctgccatcacattgctcgatcatcacctagggaatggtcctcatctacagggtcagatttggatcatggactaaattgaaatcaaggaaaataggtccaatttcgccgcacaaagcaatttccatgtcagtgccattgaacctagataagtggtcatacccagttgcacgtgaagctgggaaatgtagtcccatagctgtttagttgtgtacctagctaaaatttgagagtggctgttattagtaagaggaacagaaaaatagatactggagtttgtattctctgttttacctatttactcctcatcatatcaaaaattggtagtgtcatacattctttctcttcctttctttatatcatctactagtctcctttactctctgaatctgtaataggtgattcagatattttgttatctactctagtttggattttctacctatttacctctctgtctatccatctacacacacacacacacacacaccacacaccacacacacacacacacacacacacacacatacatatataaaaatggttcaaaacatttaattcactaatgaggaagaagaggctccataatgttgaatgccaaattcttatggcaaatttctcagaagtaaaggtgaaattagaatccaggtgacaacgtccagtccagctttctgtgcaataaggaatgtgactggctttttggataattttattttctgcacagaataacctaaacatataacattttatagaaggtttctaaaatgttgctgtgatatctttaccattatgtcccttccatgctgctgtatctgcatttgctgtattggtgagttccaagcagaaatcatgagcagagttttatttacttaaaattttaatattaggctaattttactttctgaagaaatgtttacttcgagctagcaaattcaaaatgtataatacttatgtaaaactgaatataatatgttcaagttcggagtaatatctaaggaaaatcaaataataacaaaaacaacactgatactctacagttataattcacatctcttcatgttttatcttctacatttagaaaactggacctcaatctgtggctttcttgtcactccatacacagtgcaattgtccaataagaatatctcagtttccagtgagtcctgctggtagatttcatgagggcagcaaatgcctatatattacgtcacacccatccatcaagaatgcattagccgtcatgctttcccagcaaagagtttttatgtaattgtccagataatcaaaatgcgatgaaagcttatagaaggcccacctggaaagactcaatgttcaatggaagtcctgttatgttcttaatataaactatagaattattcactagaaagtttatgcttcttgctgacattctaggtgtaaataatgcaacagtaaatactttaataatttcaattaattctgaagtgtagctttaatttttctaattacagccgatattcctaaatctgggacttctggtggaagttaatgaaatctttgcttaccactgcatttacattatagaacctgctgttgaagtgcagaatgcgttaattaaaaatattttccaatctaaatgagctgttttaactccttaacaaagtttcaagtcatgcattattttaaagtggatattaaatgaagcccaactgcattttttgatttctactaatttgatattccaatgctaagaaaatgccagtttatctttttggagtcaaatggtgaatcattacattaagtgagtaaatttatttgaagaatgaaaccctgacagtgctcaaagcatattcattcgaagcatagcttgttataaagttccttttgataaataaaatcaaataaaatattgagttattataggatataaagatagtaacatgtgtatttgcatatgataaacaattaaaaggggcagtcttggtaccaagtaacatattttggagagaaattgtttttggaacccttttatgtcctaacttaccttttgtactattcgtaataaagcatttgtttcctccagcaatccttggtcatacatatatgtgaaatatatatatgtgaaatatatatgtgaaatatatatatatatggaaaataaatccaagactataacctagataggaccctgtaataaccatcacacaaagatagttacatgtttttaggctgttggaagtagctcctttaaaaaacacctataaatatttatgttttatttgattaacttgggaaaattacatatactacctaagacttggtttttactaccagtcatgtctcatgtattgcacgtttttcatgttcatgcagtgtaacaaaatgctattctaatattaaaagcagatattattaacaactatgaagctagtaccttagaatttagccagttctcacatatataaatcatattatccctgacaaagtaaatttcttctctttaacttcccattctttactactaggttctaatttttcacattctaccagctcttagggatgtttatcattacactcaatgtggaagcatgggttaacttatttaattccctgcttattacaaaataattaatataatcattaaattatgccattccataataagtagtctacatttaaatatatgtgcttattctttgtttcttttaatttatactgcctttacaattagttattgtttataaccataaaacattattttagaacaaaatataccttcataattatttgactataaaggcttaatctagtgtctctgtatgacaggggctcagtaaatgggagtaagttagctaacatatatgtgtgtgtatatgggtataacatatatgttactatagacataaaattctttgggaaattttaacaacttttactttttgtgtgttcaatgtaagttctgtcttattaaagaacctgagatttagaagtagtcaaactctgatttccgttccagcttcagtgcttactggattactgaacgtgagacagttactagagtcagaaaactgccattttctcatctgtgaaacagacatcctattatctaacttaatgtgtttttgtaggaataaatcagacagcaaatgtaggtataaacgcatgtatctatttgtgtgtatataactggtggattagaagaaaaacgatttgaaaggaaaatagctttaataattttttaaagaaatgcactacaaatcacacgattaaagggtggaggcaatgacagtatctgatcctttctcttttagatcgcagtctttgatatacacttgacaatcttattgtaagatatcatattatgttcttaatttttaaaacatcttaaatgtataagggaaaaagtactctgatatataatggaatattagcttctttccccccactagtaaagtgttagagcttacagaaagattattttaaaatccactttaagatgtgctttggaaaacagctaatgcagatcactgacatatgtacataattctaattttttattataaatatataataataattgtgaatcaattaaattaaaagtacccagaaatattaaataatataggcaaattatatttaaatcataggtgtgactctgtatctgtgtagcaaaatgagccgccaaaaagaacccacttgtctatggaagattagcctatttggtgtaccaaccgagaagaaaacatgttttaaagggtcctactttgcttccctttgcagaaatttagagccaagaagcttactgaattatcactgatttttccaacttatttggaagtaattattggctatttgagggaaaatttgtgtaaagctattcaattagttgtaaattgcctcattatcttttatagttcatctctttttatttttaatttacttttcaccattgattttctttaattagcaattaacactaaaaaaattctttacatcagctgcctagataattaatacagtcctatggatttctgtagacacaataatatgttaatggatgctttgatttgacctaagcctcattttcactctgaaaattgtacctctgcagagttagacaagaacgaaacaatataagcaaattggttattttaaactctgagattaacatatggtctaattatcgcctataaatagttatttgaataattaagtcaacctgtcattgagctttggggggaaaatgtctccgaagttgccccaccccaacaaatccttgacaacatgaaagtaaaatttgtatcacttctatctctttaaagtgcaaatgattccataactaagtagcatttttcatttaatatggtattgtgacaaagagctgctcagaaatgtgtatctacacttcggtgcaaggacaccaaatattttatgcccagctgcccctaccacacacctttgaaccagtagatttcttgtgacacctcattagacagaataattgttgcaagggtgtgaccttgtacctctgaagcagtctctcattcgatggatggtgtgaatgactaagtgggtcagtcttggaagattgtaagccattcgttctcattagtctgtcagccattaaactccaacaacatagcaggttgtttgagaaatgtagcattttattgaaggcatttctatatctgcctttcaaggcaatcagcagttcaaagaaaataaattaactgaaaactcaggtataaatagcatcactttatttttgctttattaagcttcttgcttgcatttagactgatttggtattaatcattgatcataatttcataggtgctttatctttttgaatttagttaaatgaaaattgaaatataaaagggcacttctagtgtcagtaataaggactgcaaaaacattatacagttcagttttactgaagacatgtgcaatataatttctccttcatttatatttaagggaaatgcatagaaaacaaatgttttctcaaaactagaagtaaagtgtcctctgtaattatagtaaagtagattatgtaatctgcttgtttaggcatattctacataacaggctataacttatttggaaggggaaagcaactgaaataaatgatttaaaataagtagaaaagatggaagcacaacacaaaaagtttagttattcttatagcgagaaagggaaaaatttcaatacttcccgttttaataacttaatgttgctatgtgctgaataaatgtttttaagacaaagcagaaaactgtaatggcattgagagagaaaagctttgtatgaaaagagaaagcaccatttggggctggaggaaatattttggaaattgtagatttcctgtgttctgtctatgcaataagaaaaaaagacatttttttcaaggttacaaataggcttagtttttttatggaaaaacatattttgcttcaagattttcccttcattttaaaatcattcattaacatttctctggatcaagataaaaaatgttgtctgccaaaatttttagaaaattcaaaatctctttgtattaatatgaagtctgtcatatatattaaaacaggactattcatgatatagccttaaataaatatagacatatttagaacaagaacacagatctgaagccactggtgacttcaaaatccctaatctcttctatatgttgtatattgttcttctaggtttaaccagtctattaatatgaaatgaagtcatacttgtaataacatccaaatatttatgactgagttcccacctttttaattgtaggaatttgaggcttctagtaatgtccattccaatattttatttctttatgtcctcgtgagtaatcactcttacatgtgctgtatacatttattactcaaattatagtttatggacagcagcatgggtatctcctgggagcttgttcgaaatgcaaaagctcaggcctgaccccagactgtttgaattatcgccattatttaacaagatccccaggtgttttctattatggtttaagaggcactgctttaggatacaactctatgttcttcttatttgctccacttttcaaagtgccacattgtattatattctactgtgtctggacttggttccttctggtgggttcgtggtcttgctgacttcaagaatgatgccgcagaccttcgtggtgagtgttacagctcttaaagatggcacagacccaaagagtgagcagcagcaagatttattgtgaagagcgaaagaacatgaaagaacaaagcttccacagtgtggaaggggacaagagcaggttgctgctgctgggctagcgtggccagcttttatttccttattagtccccgcccatgttccgtttctgtcctgtcagtgttcccgtttttcaatcctccctgcgattggctacttttagactcctgcttattggtgcattttacagggcactgattggtgtgttttacaatcttcttgctagctacaaagcgctgattggtgcgtttttacagagctctgatttgtgcattttacaatacccttgctagctacagagtgctgattggtgcatcttacaatcctcttgtaagacagaaaagttctccaagtccccactcaacccagtaagtccagctggcttcccctctcactaccagtagacatattgaaccactgcttggccacctataactgacatggctattacctgtagctggggtcccaagtctttattcatgagatactgtaatgttctgtccttcaatatcttctccccatcacgaaacaattttttcccctcttcacaaaaggagaaaccaagctgtcattttaaacagccttttctgaagttttggtgataataatgagtaagtttacccaaagggtaattaaattggctgctgcatttggtgagatttagtctactggctcacatatgtcatcctgggaccttctaggacatctccccacttagctcacagctcctttccattaacccttttccgtgagtgtcatatagctatcttcctggggagttcagaccaattcctaggatgttttggcaaaataactttcttgcttgcttcagtcttaatactcatcactagagtttctgtgttttgttctaggttaggccttctgttatttatctgttgctgcgcaacaaagtactcttatgctgagtgacttaaaacaactaaaaagtttctgagagtgtctcagctgtgtgattctagctcagaatctcttacaaggctgcaatcaaattgtcaggggtgggagttagggtctgtagccacgtcaggactgactcagtctggaggatccatgtctcaactacaataccttgccatgtgggcttgctagggctgcctgtgacatggtaggaaatagaggtgaaataagcatgagcaacagaaagaaatgccaccctgccttttatgacctcaggagaattgagtcactaagcacagtccacacacaacaggtgggaataagaaagtatgagaattccatgaggctggcatatttggggccttattggaggctgcccaccaaagtgtttttcttgggacagtaaatagtccttccctcaaggtgtgacctcgttttctgtttccaacaaggtgattttaatagatcttgcaatgaataagaaatgtacattaatgggagggtctagtttgcattgttttaaatattctgcagcattagatgacaactctccttgaattctttatgaaatcttttcatcctgtgttcacatctcctgcaaacaactctcaaagcaaaacaagacaaaattaagatagctccacaagagcatttgtcttctcaaaacacgtgccagtagtacaggcatggtgctttttacagtcacacaaaataaattaatctttattctttaaatttgtctgccactgtcaaaccacagacatacacacatacacatgcaccaacaaaaaataatataaatagagatggagtaagcacaagcaatagaaagaaatgccaccctgccttttatgacctcagtagaattgggtcattcagcagggtccacacaaaacaggtctaaataaggaagtgtgagcatcctaagaggctgggatctttggggccatattggaatctgcccatcagtcttttccttgggattgtaagtagtccttccctcaaggtatgacctcatttttatccacaaaaaagtcaattatgaagatctgtttttcaaacattcttaaatcagctttatttaggtataacctatatacagtgtaatatatttatataatttatatatattttatataatttgcattatacaaggtattcagttttcagtatataacatttgcctccaggctaatagtgacttatgtagttttctactagaaataatgaatgggtttttgttttacatttgtgaaactcctaaaggagattttgggggagtgcctgtatagaggaggagactgcttcaaaaatgaatttgatggagaatgaataagcaattactgtatttccatacaaaggaatactatacagcaataaaaaagaatgaactactgatacactcaagaatgaaaatgaatctaagatagtgtttacaaaaagaagccagagacaacatattatatacagtatgcttttattaatatgaagttctaaaacagaatattagaatttatagtgttagaaatgagatcagtagttgtctggcagaggagaagatgtggaagattgactataaaggagcaagtggtaattttaggataataaatatattctatctcttggcgtagtaattacctgggtatatgtgtttgaaaaactgctcatttaaaataggtgcatttaattgtatataaattatacctcaattaagctgatttttaaaatgtaaaaaaaagattgtcatgattgtagataaaagtgcttgtaatagttacatgacattttccaactactacctgttattagtaaatattatagacttaatttcagcctgaataccctaatttgtatgattgttcttaaggcaataaaatttgaatcttgctaattatcactttatactagtgctcagaagtttaattgagaaagtatgatattgtagattgttgctgttttcacctcattgacatggtgtcaaacttggaacattattacacttggttatttttattttcaattagttttgtacttctttctttaatgtgaatttctatgtcctataggtggctacaaatggagtcatattaatagtaataacaaattaaatttgtttttaaaatattctagcttatgcatttcttagccttctgtaaaacatgctaaatattcttaggcgttccaggcagatatttcacctgttcaaatgtaaattcaatcaaaagtcaaatcagctatcacttgacctcctctaatgcttgctttcctcttatcctgattctaagccttctgctgcctacttctatgaatatctgatatctcatagatgccactgtatccatcagtttctgctgtctcgtgtcaggaatttgctgggtcaaaggttttatcctctttcatagttgaggcactggagtcctttatagctgttaccacagtaattcattcctgagtttggcaagaatgcctctgtctgtctctccccctttactttttcttttatactttactagagggtggctacttatgctctaatgtcttagtcatttattgaaacagcttcttcagttttacttataagctccttttcaactctcttttcttcacaggactcaaatgtgtgaaacttaacccagattaatctgagtgactggtcccacacttcactgataatttcctttctttccctgtgactaaaactttgttattgggtcaagttcagtttgtgttcttccctcttataggctgtgttctctttcaaggagattttcagttgctcttgataacaaggtttctccagatctttttgacctgtttatctgacccacacagacatttctgaaatccttttataggttaatgtgaggattcctactgtgttttctgactttcaattagatatgatttcaactttacctacagctaaaagcctgagtttaggtaacattctatacatgagacaactctatgcaattatttgggtccagccctgataagtcatgagcaaatatatattcattttcttcttttgtgagacgaaaaggttctacaatattactcattcagtaagttatcttccccagatgaggcttagattctagtgagagaaatagaccaagtaaaatgttaaaagaaaaaatatattagatactgttatctgctaaggagaaaataaaataaagcagtaaagggagtataggcagtgttgaagtagggtatacaatttgaaatagggggccagagagacttttgctaataaagaggcatttgactaaagacctaaaggaagagatcgccttttaagtgtcttccagacccttgtttagagaatatcaaagatgataatttctcatattgaaatatacttagtaatttaatattcagtagaaattttaaaatactgagcaatagtcttttactgaatatttgctttataattttcaatatatgtctttcaaatataactgtgttgatcttctaatatcaatagtatgagttctgattccatggctgggccatttatttggatagcttagattaatatttatttctggtttgtttgtataactatcattgtgagtgtgtgtgtgtgtgtgtgtgtgtgtgtacaataagccaaaatgacaccttcatggtcccacattgactgtttgaatacttactgaacagagtttgtaagatagttactaagtggaaaatttgtacttgcagaatatttgttcctgtcataagcatcattttactcatgtactttgcactaccttacaaagaccacaaaccttggagtcaacaaaactgcaactataaaactgagagcactcattaatttgtcattgacatctctttgaactagaaactatgtacagcattgggcataaaatagagtctgacaagttattattatgggactcctatttgtctgcctggtaaatcagtcatcttattccctttctaaaacactttttatgtaacactttagaacttacacagcattgtcttctatgatcaattagctacttggtactggaattatcttttgtgaggataaccctgatatatgagctgtattttcatctagtaaactaggaatatgaacttattgtcagaaagatctgctttaattccattttggggcctatgtcctattttcagctttccatgagttgtccttgctttttccatcatctgtgtttatacagcccttatacctactcctgagctctatgggtcccttcactagactaaagtgtggagggaatagactatatcttcagttttgcatcttgagtaccttgttaagtgccaactacatgttatatatgaatttagtccttaagtgagcaggtataaaccagaatggggttctctgctgacaagctatatgctcttggccatttggcttctccaaatctcagataatttttctgaaagagtgatgaggaaatgcaataatctggatcaggtatttttaacaaaaccaactcctcataagctttccttaaatattagcatctccctttctcctctttcctcctgcaactctccttacttattattgccattatttttattattaattttcactcttatgatatggattctgtttgaattaaactcaaaatgttatatatgccatagatactcattaaactctaatcaatgaattattctcattgagcctttatcaggtccattgaacttgttaatgaatttaattttatccagacgatagttttgtgaaaaatattttagtgtttcctgcccaggataaatttatcctaaaggaggcagggcggcagatgcctgagctgttctttgcagcttccttacagctgaatgtaaggacctttgctgtcagcttctttgacttgtttgtgtattacctgtcacaatgggtcttttcatgattacaccttcaccacttcactttatccatgtaataacacctcatgtgatttgttgttagtgataaatatcaccatgaaattttaacagtgatctatttattaaatgttatatttctaggatcttgatggtgaaatagcctgtcttcaccatctacccttaattgtttagataaatatagccagggtattatcatgtaaaatgcaaaatgataagcaaaagtgtgttgattaaatactttgtggggttaaaaaacaaaggaaaatctacaaaatgagagcaatcctgaatctgaaagttaattatattgatgacaaagaagcatggtaaaaaaaaaaaaaaaagttgtctataagtgagcatgtatgtgcaaacacaaatttttgaagaatcatttcaggattgacagtaacttacacttttctagatagtaagaaggaataattcattctcggcactttagtcattgcttcattttactttctgagaaagtcttatgcccgcaagcaaacctgatgaaagacatataagaacataattcattctttttagattcttactatcgttgtcatttatttccctcatgactaactgcggtagatttagtctcacaaggtactatatagagaatttccatgcaatttttgggctttctttaaaacagtgcttttcgacatcttttttgaatattttcgttctcatgattgctcttttctatttcacttttttattgagctgaatatagcaatttgaagttggcatgataccagtctatatttagtattctttcttgtaaaactcttctcaccatctttgtaaaggttacaaaggtgtatgattcacattttttctctcttgtcctcacagttcatgccatttaattgtagataaaaataattatttgctcgtattgagtctctctgctgtatctttcattgcagattgtggagagacgtttgtctaataaacaacaacaggattctcagaaaaatttttgaatgcttaaatctcttataatttacttttatgtaaatttctttactgcactgtgttttgaaaagaacatcttacctatctagcttcaaataaatatattaagtatgaatttctcatacaacatttagatttatagctttgtactcacgctgtattacttttcatttgtcaacattagatttcaggtttttcttgctaacctagttatatcactgagtggaatttattttcatatgactttcccatgcatgttgtttttaaatgtgtaaaataggttatttttgtaaactaaaatctgtttaaaatatcaaaactggaaataaatcaggtattatcctggaaagtctccagtatttaataagggcccttttccccccacacacttgtgtgtgttatgtgtggtgtgtttgtgtatgtgtgtgtgtatgtatactatttctctaatgctcctttgattgcattcctacaatttagagatactttaaatttcccccttcactatattttttaaaaaagcaacgtataaaacattacatattttaggttcagtatatttattgctgatttagataacatggcatgatgtgagatttccccaccaaattttcagccctgaaattctttgggtttgaaatattcattttctaaaagctttctggagaaacgtgattttttttttctgaattggagaatatgtctgtcttttgacttctaaaggtaaatttgttaattggctatctcctaatgagatgtctggatgagatttagaagagcatgtaaaaggtgaagtataagatagtatctaaatatgggctttcatcaatgggagaattacacaaatagcaaatatccaagagaaggatgagcacaaaaaataagttattacttcaatattatgaaaataagattaaattaaagtattaataataattattactacttttagtgctcttccttctcccattcatcactatttgtgtaattctccccactgacgggaaactatatttaatattactaaatatcaatattgtgttatataagcctatttcacaatttatttaaggggagtcaaaatcacaatacatgactgaaatggaggtgagattagtttggcactttatgtcatcatcagttatttatcgtctgaaagctaaaaagtgttcaattacacatcatgcaatttttggcctgagagtagtttgggtgatggtttaaaggtgcatctaacatatgaatgttgctttagtgatgggatcaaatttctggttcagaaatagtccaagaagcttccttgcattgaacaactggagtcagatacttcttatgttttattcatatatttattcattgaacaaatgtgtactgcacaccaactgtacatcgcttctttgaacaggtaaacaagatctggctttttgtctcagcgacttatttctactgatatatgtcattattcaattgagtgacacaaatctaggtagtttaaacaggaagatatcatagagaggaaaaatggtgcttgtaaatcctttacaagagctggaagagaaaatgtaaagaagtctaccattagttcttgggttcaccactggctttcaaagaatcagaaatgtcagctgaaacccagatctggaactacagtagactctactgagtgatcatgtctacttgcagcaccaaagtaggtgttttattgaggaaaatctagaggctactgcaaattcttttttgtattgaaaccacataacttcatgccattgtcagaaataattctgtttatcttctgtgttgtacaagtgcatctcattggtggaaactaagctgtattttgatagatccatgttgggataggagccaaatacagttcctaggcttatgctttttcatgcattgaccaaggaagaaagagataagagcctttctttttttttctttcttttttttttttgtaattgtcatgccagtcatgctagagcacttgtgatataggagagagaagaagaggggtaaggatttcaagtgccaacacacaagcattcatctcaggcttaatgtgagaaagacatttctaagagaaaatgtctccttattgactcacaattcactaacagaggaaagctccttttaggctggcaatgctcagaattgttactggtgtaccttataccatcccatgttttcagtgggaagaaaggtagacattacctaaagtagtcttctctgaggtttctagacattaactcagtgctttgacattatttaatgcgcttctgacagctgcccttcgaaataacacagctgtcctttcaaagagcatagctatcaataccactgaactatatagaacacctgtggccgggcgcggtggctcacgcctgtaatcccagcactttgggaggccgaggcaggcgcatcacgaggtcaggagatcgagaccatcctgactaacatggtgaaactctgtctctactaaaaatacaaaaaattagccgggcgtggtggcgggtgcctgtagtcccagctactcaggaggcttgctgtatcccagctactcaggaggctgaggcaggagaatggtgtgaacccgggaggcggagcttgcagtgagcccagatcgcgccacggcagtccagcctgggcaacagggcgagactccgtctaaaaaaaaaaaaagaacttctagtttataaccacaaccaggggacctctgtctgcatttcagtttgcttaatcattagtctcaagagcccaatatcctccaagaaactggcatgactgaaaaaaaaaagactcttacctccttagtcaatacacagaaaagcataccatctcacatgttagcttttgtcctcttctaaaaggtaggtcacccgctatttgtgcatctttctgctgacccaactcctcgtgaacttccttcttccacaataactttacttctctgcctgaaacttctgcattgggatacttaacaaacagatagataaacagcaaaagaacaaaggttctaactgctgcatcacccaactcttcacctctgtgtgtgtttttctttttttaataccacccactcccagactttatcatccaaaggtcatacttgctggactgaattatagattagcctaatatagacattagttcatgctctttcttctatcaaatacacttctattttttcctccctctatcctatgtcatttcacttttattcctcccttacatgttagcctaaatattacttcctaataagaaacccttctttgtcacctgacgtagttttctaggttagtttacaccattaatgactttcacagtaccctgaattacttctgcacagtatttatctcaatggtgtgtgtagttttttgtttagtgttattaattctgtaacaatataagtttttttgtcagtaggtctgcatttatctttttacacgattatctaaggcataaggagcacttcataagggtatactaaatggatggatagatattaaatacaccctaaaatggaaatattcaaggttagatggctagtcatcccagatatgtagtagaggaaacttttagggtgttgtcaactctgagactgtgcttttgctaaatgaaaatgaaagaaaaattaaaatagttttataatatggataaagtagaaacaagctaacaaaatatacagctgagtaaagtggatttgaggagaactttaacattgattctaaattgatattagcataactttgatttcacattttgttgaaaccttatgcttgggagtaggaaagaataccaacagtataggcagagctaaaagagaaaaggaaaatatgaggacagaggtatgaaaaaacaaggtccggtatagaaatcaatctttattgatcaaaaactgataatggctcatgctgcttcttgttgataaacagtttcaccggatggccattaatccaggggcaccttgagctatattctaactctaatatttggttagatcccacatgacataccctaatttctgggtagaataaagcacaggactgccaagaagcacctgactaaatttctagaaaaacttaacttgtcatggctgccaaaaggatatcttattatcccccaaatttccaacttcagaattcaggaatccttgaatagcataaatgcttaattctaggttattgttatgaatttattatttgtgataatgattgaaaattctactttcttatgggtgatgtagcttgatggtgcttatcttctgataaatattattaatataagaacctgtatttaaagcatctgtctgtggagaacttaagtatcttcacttgttaaaaagcatcatttaatttctatttaatacccttatattcctcagaaatgacctaaactgctgagactaaactgagggatagtgaaataaaaatggtgatttacccaattaacacagcaagcgagttgtcttattccagcatgtggtgggtaattgtacacaaaatacacaaaccctgctaagtgtactggcattaatttgattcctggtaactatcattgggaatagcatcaaagttctaaattagcagaaattatgaatacttctgtctcatcactctttgaatattacctcaagaactttttgaaaagtgtttgctttcttaactgcccctaccatgacattcatcataatgttgaaagagaaggtttaaattgtttggttatagctatgaataaacagatgagcagtctataaacttgtcagtctcctttcaagggtggagtagatgcaagaaaaatattttgtcttgcatttcttatatatttctttagaatttggaatataactggttctttttaagattgacagttgttttgagacttaatactgtttttcatttgttgaacaaatacttctacagtgcttaatatgcaccaggtagcgttataagtacttcctagatagtaactattaattctcataatagctctgtgggataaggatattgtccatctttattttagaaaggaggaaattgaagcccagagatggcatttgtaatttgcataaggttacgcatccgagaagtggcagaaccaagaatgggaacacatgcagccaggatcccaggtttgcaatataggctcctgtgctttgctgccttttactgtgagaacagtgcttctctgacaaacatttcctatatttgaggaaatcagtgaactatttggttctcattagacatgcaagtctatgatatattaagatttatgtgtgtctaatggtagtttaaatgtatcagataaaaggatatggtgaaataaaaatttatttaaggatcagatactctgactatgagactaggtgtactacccatgttttacagtgcaatcactttgtctctgtgagacctggtttattcttctttgactattataatttataattttaactttcatgtattataattcataacatttcagaatatgagagttacacccaatactactattatgattattagtattattaatactctttcacctagactgccaaattccagacagcatttctactcaatcccatatcttataataaaatgattgaaataattgatattaacaaaattttatgcaattaaaaatgtaaaacaaaggaaacaagaaaatatacaagaaccaaaaagtgttttaaatcatcattgaattcacatatgtgcctaggcacatagacttatactttacattaaggatgaatatattggtacaggtttatatactgttgattgaaatcaaatcacattcccaagacaaagaatgtaatattttattttaaaaatggcatagtcatatcaaaattatttcacactctagctaagatgtgctgaaatgcttatagtgatgccaatgttattgcttcgaaaggttgtttaaccttaggtaagctagagattttactaaaatgtgttattgtcacttttatagaaaaaagagtgaggctaggttctcctgaatttaatagaagacacacatgaagtatttcattgttataatttatgcttaattaagctagaacaacaaagagttaaccctctaatgttcaggtttctatacatttcagaactgagtgaaaactaatatctagaatttataaggaacttgaacaattcaacacgcaaaaaacaaccccattgaacattgacaaagggcatgaatagacacttcttaaaaaaaagaaaggcattcaagtggccaacaaacacgtgaaaaaatgcttaatgttgtcaatcaccagaaaaattcaaatcaaaaccacgagaattatctcacaccagttagaacggctattaaaaatatcaaaaaatattagatattggtgaggtcttggagaaaagggaacagttatacacattgatgaaaatgtaaattagtttagccattgtggaaagcagtttggagatttctcacagaacttagaactattatttgacccagcaatcccattactgggtatatatccaaaagaaaataaaacgttctaccaaaaacactcatgcgcttatatgttaatcacagtactactgacaatagaaaagacatggaaccaacctaggtgcccatcaacagtggactggataaagaaaatgtggtacatatacaacattaaatgctatgcagccataaaaaagaacaaaatcatgttctttgcagcaacatgggtgcagctggaggccactgtcctaagtgaattaacacaggaacaggaaaccaaatacttcacgttctcacttataagtgggagctaaacatgtatacctggacataaagatgggaacaatagacactggggactactatggggagtgggagggcaaaaaagctactattggatgagaacatgtgatgtttgattttctgttcttgtgttagtttgctgagaatgatggcttccagcttcatctatgtacctgcaaaggacatgatctcattctttttttatggctgcatagtaatccacacagggaggggaacaacacacatcagggcctgtcaaggggtggaggacagagggaggaggagcattaggataaatacctaatgcatgtggggcttaaaacctaggtgatgggttgagaggtgcagcaaatcaccatggcacatgtatacctacgtaacaaacctgcacattctgcacatgtatcccggaacttaaagcaaaataaaataaaataaaaatagaagataaaatgtagatttaaaaacaaaacaaaacaaaacacgactattgggtactatactcaccacctggatgacgggattgtttgtaccccaaacctctgagttatacaatatacccatgtaacaaatctgcacatgtacccccaaatctaaaataaaagttgaaattattcaaaaaaaactaatatgaacgaaagtggcaatgctgtagtgtgttactgattcacacaatacttttgggcatgacaaaatctcaattatttacttctatgagaagaggtgagtttctggattcccagttattggtcaatcttttttatttgtaagaatataaatgactcatatagcagcataacgaagaagactaggtaatcaacagtttctattggaccttttctgtttttgaatcgtgtattgatggatataatttatattttggtaatctgcatttttgtataacatgaatgaaaaatttgtaagaacccctaaaataaaggtatttaaaactgaacataactattcagataatatatataattttataagtatgaattttactggttctgtatatataggaaacatacatattacaatatcttcctaaactcaaatcattataatctgtgcatctaattgtgtttagaaaatttaggagacattcgagaaaccctcagtgaaataccttgtaatgggctgggtgtggtggctcatgcctgtaatctcagcactttgggaggccgaggcaggtggatcacctgaggtcaggagtttgagaccaacctaaccaacaaggtgaaaccccgtctctcctaaaaatacaaaaattagccaggtgtgatggtgcacctgtaatcccagctacttaggaagctgaggcaagagaatcgcttgaacctgggaggcggaggttgcagtgagccgagatcacgccattgcactccagcctgggtgacagtgagactctgtctcaaaaaaaaaaaaaaaaggaaataacttgtactgatttggaatatttagtttaactcattcttgttcctgtactataaacatgaactattactataatgtaaattgctttttgtaatttgaaggccttcaaaaatattttagtgatatgtgttttatgtgtgtaagtttgcttgttttaatcaataaaatatcttaagttctatgttgatttttaatttataggtaagtgcttaaccatttagtctggtaaatcatattttatcagtgtgttagtttcctactgctgctgtaacaaattgctacagacagttgcataaaacaattaaaattcattatttcatttttcttgagtttgtaagtccaaactgaggcccactgggtgaaaagaaagatgttggtagggcttaattcttttggaggctcaacaggagaacagagtgataaatacaaggtaagacatgatccagtcaatatcagttggaggttttaaaagccaaagctgattattaacatcacagtctcagaaatttgccttcaatctgtaatttgacttaccattcaatatgaatgatcaatagctcagcagtgatgacagacattagtgaatggatcataattagttggtaattataaatgtcttctggttccactgactaaagaaaagacacattagtttataaaatgaaactaaacattttgaatgttcatttggcatgggtatatcagttaacttacttggaaatggatatccttgttaaacaatgaagacatgcagttttctttatttctttccataaaagtaccccagtatgcatagtggtttaaaaaaaaaattacagctttaaaaataggaaaaggattggctttctacattattttgatgacattttaaagaacaatttatttctttgaaacagatgttctccatttctatttcaagccctttaaatgttaaaaaaaaaagtagaaataaaattgcatgaaaataagtactagagacatggccacatgaacatattaaatataagggtgagtgttggcaattaagacattttccatttggtggcatctacccttgttaacaatgatgtatttaacttggttaattttttgttcacaaatgtttattttatatttgtaatcaactgttgtgtttaagacaaagtgaaataataattaaaatattcccttggagctattgaacatatggcatattgaatcctctgttgattttactgtgacactggttctattttttatgttttctcaacatggttattttaagttttgctgaagcttcagtgatgagacaatcgtttagcagggaagaaaatcagtcaacctttatcaaatgtagcctagtctaagaggtgagtccgccatgctctaatgtctttcagtcaccttatttcactgtgcaacattatgtttttgcaataacagtcagccttttacgtggaccctgaatttcttgcccaaaaatcatgtattggttttaaatactgagattctatttttaaggaggggtaacatattaaactctctcagagttcttaaatgtaccatatttttaaacaatcagccattaaaaagcaacagaaagtttccctcaaagtcacagtatatcccagacagttatcattggtaaatcatttgcatccttttcctcaatactgaaaattcttataagatatcattagactgttacaacttatgatggaaaaatcaatgcagtaagaaaattaaattttactgatagcctttaggcaaaatgcaatgttaaaatgcattttagcttcccaagtgattcataggcaagggaagaaatggaatctgggttaattgtcagtagaaaatattttttttagactccaacaggcctgcctgtgaaccaaactctttctaatgcatatgttccttgattacttaataatgtgaaaataaccatcctaatctgatcatttgaaaggtcagaagtctgttctactcttaaaaaaaataattccccagtcaaaatcaatgaggagattctccatcttcccaggaagaggaattagcagaaagaaaatggattcatctcctgagcaatgtagcaatgatgttggaacccctagggagagaaagggttggggagaggaacagaaaaaatatgtggggaagagagacagagagagagagactggagctagaaaagaaaatacatcaagcaatgctacctgtctcttttgaagatatgacctagagagttcacttaataaggtttgtaatcaccataaatgaccactttcttttcttggcaggcaggtatagcaggcatggaattgtctgtcatgcattttactcatcctgaatctaaaataaagccatactttacaagactgatttaaaagaagactttttttgcttaattaccaaggagaatgtgcacagttaatttctagatcataaacaaagacactggtgttttgcaactgcttttctactttagatcatgactaaaaaaatctatttgtggccctcataaaatgcaatgactaggtagaacacatcattttttcctagagaaagaacttttttatgttcttttttaattttgtagttatttaatgaatggtaaatattagtatttttcccaactttcatattcttcaagattgtttgtttaattgtaattagtattgggaaattgatcttgatcatctttaaattcttaataatgatgattactaatctttgaaaggacctacctatttttgttgatgtctacagtgtcaaataattgggaagaaaattattttatgttttcaagtgaaaatagccagtgatttcagtaatctaaaggatgttggtcatactgcctaatctcatcatgatgtgaaaaatatttctcatacattaaaagtagtttttgtatctttcctgatgatttttttctttgttgatttttttactccacattgcacttttctgtagttcctgtgagatttattctcaaatacttttagaaagtcttcttaaattcttttttgtagacaaatgggaaaaggcaatttctttaggtaattatttttaaatggggggaagaaagagaatctaagatatatatatatatatatatgcacacacatatctatttgatgtgtgtgtatatatatacacacacacatatatatttgaaccatttataatttatctaatgtaatgtgaatttgatataagttaatatagaaatggaagcatactttcttagatcatataatgattcattttctcaaatttgctatgaaaacttcctgtgtaagctattcaaaatcttaatgaacattaacccacaaatgtatttgaatcataaactttccctatcttagccagagcttagaaatgatatattttttttcctttctctctagttgtagttgtatcttccttttactgataagaacctgaagacaggggtgatgtgtacttctctatagtcacagatttggaattatacctgtaccgactacctcagagtacagtaattatttcaatatactatgctgcttcatttcctgagaatggattagcattttgaagttcaacggttcctcttatgctttcctgacaacctggatagaatctctgtaatgacaaacttgaaactgttagttaaaaaaataagattggagggcagagatagacccagaaaacttaaaacaatacacacacatgcacgcacacacacacacacatctatcatttctcttacttcctgtgaacttcaatgaggtagttacaaaatcattgtatttgttatagatgtcttacatagaatgagtgtccctcatttgtttcaatatctaaatctctatttgaatttggattatatacctcaggttactgattttaacattcggaattcttccttggcaaactccccacatgacccatgcctatccacttccatcctgcttcactgtcctgggtttattaatttatttattttattctactttaagttttaaggtacatgtgcagaatgtgcagttttgttacataggtatacacgtgccatggtggtctgcttcacttactcatctttcttaccttccatgtctttactagaaacaattccgcttctctcacatttgcctttcttctctttcctactccttcaacttcctcattttcttatttattattttttcttatttccagaaaatacttgagatacaaatactatttccttttcactaggggccaggaaagagtccaggtgcgctgtagccccgtgcaggattcccagcttcctcccccttcagcctagcatctgtgtcttctctccatctgctctcaatgccttcctcctgaaaatttgctaggagtgtgtcagtcttcctgagccctggtctcttggtgaaagacttcctcctggctatgtctagttggccatcttgccttcctccatacaaatactgtttcttgttcctaacaaaatgactggacctgtgtgcactatgaggatatctgaactcaaatgtgaataattactggatgtgtatacagaaataaatttgcgaccttcaggattttgagttggggttacttgcatttgggaacttgtattcatgcgcaaacaggaatagatttattgggattaaataacattcaacattcgtgtgtgttttttattgataaagtaaaaaaacatcaaaatgtacagatataaaataagattaattcttttggtgaaattagcacatatttctaaattcaggagttgagaatcttgttctatttttgtgggggaggtgttggaggcatcacgtattggggactactcgtatactcacaagtaaggtatctgctaattctgttggtaattgcccagatcctgtcaaatttcagttgacaactcaacaatcactttcccatctggaaatccaatagtggttcttctatacagtacctcatctggaatggatgcatcctgttaattttctgcacacatgctataaaacaaaagcatcagcagctaccttgaaaaaaacttaaaagtttaaaaaaataaaaaaaagaaacggggcaaattggagtgagctctgtggatggacactgtttcattctggttctagagagacatcagttttccaccaaaagtgatgttgtttattagtaaaagctatttagcatgttcatgtctggagtcaatacatttacttgattcagtggagagttgagtacatagaataaatattctatgtaaattaatcctaagatttatttcttattctgaattataaacacacatcacaggcatggacaactgctttttttagttggtaagaatagctcttcctcccccatctacatgctgacagctttatgctatggatttcacttgcaattagcttccttcatcactgtttttggtcttgaggacatcattctttgtcccactttacctcataggaacaagtttaaagagttggtcaaatcactttcttcaaagtgtgatattgagatgatttgtccagaagacaatgatggtcaatgacttaacaatactgcactttttgtttaaacaatggttgtttcctccaggaatgacacttattagataatataaattgtgagtcctacagtagagctagatatactggcccgattatcattgtaatgattgcacagctttaaaacactcattttattgtatttccctatatagcccctaagcctggaagagttaatgattttccaaaaattctatactttactatgcaggtacatgagttcttagtcatacatattgagaaaatatggctttgtttcattttctaataatcgtggccttatggagttcaatgtttcctgtcactgtttctatgtctgtatgtctaatacatagagtaatgtattaggaagcatgcacagtatttcaaagcctcttatatcaggtgtccccaacccctgggcagcagactggtactggtctgttctgtgacctgttaggaatggggcctctcagcaggaggtgagtagtgggcgagcaagccttactgcctgagctccgcctcctttcagatcagcagcggcattcaattctcacaggagcatgaaccctattgtgaactgctcatgtgagagatctaggtcgcctgttccttatgagaatctagtgcctgatgatctgaggtggaacaatttcatctggaatccatccccctgccccagtcccggaaaaactgtcttccatgaaagtggtccctggtgctgaaaacggtttggggaccactgttttatatattggcattttacatacacagttttatagtaacattccttgatggtggtcatgaccactttacagatgagggaactgaggttcacagaaaacaatacagttccaaggtctgtcatccaataagtaagggaacctggatttaaatcaaggcctgtctcattccgaaagctagtttctttactatatcatggaaaccattaaaatttaacacagcatttatgatatctgatgacaacacatgaaataaaggtattatcctctactcataaagaaataccaaagtgtcctgaaaatatttgtatactaaagataggtataatgtaaatgtcagagggctgtggtatcagtttttaattaactttaacaaagtcaagtaaatttttctaaattaattttcttcgtatctactgaaacccaagtatgatctgatagtgttttcacataagaaaaatcagatttaaaaactgcagtcaataattaacctcatatattttaactagtttatattcttaaaaaaacaaaatatgctgcatgtcatatataatgccattcatattttaaaaaatacttcactataatgcaaatatgcataaaatagtaaggaagattaatggaaatgccacaaaaaccagcagcatgaccttctggtatattctgctgcacactgttatgggtttgaggccttcatttctatcgcctaaaatgctctggagtaaaggagccatatatggaaagaatagtaaccctgtacaaaaaaaaaaaaagaagactcaccttgtttgcaactgggagtgcctccagtaatactgacgacataggagatagtaagccaatagagcacttgaagcctgagctccaggcttgaagacagagtgacccttaatctccagtgtagtgtaaccatataaatgtcctagatttgggaaaatcgcatttgtaaattttcaggcaaaggagggagttgaatgggtagatggtcctgactagcaaaatgctggagaaagctgggccaggccatggaataaaataataaggttcccatcccactgtgtgtgagaatgtgtgtgtgtgtgtgtatgtgtgtgcatttttccagaacctgatctaagttcttcagaattccaatttacataaggtttgttctattcttccgctcatactatatgtgttcatcaatatctgtcctttcaatatctttttgtagtaattatgttgccttattttagaattgagagagagaacacactcctgatatgtctaatcttgtttggcaatttcagctccccataatcatttgtgacctttgggccactttcttgcagtagccaggtggtaatatcctttggacttcttaatgagtttagtctgataatgtattattacttgaatggtcaaacaagatggatatccttggatattctaatttatcaaaatggagagtatggataacaaatgcaaaaacagattacataaagtccagtgatttgtgaaggagaaagatgggtgagagagacccatgaacagtctccttaagattcttttttttattttttagaaaatccaagaatataagttaataattttacactttatacatttgacaaagatcatagttttatacgaaaatgacctgtttagtatatataagtaataggttaaggttggcttattttatagacatattatatatcataaaaaacacattcagagcaagacattgagtatatctaatgagtaacactagaactactgtgtcactttgcagtatttactatttggaaaatatttttctttacatccacaaatataccaagctcattagttatatgcattattttaatttactcgaggtaaagcacaccaaaatataatttacctattgaattgtggtcacatgattgaataaaatgcaattcaataattgtctcactttggagaaatatgtgtgattgaatctaacagaaaattaagaaaaagtggattatagagaaaatgttataatgaattacatagctatgaaattaatcctaataatttatcaaccctaatttacaatatatttgtatagtatctactcaatggaggtaaaaagcctgtatatatatatacacacagagagagagagagagagagagagagacatgcatatacacaagtatacaggatgaattttagtaactcagattaaagagaatgtattccaataagttattaaaataataatttaaaaattcagaaaaccaggtcatgaaagggagaagaaatagatatgttaaccgggaatactggtgtaggttttaaaattgagcactactttggctgtgagccttctggagataagagtaaagtcttactctaaacaataatgcacctgttgttacctgactttttaatcatcgccattctaactggtgtgaaatggtatctcactgtggttttgatttgcatttctctgatggccagtgatgatgagcattttttcatgtgttttttggctgcataaatgtcttctttttagaagtgtctgttcatatccttcgcccattttttgatgggtttttgtttttttcttgtaaatttgtttgagttcatggtagattctggatattagccctttgtcaggtgagtaggttgtaaaaattttctcccattctgtaggttgcctgttcactctgatggtagtttcttttgctgtgcagaagctctttagtttaattagatcccatttgtcaattttggcttttgttgccattgcttttggtgttttagacatgaagtccttgcccaagcgtatgtcctgcatggtattgcctaggttttcttctggggattttatggttttaggtctaacgtttaagtctttaatccgtcttgaattaatttttgtataaagtgtaaggaagggatccagttttagctttctacatatggctagccagttttcccagcaccatttattaaatagggaatcctttccccatttcttgtttttgtcaggtttgtcaacaatcagatagttgtagatatgtggcattattagaaataggaacacttttacactgttggtgggactgtaaactagttcaaccattgtggaagtcagtggggcgattcctcggggatctagaactagaaataccatttgacccagccatcccattactgggtatatacccaaaggattataaatcatgctgctatgaagacacatgcacacgtatgtttattgcggcactattcacaatagcaaagacttggaaccaacccaaatgtccaacaatgatagactggattaagaaaatgtggcacatatacaccatggaatactatgcagccataaaaaatgatgagttcgtgtcctttgcagggacatggatgaagctggaaaccatcattcttggcaaactatcacaaggacaaaaaaccaaacaccgcatgttctcactcataggtgggaattgaacaatgagaacacatggacacaggaaggggaacatcacacactggggactgttgtgggctggggggaggggggaggggtagcattaggagatatacctaatgctaaatgacgagttaatgggtgcagcacaccaacatggcacatgtatacatatgtaacaaacctgcacgttgtgcaagtgtaccctaaaacttaaaggataataataataaaattttaaaaaataacaaataaataaaataaaaaataaaaaaataaaaaataaaacaatgatatattattaagacaaaaaaatgcaaaaatcatattgattgtttccaataatttaatgaaaattaatgcaatggtttaactggtgacacctgaattctaaactatatacatacataattagaaggttaaatactgaacactaaatatatatgtatatatatagacaaaaattcagagacaaataattatttggtagtagaaaaaccaaaggtttttttaaaacaatgtgtatttaaaagtttgtatttactgttacagagagtcatgatttttacagtttattccatttgactatcagattctaaaataactttagagaccaactcatggatatcaaggaaaaacaaaagggtagggctataagcacccactctaatacaacctgacctgcttcagattgtctttcaaaataaggtcacattatggtggtgttctttggaaactggttacagataatatactataaaattacaattgaaaacttatcacttaaggaaatagaagttttatattctaattattttttgcagaaaagctatagtatttacctaataatagtctcaaaaattgaaatttgtattattatgaatatgtgatagattttttccttgaaacacattaagaagtatttcattttcattttgtgaccacagtaaattaagatttagtgaagtctggattgtcatatcatttattctaaaaatggttctaggtatatgaaatataaagattacttagtgtatctctgttcttaaaggcactggtagttcactgagagagacaatatgtaggctctcacaacactaattactaaatactaggagagagaaaagcaaacatactatgtaagcacatgggtggagagtcacgtaccatagggattgctcaggaaggaaagagggagtttcacagaagtatttatagagtaaataaaacattttaacagaatcctaaatattgagtgagaggtagtcatgtgaaaatgaaaagaaatgttttaatagtgctggataaacagactattcctatgaggataagggagagaatgattttgaaccctactcattccacattcaaatcagttcctggaagatacctaaagaagttacttaaaaacttggaagatgctatgagagtatcttcatgactcaaggtaagggaaaatttcttaagtcgcaaaaaaacgcaaaccatgaaggagaagaagctgacttcagttgcattaaaactaagaacttctgtccagaaaataccataatgagagtgaaaagaaaagacactgaatgagaaaacatatttccaatatgtgtaacagacagctaattaactaatatacagaacatagaactcctacaaatcagaaaaacaaccaccttaggcatttcacaaagaggaaatcgaaataaccagttatcatatgaaaatctacttaagttttaaaaattacattccaggttagttgcaaattttttaagtctaacaatactaaatattactaagactgtaaaacaattgggaattttcatacactgcagttgtaaattggcacatcctttttgtaaaatactaagacattctatagaaaagctgacaatatacacaccctacaatccagcaaattctagatagaaatttaaaaacttttaaatagacaccaaaaaatatacatatatgaatatatacagaagcattgttcatcatcttaaaaacctggaaaggcacaagtgctcacaaaggttgaattgttaaatagtgacaaattaatgtgatgagtacctgagcaaagaaatttatcaaattaccgtgactcccaacaaaattgatgaattctacatgatattgaataaaagacatgaaagacaatacatgtagtatgtttccattaacataaaactcaaaaatagacaaccttataccataatgttaaggatgtaaataggaagcaaaattatgaagaaaagcagaagaatgatgaagtaaaagtcaaattagtggttaaccttagagaaaaaggaggggcttgaacatttatatgtattatacatactgtgtgtgtgtgggtgtgtgcatgtatatgtattgtatttttctgtatattaacaaggaaaaagtgatgaagtaaatgtgtgccagagttaagaaatggaatttgcaaaggctcagataagtaaaagagtaagatgacgtctgagaaaacttagggctatagtaagctaggttgctatactgggtataagttagggattggtaagaaaggaagcctggttactgctgatgttgttatacattatccaaaggggtgtgtttgtgtgtgtttaaaaatttatacagttccgtaacagcattttaaaattttgcagtacttactataaacacaatctcctaaattatttgttgggctgtttttctgaaagtcaatttcctttaccagatcataaactgtataaagtcaagattgtgtctaattcagcattcttaatacattatgcttggtccataatttttgctacaaaaataattgttcaattatacagataaatcttaaaggcaattatgaaccaccaaggaatatttatacagtagaaaaagagcattaaaatgatgaagttgagcatgagggagattacttaaaattttattttcataatctaatttatgaataattttaagtttctgtttgaatgatttggcagatgatagggtcttttggtgaaatatgtctttaaatagaaatacgtgcctacatttatatatatatattcctgtatattttaagtgtaatctttgagaaatcaaatttattatgtatatcacagtgtctgtaggcaaatgatgagcaatacatggcttataaaaaatatgctacattaggaattccttcatgtaattgattagaaaattagaggcctagaaagtttcaaatttagccaagccatcattgttggacttcatgccctaatatagtcaactggttatttatgaaagagagaagatgaagttagacaggttattaattaactgaatagcatgtaaaactttctcaggactatatccaaaaataaaatgaaaaagaatgctgtgtaagtattcattatggtctattcattaaaaggaaaactattctaggtgtttcaaatgagaaggggcaggtagttaatacagtaaattagtcataagagtttgaaaggctagaacagcaaaaggtagataagagtgaatttgggaatcaaaagtaatattggtgagcccctgagtctgcacccaattttgtgctattagtcttgcagttagccatggattcaacagggatgttgcctccattgaggctagaaatgctctaaaggatatagctcttcttaggctatctgcccttggaaagaatcactttagcccagctaatatggccacttccaggaactatcatactgctagaaacagaagcagaaaatttcttttttttttttcttttaatcaaccttcttagttccttcagtgcctcctactgccaaaatttaaaagaagtcagttacgaagaaatcagggaaaatatagttcactggaaaacggtttcgtctattttaaaattcggatatgaggctggactcagcagctcgtgcctgtaatcccagcaatttgggaggctgaggtgggaggatcactttagcccaggaattccagacaagcctaggcagaacagggaaacccctatgtctcaaaaaaaaaaaaaaaaaaaaaaaagaatagcctagtgtggtggtgcacactcccgagtagtcccagcactcgggaggctgaggtgggaggattacttgagccccagaggctgcagtaagccatgatcgcaccagtgctctccagtctgtgtaacagagcaagatcctttctcaaaagagagagagaaaaaaagaggatgtaggtaggggaaacaactggcacagatgatgtttcaaaataagtgggctgtagagtatgtcttttctatcaaacataattttatagatcttatttacacaggacatgtctctttaaacataccacaaaaccaatgctattttataaatagataaataaataaataattatgtcactctatatatgatataatacagttacttcaaaaattgttttactcaacatcaaaatttgttcaaaagcaaaacatcttatttatacaaccatttagacacgtaaagcaaaagtctgcacacctcctccaaaatttaaaagataaaaaaaaataacgatgataacaacaaaacaacaacaacaacagtgtttcaatgacagggtatttaagcataatttttgaaattgaatttctacattgaaataaatatattttaaataatgtaactaattcattagtaatatttatgataaaagttggaaagtcaggtaggattagctaaaatattaagagggaaacactggtttccatactcaaataatgagaaatatgatttgagtcttaggactgttggggtacacatctgtgcctgtgtcacaagtgtacatatggctggatagttttctgtctctttttttctcatttcttccttctggctattttcctgacctgaatccatgatgaatggcacattagaacttacaccttcataactttaacttcaaaaggaaaggattcctttctgccagctggattttaacaaatcataaggaagagttcttattggctcaatttgagtcatgtgaccaaacccaggaaaaccactgctgacagtcaggaatgctgtatttgtcctagcatgtttctggtattcagagcaattttccatgacaagtggggaattacacagatatcatgccctagggaatatttgaaggataggcattcccacagattatgtctaggctctgtagtagcctcacttccttattaggccttaatgtctcatcatttctataatttttttaaatgtgaatcttatatattaactacatactttaaatatagttacaacaatcatggctgggtatctatatatggcttttgctttttttctacaaatcattttacaaagcatgatataaatcaagtatctgagcaaatcttgactctaagtctccaatgtgcttatagtcacatgactgaaaggtggctcagaaatggaactgcagtacaggctttctgactcattgtgctgtgtcatttggactattctatgcatgtagaaaatttgagtcagtgaaataatacttgtttgcatggcacattacaattaacattacagttttctataaatatatggaaaataaatttaatgacgtattaactttctgaaagtacattcatgtactcatatttatgtgatatcaatataataaaataattattcaggatttcaagatgtttctattattaaagttttggatcatttgtatttcaaatagatgcatgaactaaaatgcttcagtaactttcaacttttattattatattgctgctcttcccttaacaaaacagacaaacatacagaacagttttctcaaagagcttttgttacttctaattgtgctgattatagacactgaacatacaggcagcaaaaaaaaaaaaaagttaacgaacatttcattacattataagaaaccctccattacgttgaagaagaactgaatactcactagatgtttctatttgagttcagagaagtggtcatagtacataggtaaaaagaacacttggcagagtgatttatatctcaagacagaccatcatcttcaggttcttggatatggatgtctcacatataggatgaaaggattcataatgagatagagcagtaaatacaaaagagataatggaatatgtttcactcctcaattaatgttatcagtttatgttttgcaagtattatactttctttcattacttacaaatgtagccttaaatattccttctttaaacaaaaataaataagagcagtaatacaattaaaggcattctgtggcattaattgacctctgaaacataaaatacatacttatttataagccagaggattttattatcctatatcctgtgggatatgctatagtataagtgggggagatattaatattaaaagccaagagtcagagaatcagctgaagtgctgatggatcatgtaatctcggttcttcattttacagagaaggaaattgagtgcagaaagattatgtcacaaaacaaaaagtgaaaccttctgaggatagaaagattatgtcacaaaatagaaaatgaagacattttccttctctgtctattgcactttgaactgaatcaccacacagatttgggagtcctgggttttattcctgggttatatttggtctctattgaatctgtagccttgaacacatattcattcaacaaattttttttgaaagactgatgtgtgctatgcagtattctaggtaataggggtgtaaagatgataagtgcatataatcacgttcagtataatcaagttgcagtggagaaataacacaaattattcaacactgatcattaaaatcaatcaaacatactaaagggaatctgagactactccatgtcaaaagtatctttacatttgctaccatatcttaaatatacttgttaaataagtgcttcaggtcttctgtttccatcttataaaacgaccctgacagataagtgctactattcctacttttcaaatgaaaaagtcaataacctgctctaaagtttcacccagcttaaaacagaagacatggatttcaaccatgggtctgtttaaaaccaaaatctagacaccatctaaaatacaatgctactgttggttgtcatttttgcattgaagtcaattttatatattcatggaattagtatttggaagaattgaaaaaaatcaactttaggctcactacgaaatactcatatttacactttatccgaacagaatttctccccacccaattcacccacattcatcaagatcacacttcttctaggttaagcactctctgaggtctgtgtcagtcttgttcagcagaactttccacagtgatggacaggctctatatttatgctgtacagtatggtagccactagcatcctgttgctattgaacacttgaaatatggttagtgtgacagaggaactaaatttgtaattttaattggttcatacttcatttaaatgtcatttaattattcttggtttactgcgactggtacagcactttatgcactgtattctggggattggatgtatgatatttctttgagttttgcatgtgtgtagattctcttattcttactccatatttgattaaactggacatcaaccttcatttgaatttttgtttatttttttattgtttttattattatactttaagttttagggtacatgtgcacaatgtgcaggttagttacatatgtatacatgtgccatgctggtgcgctgcacccactaactcgtcatctagcattaggtatatctcccagtgctatccctccccactccccccaccccacaactgtccccagagtgtgatgttccccttcctgtgtccatgtgttatcattgttcaattcccacctttgagtgagaatatgcggtgtttgtttttttgttcttgcaatagtttactgagaatgatgatttccaatttcatccatgtccctacaaaggacatgaactcatcattttttatggctgcatagtattccatggtgtatatgtgccacattttcttaatccattctatcattgatggacatttgggttggttccatgtctttgctattgtgaatagtgccgcgataaacatacgtgtgcatgtgtttttatagcaacatgatttatagtcctttgggtatatacccagtaatggatggctgggtcaaatggtatttctagttctagatccctgaagaatcgccacactgacttccacaatgattgaactagtttacggtcccaccaacagtgtaaaagtgttcctatttctccatatcctctccagcacctgttgtttcctgactttttaatgattgccattctaactggtgtgagatgatatctcattgtggttttgatttgcatttctctgatggccagtgatggtgagcattttttcatgtgttttttggctgcataaatgtcttcttttgagaagtgtctgttcatgtccttcgcccactttttgatggggttgtttgtttttttcttctgaatttgtttgagttcattgtagattctggatattagccctttttcaggtgagtaggttgtgaaaattttctcccattttgtgggttgcctgttcactctgatggtagcttcttttgctgtgcagaagctctttagtttaattagatctcatttgtacttcttattaaatttcaatttttattttagattcagaaagaaagcttagtgtgtatcagcagtgttgggactatgagagattatttctaaaacaaaaaataattttaaaaatgtaacttaaatagaactgtgtggccattgattatttggaatgtgactgatgatggaagaactgaaattttaattttagttaaatttaaataatcacatttggttaatggatagcatagtaaattaatattgcaagtctgtatacatttggatgtgcatgaataaattttagaggacttgtataacccctgcaacttaatactataatttgtatgcatataaaatgtccttaagataggtttttccatcagatcctcatgggattcttaaaacttttaagaaatctttctcttcagtggaagcatttaaggtcttcatgtttttctattttctaagtcctgtatttaactcatattacatttgtttttactctcatgaagttgatgcttacttaaccttgtctccaagcctccggatgtggaaacctccccaacaaaatatataatatagaaataggattttcagtaattctggtaaaggtgatcagtttttcctttcacatgcataccttttaaaacataattcctaacaagatgtgtgaaaagagttgcaattccaagactgtgttgtttttctggtggttatttccttaaacaaatgctttgttttggtttttagtaaactagggaatattgtttttacatgcttacaaaattctcattgagtgaatccattcatccatccattcttcaaacacttgtaaaggttgtactatgtgctggtcactgtatttagcacttgcaatacaaaaataaaaaagaaactcccccctttgggaagaacctaccaaatagtctggtaggtagacaaaaagtgacataaattgtaaaacatcatggtaaatgctgtaataaattaactaggctgagaaatgttaagtagcttgcccaaggccacatggctaagtagctgcacctactgtgttctcaagctggagaggttggagaggggtcagagaaggttcagacaacatgatgaaatgtgtatgaaggtacatctccttggtggatttgctaaacactagggattcaggaatattatcaagaatcttaaagtcaaattacttttaccaggactctgaaacttttattattttttcctccatcatctacttataattaatatcccatctaaaatgatctatatcaaagatgattggattttaatacaatttaagataaatggtgatacttcaatatattgagtgtattagcatagtcttaaattactgttttagaatgtcagtgactacttttatcttctgttctttggggcactaagtctgaaggagtcaaaaagggcactctttcagcatattagccttgtccagtttaaggaatttgtgcatttcagtagcaaggactgtagtcagatacaaccatagaaattatgagtccagtatgaaatgaaaatgcaggggccatttgttccagtagtattaagaatttcaacaagattccaacagagcacatgtgttgggctcttctctgtgcagaatgctgtgcaaattgcacaggtcacaggctcattaaaacagtcctgatgataataattttgctataaaacatttacatgcttcttagaacgtgacataaatatatatgctatgtagtagagaagtctgaaacacttcttctgcaaactgtatgccttctctttggaaatgacctccttagcccttcccgaggagttatcccagctgcctacgtttttctaaggtaattccatatgttgctgcagtagactggtccaggggtaaacatttaatctaagctgagcccatcagatttctcttttgaaaatttgaaccaggaacacagaaatatactcaaagttttggaagcactgaaactgtacaggtttggagatttggggacagtgatagcagagcagcagtgaaaactttgtgaataacaagttatgggaaagctggatctaacttaagcaggtttacattttgctgagttgtgcagcccagtaaaaggaaaaaacaaaaacaaaatcaaacataacaatgaaagagaaaggttagggagagggaggagagagggagaaagagagaaagaatgctgcgttggagacaggtattcactctctctgctaatcttttgacaatactgtgttatgttgacattttatttttttaaatcctttcataggatggggcatccttttaaatgagagacagagaaaaagagaagcagaaaacagatgcttatgactttacaatatctatgaaattctttccatcccatgttttttgtttccttaatataaatcttctgttatttctactaatttgactgggttgcatttcttttaatcaaatggtcctttgtaatgaaagccatggtgtaatttcaattatgtgcttgaaaacctgaattacaagtaaattcagcctgtttttcataagtaatataaccatacaggaatgttgtccacctggtatatccgtaatttcataggatgtctgctatttaactgatatattacttgtacttacccgttttctttgtattattttttcaacgtttctaaccaagttagcatttttttcactcttgattgtattggatagcaaatcactatctgttgcttaaaattagttgaagtatttttactgtattgtaccaatccatcttcccgcagtacatttctaaaatataattaatctcatatttagattttaatccatttatctgcccacacctgttgttaaatgtgttcctcctgtttttagatgttcattaaaaactcaagatcttgtaaaaataattgtcaacaaaatacttattggtgcgatttcagggctctgttaaagtcaacaaaatttgagcctagggattaaaaacaggaaaagtaacaattattaaggacttttaaacttttgagggcctttctttaattacgttgtatcaccacgtgactctcagtattttctacgtttttccttgcattttaaataggaatgttagtaatatatgtgccctatagaaaatataaaatatacctaaaatgatatagtgtcatggaaaaacactgttttcataatatcccccatttgtaaccaggtttagcatatctccttccatgtttttttttcctaaatatttaccactctattaagatcacatacattgtaaaatttcgaattattttacatttctacctaacattttgtatagctattatattgataggaaatgatctacttagtaatttctctaaagtttgacatttagatcagtcctattttttgtttgtttttactacaaaaatactattgagtaaacatctttggttgcaaatactgattgcagtctcagataactttttaggatgaggcctcagaagtataaaaaacagttgcaaaaggtatttatgttttaaaaactattttgttactgaaatttgttgtaatctgaaggtttataattaatatgtattctcatcaactatgctatttcatttttacttcactagcatacatttccctgtattttctctattctcttcacgctctttattcttctgccccaccatgacctttttattttattcactaatttgatattttcttagtactcaatatttacaatgtcttttacttgaaagaatcttagaggaatctagtttcttatttgtttggcagtgtttattctgatgattgagttttgtggtttttttctagcacttgtttgtaaaacttcttttcaatttttaaaattatctgagtattccaaatttcagggcatatttgttttcatgtaataaaaaggatttgtctgtgtgcaaaaaggaatacattttcaaggccggtaattagaatgttgagtattcttgccttttgtaggagactggtttaccctaatcttgtttgatcgaatgtagttttggaggtggggaaaggcatgctagggctgcaaaaacccaagtgctcctaatagcttggatttcagcccagaactgcaagggaatacccccagttaagtttgaaacacatctgaagactaactgctattgtgtaataggtaatatcttccttcctattgatacaatttgaagtaagataaccattttttaggtatatgataaaacgttttgcgaattttatttgttgtacctgtaactaatgagtttgtcttttattttcttctggaagcaccacaacatactccttactttgacaaatatataaggcttggttttagctatgtaaaaattggataatataggatttggaatcaggtcatttttagatattttaggttgcagtggaaaggttttctgacagtagtttaaaggttttttgtgtgttgtttgtttttaactgatcttttacaaagactctagctggaccagtcaaataaattataacaatttcataatttagagcaatggaaatgggtggcaatttaatcactactctaacacattcttatctaaatggtagacatcatgatctttagaaatgtatagcctggagcggtggctcacgcctgtaatcccagcactttgggaggcccaggtgggcggatcacgaggtcaggagatcgagaccatcctggctaacacagtgaaaccccctgtctactaaaaatacaaaaaattagccgggcgtggtggcgggcgcctgtagtcccagctactcgggaggctgaggcaggagaatggcgtgaagccgggaggcggagcttgcagggagccaagatggtgccactgcagtccagtctgagcgacaaagcgagactccatcttgaaaaaaacaaaaacaaaaaaaattaaaaaaagaaatgtataaacctgttaatcatctttagggatgtataaaaatgttaatagcaaaggtcaaataatatattatcctggaaattggaattctcaaatacctgatgctgttatgaaactagagggttaaagaaaaaactgtggataatattcaatgatcagaaaaattgagctggaatatttaaattaataagggaagagagtaattactctgaaagtttctaagtatgttttaaagccacacagatatgaaaaagtatggagctaagaagattgcacctggaaatggtcctggaaattatttatagtttgctgcttctattttgttcaggtgaacaagctaaaggtccatgagattattgaatgacttcaccagagaagtaaaatccattggggaaaaagtaacatcctgaaaaagagccaatttaagtgaggaaacatatttccatttaagggcaaggaacagtagagtttaacggcatgcagaaagggttgagttatacactaaaaggtctcatcattaaaagctcttaatccagtagatttgggatggacatttgcatgggattaagagattaagaaatgtaactttgtgatgttcttgtatggaaatcaggtcaaacatgtttcccacactacttatccaagaaaatataataaaggggatattaaagaacaatattggtagaaaaaattaaaaacagcagtctcccagaaactgagtttaccaaaatgtaaatttttagcatactttaactcagtaatttaaactgtataaatctaacagatatagctgtacaagtgagtaaaaacatatattaattacattcattgactaatttgtgtaactggaagattttaaaacactataaacattattaataagaaaactagctgcatagttctttctccttctctctctctttgaatatatgtgtgtatacatatatattcacagttcttaaaatgaattggatttgtttgatttatacatgccactttagaaagagtcctaaaatatattgacaagtaaataaagccagatgaaactcagttgcatatgaaatgattttgtgttataaaaagaaagtacacaggtgaatgtctatccttggagagaatatgtacatacttgcatattttggaaaaatctctggaggtatacataacaaacaagttatagctgtttctttttggaatacaactcagggatgagaattttaattattttttgtgaactattttatgtgtaggatttttttcctgtataaccattacatctttaagtaaaaaaaaaaaaaataaagattgttaacatatgagtctatgacttgacccatctcaagcataatcacaaaagtttcagccttctaggtgtttttcattttctgctaggatctaagatatgctcataaatgatcttccacatgcaattattactttgctttctgcctgggtggggactgtgctgtatcctactacattctctcctccttaggctggatggacaggaatataacaaatccagatgtgcttctgtgattctcagcatggagatgttgctagtgatcactatgatgggctcagggaatggtcaactggaggcacagactgcctcagctgaattcttgtgtcccactttgaactgtaaataaatctaccctaggacaaatagtcatcataaactccatcatcaagactactatatcaagcaacgtgaatctccagaaactggattgtatctattgggagagtcatgggacccaatttaggacaagaataggtttccttttttccatacagagaagataggaatgcctcaacctgtgctgttgccatgtgaagatcctgttgcttatccaatgtgagttttttttttctttccatgggagagcagaatggccacttctttctcttttctctagaagactgaaaggaaatagaaatctcctgccataaatctgcagtgctcctcttgcattcagatatgttattttttgacaacagaatggaagttggagagaggaaagagcaattggttgatctagcgtccacagtggtagggatataaatgtgatgcattatgggattctaagatggctggagataggaggaaaaactgaaaaacttaacaaaagggtcaagacactgttacacatgatcatgtagaaaaaaaagacagaagaatgagaagagtgtgaaataataagtttgggtcaagagcatgatggagtttaaggtttcagcactcaagaaattctctgtgattgcaaaattaagagtttggggagcaataggtatccaaaagcatggtgtgatagctcattcatatttagagaatttagaaacttttggactggaatgatgataccttaaattcttaatacagataaaaaagcttggttttctgttctattagtgtcgaatggcctgcacacactaacttggagttacaaaaaaatgataccaccacctcaaaactccattaacagtgtgaataggaggatgaacctcttgaaatgactgcaaaattgtactaataaaaagagacaatcattcatttgagccaagtgatataacatgaatcctttgaaaatttgtgggagagatgtttgcttgaagactccaaagcacctccatagagaagtgatttggcattaggtgttgaaaacatgcatgcaaagtagaaaattcgactgagtggatgaatgtgcagaaagggagtacttgaagtagtaaccaaacatggtagaaatgaaagacagcatgtttcaagtctcaggattctgaataatgtaaagtcatttttcactagttttttttctgggcatatgctggtactttctcagcttggatcctgccaaagcccaacatgaatggtctggaagcaatagtgggaagcaagttgtcttagttcattcaaggtactgtagcaaaatgccatagactgggtaacttgtaaacaacagaagtttatttcttataattctataatagagccaggaaatttcaaaatcaaggtactggcagattccatgtctggtttatagatatagacttaatgcatgtggagagggcaaggcagctctttagggcctgttttacaaaggcacaattcccattcatgaggccttcttcttcaggaccttcataatcacctcttaaaagtctctactccctaatactgtcaccttcagggtcacgatttcaacatatatatttttgaggaacatagacattcaaaccatagcacaaggaacatgaatcacggtggtaaatatgtaatttttatttttattttttatttttggtgacaaggtctccctgtgtagtccaaactggagtgcagtggcataatcatagctcactgtaacctggaacctctggacatgagggatcctcctgcctcagccttccaagtagctgggactacaagtgtgtgacatgatacatggctactttttttaaggtttctttgcagagttgggggtgtcactctgttgcccaggctggtcttggacttctggcctcaagtgatgctcccactttggcttttcaaaggactgcgattacaggcatgagccactgcactcagcctaatatgtaattttaatgacagagttgtgtcaaagtctccatgctattaagggagacctggttttggttatgaagggcaagtttagaaatgtgtgtacagtgtacagccataggagaatgaaagttaataccgaagtgaataaggccatgggaaccatgccaatatatgtaatgatgtgtggaataacatttagaaagagaggtagaggtggagaaaaagcttatatctggccactggtggcacctttcttttgcccaaccaatttcagaagagctgaagctgagatagatagttctttgcatctttccagcatcccacctgaagcacatatcatggggtatttctgcttttttgccttaggctttctctaaaacacactctctcagctccaaagtgtatgtgcctttgggtttgtgtgcacccaaggaccattttcaaccaatgggtgaaatgagtctaattttaccagccttcctgtctttcagtgtggtaattctgaggtaggttctacaggactcctcagagggtctccaaaaagattgatttccatttgcctaaatcagcaaccagctcagtgaagcacactttattgtctttcatccttccctactccctcacttctgtttcctggaattaaatcctagactaacttcacccaaatcatcatgtcagactctgcttaaaggaaatccaaattacacctcagcatcacgcaaaatacccatgtagcaaacctgtacatgtatcctctgaatctaaatttaaaaaattatatatgtataaaagaaagtacttgatttattttgtcagttaatagtttagcaaaggggacttgtggatagtgaagaatgtttggaataggaaactgtagtgaaagttataggaaattgattagcaatgggttattgtcaggagcagctttgcatttgcatttgtaatcagacagtcccttaagtcacttttctcttctttcatctgtgatgcacttagatttcattgttctgaaaatgtcactgatgggatccaacctatccatcctcatcaatcctgccagaggggtgaaatacttggaaacgttcaaggcactatgcttaaaggaaagatgaggatgggtaacacaataaagttggggtaacaattttgaggaatgatagaagacacattggttgggaggagggaattgttctgtgaaccattattttttcattaccttttaatctaaattaaaaaaaaatctttttaaaacctggtctcttctctggaagtacagtggaatactcccaagaattatcagatagtttttatgaagaagacaaacaacatagaagtacacatggcttttcctagagctaaggatttatactctcagactagaatctccttaaggaagggagataatcttctggagtggatatacactgacggatagggacatggccctcaggggtctaaacataatgatctgtgtcaagttctctctgtagttctcagcctgactcttatattgctacgtacatactccaagttgcacctaatctctgctggaatgagtcctgctaccttcatcctgtagcatagccactttgtcttgcaaggatgggggagaaggggattaatttagactaaatgatagacaattttttttctattttcccaactttcccctttccttttttcctttagttaaaagctaatccttcatcggaatcaactcctgaaactctagattctcactggtgattagagggctgttcggtttggatgtagaagtctaacagggttatttgacacaacattgcattatgttcaactacttttaaaagcagtacttacattagttaataatacatggttaagaattaggaataccaggagacagtttttatatgctacacagaacaattattctataatcctgagtattacgcaggacatatattgataagacaaagtgtctataagttgatgtaattaatataatagctttccttttgaattgaacaaaaccacaaaatttaaacttgccataattgtctcatacatgaagttgcttgtggaaaatgttcaaagcagacacatgcaatttttttctcttattttcctttgcgatttaatggttatgtgttcacagttggttgctatccagaattttatgcacattaacagtgtcctaaagatcatttccatttctccagtgagatactgtgcttctttcccccatggagactttataattatgctgaaaccttttgtctgtgacattggcagttctcctggagtgcacacatctcccagcattctaagatgttgctcaaagttaatctagtggcaaaggatgcctggtttccttcacattctggaaatcactagtgagaaactcagtgctaccacttttttctttgtctttagaatttgcacaagttattcaaatcctctgtgtgattccaggagccagggacaccacatggtcagtgcttacgctgagactctaagctgtatttttaggtctttcagatgtttcacttttccaggctttcacagaacagctgagccctcattggtggtggctgagccccttgggttcccattttcaagtacttaagctcctatagtgattgatgccatagatgaaaatatatcagtaggcctgatatatgaagtagaaaatgtacatttcttcatttaatagctgggtggcagagagtatctccttctgtgtatgattgatagccaagttctccttattcttaggaggagaaaaagcaacaacttatatatagagagtaaaagattacttacatttaaaaggaaagctcattccgcatatgttctaatcttgagtcaattaatatatgagtttctgtcacttcccagacttttgcccaactttaaatatggttaagtattctaatttaaattttgtttacctctttttttaagctttttaaaaagcggaggttcactgtctcagagctgtgagaggctcataaaatgttttccacccacagcaactgctagagctctgtcttttctctctctcaatagcccatcagattaatctgaattatcatgtttgtaaacatgtctttagctcatgattgattacaaacttagagaaatccattactgaaattaccatgcaactacatctctattaaaacacgatcccaaccaaatatcatgttattcctcatatagcaccaagagatggaagataaaataacagtattcatctttaaaaatacagcaatctgtcattgttacttcctccattgcttagcatcttccacctcttctatatttttaaattcaccaagtgttgctatatgtacacttatatatatatatataacatatatgtatatgtttgttatgtctacagttatgtgatgaatgtcttgatggtacacaatactacttatatagaaaaagacactagaatgaagcatatactataaatatattattcatatatgtgtttcttatgtgtaaggtaggtgtcagggaagaggggaatgagatttttttaatctcacaggtcaaagttgctctaaacacatgtttattagacaatgctttcacatctgagaaggtatcaaaagactaatgtttttcacagactctagagcatggtaacatctttgtgtatctactggaggtcaagttttggtgctaaagttttgcagttctggaaacagacttagcaccaaatctggcagtgacttaaaagaaaaaaaaaacccttggtaagaaccattaatcaaactacattctataaatcaataaaaccttagaataatttgtaaaattgtaaaatgagaacaatttgtgaaattgtaaatgagaaactttttctactagcagaaatgtgttgctctctgtcatccccaccctgccccaattcttctgttgatattgaggtatgttataggttgacttgaaataagaaagtttatttgttagcctacacttagagaaaaagcgtcatatgacctgtaggactattatattggagtcttggtgaggcttaatgaaccctacagcagatgacctgcctccattaacagctttagtggtccctcacacgattaaaaaactcttacctgtacagtgctggtcaaacttggtcaaattttgcttcaagaactatggctaatatccttaatatactagttagggttgtaatggggaattttctatttttccctattttgctatgtatccatctatctggccgttgaagtttttgtacaatgcaaacattgttattcatatgtacctcttgcaaactatacttttatatgttgctagaaccctttctatagggctcacattaatattactaattgactatctattatgcttcattgataaggatgcaacattcaataaaaatggatcctctcctagaaaggcatataatgctttccatattttgacccaggaaattgtgtcaattagtaccaattgtttatacaatatttgttctttcctcacttttaactaatagaccctgatattttcctaggtgaaaatatgtaaaattaaaaaaaaaaattcccctacttctttgcagtaaagatttctctgtgactttgctgcaaccaatgagcaataaactaaagtttgctgaggcttttcagaaaattacctttcttctttctcattttcttctctcttttgcatagaaaatggatttgatagctagaactactggttccttcatggagacatgaggaaaatgttaagataatatcacatatcaaggctttaatatacacatgagccactaacctcaaactaagaacagctactttccagaatttttgttacatagaaaaaaaaataaatacatgcacatgtaatttgtttatgggtctgtttgtgttttcatttactcacaggccaatactatccctcactaatagagtaatgttggtcccaagggatatttataattactggtaggataaagctaatgatagttgtgtccctttcctgaataagagttgctgaaaatattcagggttttaaaaaaaatgttactttgtttgcactacttcttatatagtcgaatgtgctaagatgcattcattcctgaagatgagactctattataatatgccagcctaatttgatcagggaatccatattcaaagagcttctgctgtgccttgtgttccatggaataatagtacaaatttaggaaaactcacatataaaaataaatacaagagaggaagtaaagaaagaaatgccaagaattctattgtctagcaataagaaagaactttgctcagcttggggttcttccagagaaaacttctgaaagagacggctcctcaacagaactgtttttcctttatttatacttctacattcagttatttctttacactaatttgtgcaagtttctcttggtctatatgcataacttatttttgagtagttgctcaattaaacatggtatgctttgaatggaaggacaatattacctggatcaaaataaatacaaaatcaatcaataaataaacaagggattaaaataaactttacatttataatctctgtgctacaaccagttgaactaattagccataaaccagattgtattaaggcctgtgtgtatagtgtaaatagcccttttcaaaagcatgctaaaatatctgaaagaaatgacccctcatgcttgaaaactatatatctaacaatacagccacacaattttcatcttcatggtaggctatgaatacctccaggcatgcagggaagggaaagaattctctctccccactttgcatcttccatcagtaccttttgagtaaagtcctaaagacatctctgatatgcagcttctgaacaggtgccatatgtaggccttgtatgaaagaggggctccatagaaaccacacccttgtgggagtttgctctgcccagttgtcttagaagtctttccatatttaaagtggaacagtaaaatacgtctctaatgcagttcggtttattgacatttctcccttttacatatctaaaacttaaacttataaaagttaaagaaaagagagatgcgaccatttcctgaaccagaaaaaaattacattttatttatgtgcttgtttttctaggtaagtacgggacagaatttgagttctgaaattttattatatatttgaggaacatttccctatttttatgtagtaatgtccaaaattattttgtcattgaaatgtaggaccattagtcattttgctgataagcattaaagtgaaatatactcaagactttggctattcctattttcaagctgcatttgttcagtaggaagaaaacctacttttcaaaaagaggatgttgtcagattacacatttgatactcaaaaatctttaaaatgattgtctgacctgacgagctttccaaagtgtagagtgcttatagtcctagagccttaaatactggttgctggttagcaaatgatgggtgataattctcttttcttcagatctaggatagatcactgaagaaaaattgctttatcccattattgagagacatttaagtcacattatcatttaaaatgtgtttttaagtacactgttaaagaaaaaagcaacaatgaaaagaattaagaaaaaagcaacaatgaaaagacattctattatagtagtatgccgataagctgttgtatcacttttgtttctgttaaaatggtacatttttgtcttctcatttatataaacctctttcaaaataacatattttagactatcttatgaaactttgtccctgtgacagatttatccttagcactttatttctagggacaccatacataattttaaagatatatttatgatatataaagatatgtttatctcagaaaccttatatgtggaagtatataaatatgtagaaagagcctacttataaagtagggaaggacaattattgttccttataaactatagttctatttgtttttcaaagttattaagactatgatgatatagtaccttaaaggagtggtgtgaaaaatgttgaaatagtggtcagatcttgagacatgcattcattgggtggaacttttctatattattgctgccctcctctaccttcaatcaggctccacattggatcttttctatcacaagcagattccccgacatcttagcacttggatatacctctgagatatggttcaaaccctatctgtattttatgtttctgttaagatgttgcattgtggttatatactactattatttatgcaaacagtgaaaggttgttgactgcgatgtattaatagctcttggcaccagagccaaccatctctatcccttggcaagttatgttgcaaaagcttagagtttactatagttcaaatgtccaacttcaaaggaactagcccatcttgtgcttaagcacgatgccttaagacaacataatgttattttccaataatgctgatagatcaggaacacatctgtggtcataaacatatatttacatatatgtatatgtgtgtgtgtgtacgtgtgtgtgtgtttgtgtgtgtgtgtgtgtgtgtgtgtgtatatatatatattaaactcttcaaactggtagagttaaggaaaccagaattttatattttactcacacacaaattctatgagtaaatttttcagctctgcaaagaactcttagcagtcagaatttggtattttaattagattgttataaaggtgtctccgaaatcaaattatataagtaaattatataatatttcataaattgctttagacaaatttttagcttaaatgtagagttagacaaacttagctttatgccttcccctttatcatgttagttaaaaatgaaaagctagtggccgggcgtggtggcttgcacctgtaatcccagcactttgggaggccaaggagggtggatcacctgaggtcgggagttcaggaccagtgcgaccaacgtggataagccccatctctactaaaaatacaaaattgtcctgttgaggtagattacgcctgtaatcccagcactttgggagaccaaggaaggtgcatcacctgaggttgggagttcaagaccagtgcgaccaacatggagacaccccatctctactaaaattaaatacaaataaataaacaaataaaataaaaatacaaaattagcctggcgtggtagtgcatgtctgtaatcccagctactcaggagactgaggcaggagaattgcttgaacccaggaggcggaggttgtggtgagccaagatcacaccattgcactccagcctgggcaacaagagtgaaactctgtctcaaaaaaataaataaattagttaattaaaaaaaggaagaaaatctatagtaaatatttccagctacaatatttcactgtgaatatatgtgttaccaatataaaggtaagtgatcaacaactattataactctgagagaaaaataaataagaaatgtttataaggtgaaataataacaattaattaattctaataagacaacatcactaggtatttaagtaattttatcagatatgagcatgtttttaaaattcaacaaaatgtatttataactatgtaaggtattagaggtcatggttgagaatgaccaagttctaatatagagtacctgatttaaataaaatatttaagatttatgttttgtacttttctttaaatccttacatagcaatttaaagccaagcaacaagtggatagtaagtagaataccatctttcaaaccctttcagtgaacttataaaaaattcatgctgttttgtaatacagtatgagctgatgcagaattaccagagattgacaggaggaggctattcttagtacaaagcagctgtgtttattaagtaaaatttgtcattataactgcaagtagattttgattaaatttattatatctgaagtcttttattagtctttcaagataagaaggaattacaaaagtctatattttaagactttatttctcaccttgagaaataattggccacgtgcattaatttattaattactatgtttataaatggggttatgacctgttagggtacaaataccttaacaacataataattatgccaattaatggaacttcagttttatctgccaggggaaaatacacaatcaaataattgatgaaagttgtcaactgtcttacacttttattggtaaaaatctcatttgttattaaatatatttaacccattttggaggggtcttcagttgcatgcaataggctacatattataaatgtatctttatattaccttttatagaagttaaatttccatagaattgtctgattaaagtattaaacatgttagtgcctttttaaaaacctgtggtgatatgtttatttaaaattgtagttgtcaagacaaaaaataaatataaagaataacaaacatatatttatttaatatgtaataatggtaactaactttttctttattgacacaattatttttatttgtgtattatataaatatatataaggagataagaatcggaaaatacactcactgcataaacttatgattttttactctttaataatcaacagacaattgaaaatgcatttgccttaagaatttggaacatataatccttttatgattaaatgaaataatgtacataaaggtcctggtgactgtatagaactggaaatttataacacttaaaaaataagttccgtcaattggatatgtttttctgtggaaatgacaggaactgacatctttccttttggttgtcctgttctctcattatatctttaatcaaggcagcttagattgatgttacaatccttcttttcttatatcagcatttaaagaatgaatacattttccaactcttacagggcactatctatgggaataaaatagtataattaagtcctgttttatgccataaagcagataaataaaggaagcatatggaaaatagtctctttttcatccttgggtcaatgtgtagtgcgtatcaatgtttaatggtttctttttttacttgattcaattttatcgtgcatgaacttgagtgagtaattgcaggagctaaagccaggcaagctttcccatacacccctgccagtgcactgacctgcaacacccctggtatttcattctttggcctctgctaaggggagcctgccagtcattctaaattgtgccaaactgcagagtagttttatgatttgaaaaacatccattaagttctagtctgagtctacacaccacttcatgttacttgtaaacaaagccaaatttcaacctcagccttgagagttgtatacttaaacaaataaagaaacaaaaattaccacattctttttgagcagggaaaaatgcatccacctagccagtggatttggaacacattacaccttttagcctgaattgtaacattaatataagttacaaatgcaaactaaacatgtaggaatggatgaaaagaagcaagcaaaatgagatattttcagaaatattggttaaaaactccaaaactactacttagcaaattatacatgggaaaaggagtaataaaagataatttagtggtttgatttctttaaatcttcctcatacaagattcagaaagatggtaggcacattcagactaattgagggtaatggactttaggactgataacccagaatttctgacttttacacagaacaccaatttaaaagaacaatatgcccgggtccggtggctcatgcctgcaatcccagcactctgggaggccgaggcaggaagatcactttaggtcaggagtttgagaccagtctggccagcatggtgaaaccctgtctctcaaaaatacacaaattagccgggcatagtggtgcacgccagttgtcccaactactctggaggctgagggaggagaattggttgaacctgggaggaggaggttgagtgagccaagaccatgccactgcactccaacctcaaaataacagagcaagactccacctcaaaataaataaataaacaaaccaacaaacatagtttgccccactatgttgatttagtttatctgaatacaaagaagaattccagagaagtatttaaaacattgctgattaattggcatacaatgataataatgattgttgttgatacaccacagacgcaagatgggcccctcacctaaaatttgagatgtcaagattgatgatgccacccatacaacaagaggtgatgaaactcttatgactcatattgtgagctatctgggaaaggaggtccgcctccaaagcggatctgaaaatgtcttgacagagagcaaagagggtccacagccataggttttaatagtggttagtgggtggaactaagatgaggggcttgtgtgctcacagagtagggcttttatgtagtttaaacttcaagttggcaccaaaaaagggagctcatagactttcttatcagcttggccctgtgtggggcagaagggtgaaaggactgttgggatttgaaagctgtcagcagtcaaacataaaacatggagttagactttctattaaaatgataaacaggccaggcgtggtggctcacgcctgtaatcccagcactttgggaggccaaggcaggcagatcaccttaggtcaggagtttgagaccagcctggccaacgtggcaaaaaaccgtctctactaaaaatacaaaaattagcccggcatgatggcggtcgcctgtaatcccaactacttgggaggctgatgtgggagaattgctcgatcctgaaagacagtggttgcagtgagctgagatcacaccactgcactccaacctgggcaacagagcgagactccacctcaaaacaacaacaaaaaagtgataaacaataatgataaattcaaatgctgttttctcttgaaaggattgtccctaatttgacctgtataagtaagtgcaagatcaggatggagagaaaggggtattttcagttctcaggagcatttgcattaatgtggaaagagtgatgctttggatttagggaagagccattaccaaaactttactccctggataaggtcctccaggcacaggctggtgacccaggaaatgactgtgtaactggagtattagaagttagtatttataaacaccttaaacttctgagaaaataaggtagaagcagcttgtttaaaaaattccatgatactatatatcaagattcaagatatttatcagggttttcaattataagatctgtatactcaaaacataattttaaataaatttgttacacattttaagaaaaaataagataatgtctcaagtcctttatatgatttagattggaatctaaaagataaacaggattaacaacttgaaagaatttattcagtacatcctatatatgggagaacttaacaaaatgcaagggagatgagaggggagaatcagtgttcctgtcttatataatttatagcacagtcagaaaaccaatcatgtaggaaaactggcatgggaatcatcataaagaaattgtataaagattgtattttcaagtgtggtaaaattgtgtatatatagagagagggattaaccgaagaaagctcctgaaaataattgatttttattcaagcctggaagaaagtaaatggttacagatccttagatgaagaatagagagggggaaatatgaacaaagtcattgagaacagaaaatgtttttcttcatcatctctttctttacagaaccactcctctccctttttatttatttatttatttatttatttatttatttatttatttatttatttatttattttatgatgaggctttctcacctctctatccacagtgtcgtctcatggccaaggatggataagccaaacaaatcctcccatttatttgaacacagtgattggatagggataggcactgtgattcaagctgggccaatcagagttaagcaatttgattaagactatgcaagttgacaagcctaaactcagattcaggtctgtctgacatcaaggagctgggttttatattctacaccagaggttccaaattttaggtggaaggcttggtaaaacacagattgcgaggtgtcatcctcagaatttctaattcagttcgactgggttggggcctgagaatctgcattcttaacatgcttcctggttacactataagggtgctgatctggcaaccatctttaggatacctgcatagaggaataaggaaaagcctggcttgtttcagtttaagtcatgtaagatttagttattaggaaacttttatgagattataagagagaattttaagacattatgatgataaatataaatatggatataatcagaaactcactgaaggagtgttcactgaaggagaaaacagatacattagctaaatatttggaggaaatcatgtaaagaaaagcacaaaactttgatggatagaaggaatagacaatgatttgacagttcaagaaaaaacaatgtaaagaaagagagttgaagtaaataccaaaaatcattgcaatttcaattttgacaatttttagtttatgttaatgcccaatttttacatagctatttttcagccaattatgatttacatactcgatctcacattataaaaataagtacaacacaaattaacagcagcaaaaacaagttcaagaacaaaaataggaaacaaaacagaatgtgttgttgagctcattaacagaatttggaattaaggctgacattaacaaatcagtgtgtgaagaaggctgagttgtaagagatatcatgtcagctctagaataaactctcttaagccacttagattttttaaatcatttctttcacataagaaatacgttgttaaactatatgacctaatttagtgattataatctgatagatctcgccatgcatctttatttggtgacaatagtcctatagtttttagaattatttatctctaaaaaggagcaaatgctgttcatcccacagaatgctatttcagagctagaaaagaaatgcccaacccaattatgggatagtttgagattccccagaaggaaaaggagctttgaagctttcatttgaattacctaataaccgtactgctttactattagttgctggcttaggtgaaactctaatagctggaaataaagcattgccaattactaattagatttaaaagaaaattggtaccatgaaatagggcatgatccaatggttacattcaaacctcaggtagaagaagaggagttctgaggtattaacctcacttttaatgagacagctgacttttcacttatgttttttattctctgcagtgttccctgggccagtatttatacaagcaatgcattctgtgttaaccaggaacaggaagtgcttatcagcgtggagtgtgcattttttacactcagaactgcatagttccagcaaaacataaccagaaagcacattgattgagccattctaactctacttgtaatggatggtagttaggcaaacagatccaattcctaataggatagggaagtttatttaaaattattattatgaagtttctcataaacatgaaaataataaatgtatggattagtctagattttaacctaaaacgaattgtattctatgcttgagtcaacagcagcagaacaaaagaagaaatcttgaaaggacaaggagaaaagctttaaggcagaaattagaagaaatcaataaaattctgtgacttacaagagaatttctctgaatcccccaaatttttaaatgttcactatctgtgcacagatgatattacacttatatttatactttttcctatataattgctttaataattcacctgtatatgtgtatcacagtaatatttggagtttcttaagcagacatattccttggtcctgcctctgaagaatttggctctatggattaggatttggtccaggaatctaaacagtagtctagcacgacacccgctcactcacaagtgattccgctgtaagaggtttgctaaccactggaaaaaaactcttttataccctcttcacggttattatttccccaaatactttcctttgatttttgaagcccaaaaccaactgttttgtcgagtattaagacaagcatacctgtgtgaaacctatgtctgctttctcactttgtgacaatagaggccataaagaggtaaaagggtatcttgggacatattattccatatgcctggattcacctacaacagggagagttgctgacacaaggctagatatcaattttcaacttgctgtgcacagtttcatgagactgagatgagctgttgttttctcatgtaatgatgttttatatgtaatgagtaaagtcaaatatattatattcacttaatggttatcaaccatgacatctctgtgaaatatccttgtggctttatttattgactttttttaaaaaaggctataaaaactcttgctgtggtgacttgattatttcattttatgggaaacagtatacattttccaatgcccattagcaaagtgcatttttgttagacacttttttttaaagatgttggcatacagtaagctcaccagattacaaataaatggcattgttgaaacagctcacgacggtaagtagatgtaaattttctaatgaatcagccccaaatcataaaatatttagtttgtttaagggagaggatgagttgttaaaatggattttctatgctgaaatttgagattcatcaatatgaagcaaacagaaacaaaataacatttggacttttcccctcaattttttagttgaaaacctgactgaaatccagtattcaacattaaagcagcaatctgctacagagtggatgaatttgtgataaatggtcccttggggtttataaaacatattctccataaaacaagccacaatatgtttcttcacattagtcagttcctgacattcaggctgctgaagctccagtccactgttggtacctgccatcccccagctgtaaacaactctttgtttatagcagcaaagctcatacatccatttcaaggttttacagcgataaaaggctgactgcctacataaactgaagtgggctgcaatgttgctattttgtttattgctcttttattgcaatggtcaaatagttcctttgagaccagacaccagttttgtgccatctgcacagtcagtgtcagaaaacttgtgtcaactgaatcactgtggaaaatatttataatgagaggactaattaaatgaaatggtgcctctcaaattgaagcagaaatgcagatgattaatagaaaattaaaagtaatctgcttttttttcttcttcttcttagtagatagtagcatttgccgttggaaaccttgaagggcatgacttgtgtctgccaacctagtaaggacgaattaaacaaaaatttggtcctgttgtgttaaggttttatgtttccattgtgaaattcctatctaaatgcttctgaataattttaatcacatatttatgttaatgggctataaaaatacctgcctaggaagctcatatcaaaaccattgcttttgccttcaattatgttttctgaattagaaaagtcaaacaccaaaatcatcattttaaagtaaactttggtcacactattatatttaaattaaataaaatattttatcatgaaagttaataatgggtgaagtaatatgttttcttccatacaaaaccattgctttttaatttgaaatgggagaatttatctaatatgctgtattttaagtttttaactttggaagatggtcccatagagtaattttaacatctttttagaactctgatgttaaagtttaaaagatatggagagagtattgccatctttgaatcacattacactacaatgctgatataatccttaaacaacctgacaatgatagtaagggtttcccttaatgaaatattttttagaactcttcttaaaaatttaaaactttcagtgaaattggtttcaaataaaaatacatttcactatgaatattgaaaaaggataacaaatattttatatttattaataaataaaatattcccttagaaaaaaataggctacaaacttaacttttaactgagcaattttaattaaaaaaaacttcctaataaaaaaaggtgaaactagttatatgctctgaaatgcttataaaatagtgtttttattataaaataggtcactagtgttcagatgaaagtatgcatgaaatatggctttaaaacatagataatagtgaaaagtttttaatttattattatattcttactagcctgtcgattattttaaaaagctcttaattccctgatatctatataattgggtgcatattaatgcagatggaggtgttagtttgtatcattttgttatacatgggactattcattattaattcatattaccattatttattattatttataagtgtgtgacatgaggtttatgtgtttcatactctttaatacattactgaaaaaaaaacaccaaaaattagactaatttcaatacaatggaaataaatcagcaaagactcagcgagacagctgagtgtatatacccactctatgattgtaaatttcatctccaaagaattttctcatctacaaataagacacaatataagaatatttttccttgtcaacagctaattaattgctaaatacataagtgatgtatgatggctggatgctgtcttagttcaatttgtgttgctatcacagaattcctgagaccaggtgatttataaagaaaatatgtttatttagctcaccattctggtggccagaaggtttacaattgagtggtgacatctggtgagggcctcaggctgcttccactcctggaggaaagcaggaatggaacctgtgtatgcaaagagatcatgtaggagagaggaagcaagagagaaaaacccaggatgccagactgtttttaataaccccgtagctaatccattcccaggagaactcaccctatctggagagcattagagggcattaatctattcatgaaggagctactcttatgatccaaatgccttcctctagaccctacatcccaacactgccacactgggaatcatgtatcagcatgagttttggtggggacaaactaaaaaaatagcagatggctttctgaaaatttacatgaggagccataaaactgagggatcaggtaaatacatgaaaaccacaacctaagagaattttagtctggaagcattgaattttattctaagagtccttacacacaaagcaaaaaagaaaacttttatttattaggtaattctcattgattaaaagaataaaacctgctatttaggagagattccctggtgcaatgtttttaaagaaatatctaatatatatattagaaatatctaatatatataaatatctaatatatataggatttatatatattatataaatatatatatagtgtatatatataggacttttacagcacaaccacattcaacagaagtcttacaaaaggtgcacagacactgttcatctggccatttggatagggtcatttttatgtattttttatttatttatttatttattttaggaacactaaccaatgtgtcatttgttcattttttgtatttgaaatattttcagtgactttcttggcctgagattctttgccatactgcttaactactacatgactacaaccaaccagtttatgaggttgtccctctctgtcaattttacagaggcctaccagtttcctcagtttgttcttgtcatcaaccttaattagagtgatttgctgttcagctcacagcgtccccactgtcgtgacatacataaatttatcatagttggatgcaaacacataaaggtgggtgtggcactgaagtaatctaaaatcttatatataagcttctgcaacaaatatcagcttaaaagtccattaatttaaattaatgcttgttttacaaactgctaaatgaaattaggctccccaacaagtgggagagtaattttaaaataaagtattaaatgaattacatggcatgtaatacagttattcccactattaaataaggttaattctgatcacttggtgaaggcagggtctgttggagttctccatgggaaagttaccattgtccactttacaataactatagttagttctgctattacatttctttgaaaatgtaaatttgttggaataccattgatacatcagaaaattattgcagcaaagctacaattgtgtttgtttatttgtgatttttgtcatggagaaacactaaatgaacacagaaaattgcacccagttgagccatggcatgtagaaagacacaaaatgcatacatgcatacaccttaaagccagccatatttgatattacaactttgtatccaatgtcagagaacttccctttcaccacttcacaatgatttacaagctacaattcttccaacactcatgaatataagcaaatttcaagtctttttcaaggtaaagtgccatatttattgtagtttatatattacttcattatttaatatgctaccatttttattaggctcccatctattttaatgtgtcagtgatgctgtctttgagtattctgtctgtcatcccatttccccatcatccctatgtttttgttgtgcatttttgcatagtatggtgatttttaggaacacttattctgttatagcagaactgactgtaatatgatgtagatcttttaagtctgtgtatatatcccattttccattaaaattttatccattggccgggcatagtggctcatgcctgcaatcccagccatttgggagactgaggagggcggatcacttgaggtcaggagtttaagaccagcctgaccaacatggtgaaaccccgtctctactaaaaatacaaaaattagccgggcgtggtggcttgcacctgcaatcccagccactcggaaggcttacgcaggagaattacttgaacctgggaagtggaggttggagtgagccacaatcgcacagtggcactttagcctggctgacagagcaagaatctgtctcaaaaaaaaaaaaattgtctactgattttagcatccattgtctgtatcgattaattataactatggtggatttaatagggcatttttctaatatcttctacatttagcagtggtagtctgctgtgaggatgaactttcactattctcctgtttatttatttatttatttgatatctgttttaacatgtgaatttttcttctagttcaatacattatagttcactgtcatcattatttattttgattgtcagatttcctaaattaagcctgtgagagttcttttaatctggctcttattatcattatgattaattattattttgccatagtcccatcatttcctgagctctatgctatgttcacacacagctcactattgcaggctcattgtatgctttccctgaatcagcactgggatcagttactaccttttattgacttctttttctgacaataatacttagcattcaaaacgtggtaagtgtgctaattgctattagggaacacttgttctgaaaaaaatgtactttttgcaagacaaaagtgagtttgtaaaaaagatgtactccatttgcatggggtttaaactttttgcatttcttactttttcgtaaattataatcattttagatttttttcctctaaaaagtctaatttggtacactcctatttttgccactggatacctttaaataatgaactaagtataaaacctactctctaacatggatgtatagattaagtttgagtctaatatcaggccacaggaatttcaggctgaaagaaaaagataattttactatagactttattttagaagatgtattgtctaaacagttttctaaatattcttaagtacgggtgtcaatcactgcaatattttttttaaattgacttttttaatcttaagttctgggatacatgtgcagaacatgcaggtttgttacataggtatacatgggccatggtggttttctgcccctaacaacctgtcgtctaggtcttaagtaccacatgccttaggtatttgtcttaatgctctcccttctcttgccccccaccccaagacaggccccagtgtgtgatgttcccctccttgtttccatgtgttctcattgtccaactcccacttatgagtgagaacatgtggtgtttggttttgtgtttctgtgtaagtttgctgagaatgatggcttccagcttcatccatgtccctgcaaaagacatgaactcattctttttattattattattatactttacattctgggatacatgtgcagaacgtgcagttttgttacatacgtatatatgtgccatggtggtttgctgcacccatcaagccatcatctacattaggtatttctcctaatgctatccttccccttgccccccatcccccaacaggccccgtgtatgatgttcccctccctgtgcccatatgttctcattgttcaactcccacttatgagtgagaacatgcagtgcttggttttctgttcctgtgttagtttactgagaatgaaggtttccagctttatccatgtccctgcaaaaaacatgaactcattcttttttatggctgaatagtattccatggtgtatatgtgccacatattgtttatccagtctaaccttgatgggcaattgggttggttccaagtctttgctattgtgaacagtgccacaataaacatacgtgtgaatgtgtctttatagtagaatgatttataatcctttgggtatatacccagtaatgagattgctggatcaaatggtatttctggttctagatcctagaatagttgagttcttgcatttaaaagagatatgtgaatgcatcagctaaaataaatcaaggagatcaaatctattttttgctttcattgtcatgaaaatgaattattttatagcatgaacaaataaaaaagaaagaaactaaactaggagcttcactaaacctaagccataaatttttccggcacatctatttttcttaattaaaaaagtcaatttctcttttttccatccaccacaaaactaaccctatccacacaaacatatatagatataaatctgttttaattatgtttaatttcttttaaaaacttgagtaactaatatgaatatataactataaaaacatcatttaatgttgttgaaatagtatggataaaggagtaattgttagagaatatttaaagacactcacagttaaatctcaactgccttcagaagaagtcaggattatacaagcaagctatataccaatgttaattaatgcccaaattactggacaagttgtgtgtcaacttatgtgcatgccatttaggtgatcaaacatctatttatacagcatcaattgtcaatgtgtgctggccattgggctaggccctgagtatacatatgatacaaatgtcatattttgtatatattttaatagaatatatattcctaaatttgacattcttgtggtggtaaaagatgttataatatactgtaacaggttctataatgaaggtggtctccacattaatagtagcagcatggattatgtgtcaggtactgtttgaagcatttatatatgtgaactcagtttactctgacaatcctaagaggtagattagcagatgtggaaactggagatggggaggtccagagagtttgaataactcatgcacggatgcacagcaggtctgtggtagaacttggaatcagactcaggatatctgcctggagcatccatgtttttaactccttctttctgtggcctcatgatgagaacagtaagaaagaaacatttcttctggaggaatttagagcaggattcactgtagagatctgcatcaggctcctgcccttgctgagctttcaactcagtgtgtgtgtgtgttatagggtatgatgtgaagaatccttgttgaggttttgtgagaaaggaaattgaatcaatggaaggtttaggtcatgattagctttaatcttttaaattattatcaatatttactatggattatttagaatatagtgtatataaaaacaagaaaactataatcaagggtaattcacttgaaagccacataattatctttctcataatgccataaatattgaatatgcaactattatcttgaactaggcagaatgaattatatgcataagtaattattgctaaagaaaaatcccatctgctgatataatggctctacttgttacataaacttagaaagcaaatcattctagttagtgttaacggaattatcagtgtgaatcttcttatggtgattacatttgtaggtccttaaagttgattgaattttaggggaaattctcaaattaacctcctgttgtttcattttccagtggtttacatctctagtgttctttgtggttttaagctattctacatgtattaaccttgttgctttttaaattttatgacaatgtacaagccatttatggcttttctttggaattgtcttcttccagtctacctaatgcatttggaattagcttacgcttttattcttagttcctctttatcattgaatacataatctgtattcagtagttcatgtgttttgaaacagacctcccaggtgtgtcactaattattgttacctagtctcttatctcatttgtttgagacgggctgtttgaggctgttctttactgcatcggtggtaaactgagtcatgaatgcccctgcctctgtagtgggaggcatgagcagacttgcgagcatatttatctgttttaaagaaatgaagagaaatggcaaagcctgaaatcaatttaattgtttattcttagtttctgtctattcacaccatagcctggtgataaataactctttccaattgtatttgtcttttgtctaatttattactctgaagttggtgagagctatcttaagtaaatagagttgcttttcaattgtacatttatattaaataagactccttggagcaggctaagaggaataagaatagtagttagaaaggagaaactggatttctggacccatgttcctcaatttgttgccatctgcagatgaggatgaacacatagataatgaagcttttcctcacagacacatattatgcttgccttagccattcccctctttctgaggtttgcttggcaattctctcattgagaatcgacaagttaataaaatttccttcttctctactgcactactgtaactttaaggaacctcaatactgtatctattgccagtaggggtgggtggaagaaattgttttaaaatttgggtaactcttttatgtaaagggtattgaaagataattaaattaaagaacaggagtaaggagggtactgtgtggaaacttattaggaatatcagagaatgaagagattggttataagagatttctggtgtgagaaccaaaaggagttttgtataactaccttcaaaatattctccttataagctcctgaaataattttttaaaacatgtacatccttttacttatttattctcaaatctatcattttccttataagatgaaattggcatgggtatgattttcagtaattataacatgtttatttagaaataattattatacttaaaaatgtgttcaatgatatagccacactttagcaatattatactcacaatcatccatttttgaaatatgtgcccaagaaattattgtcagaaagagtacatgattttctcctttaattttcatttccttttatttctcaacagaacttcatctgaatgaaatgcgctattttattcttcaaagacttagttggtattgacctatagttggcagtgttgcccctcagagagactttatatcttagaacagtgtttttcaaaagaactttctatgacagcaggaatgttctaatcttcactgcttaatacaacacccactaggtcagataagtctactgagtaaattgaaatgtgggcagtaggctgataagctgaatttttaaccttatttacttttaattaatttaaatgtaaataaccgcatgaggttagtaactatgtcttggatagcacagtattagggcaatgcatttaacacaggatgtttgagaagtgggctttactttttgttaagtgggcgaagaacaaatgtaaaaacaaagtggaaagcgagaaccctgtgatgactcaatggcagatggattcttcaatgtatcagtttttcagggaaaatacacacacacacacacacacacacacacactttgaaaatctttgtggatccttccctgacttgtgaaaattgatggctcaagctttctggatatgtgtggagaatatttttattcataatttaattttatgatttctaaatgagtttatttcctcaagactctgaagtaagacaataaagagcttgcctaaagcaagaagcaaataacatcaacttagaactatgtgattagaaactataaatcaattacagttgtttaggttgtgccctgaaatcttaagtttttgttggattaattttcatatcatctgtaatttgtactgagtatataatgattgggtggcttggtatagaaaaagtactctgagcaagattagaataccaacactaagcaggtgaaaattctctgccattctttgcattgtggcatcctgttcaaccattatatagggagacttttatctgaaatatatctacatgtttctaatgttattattgcagggcttcttcagaaatttgtgaaaagaaatattagaaatatttatgaatttcatattttatatggcttgacaaatctgataactagaatcctgggaaattaaataataatttggataaatgtactaactttattctcttggaataaaagaactgtcaaaataatacttcttcctgataatatcatttgagagaaaataaagaccactaccctgaaaatagaaaccgaagcatttgtctgcagagaagaaacatatgatataggtcttagtgttgtgatctaccctactatgagcccaccaagaatatattacacttattttgcttttttttttagcatcatattttggtttgtttttacaatttacccctatctttttaaattcacctgtagctatgatttaaaaacagtaacaggtaccttcttttacaatgtaaaaatgaaataaaaatagcctataatagtatgaatttaattgaaaactgtttttagtagttgtccatgaactcgattttctcttctcaaagtgagattatacgttactaggggataaaacactcctcttaactgaaaaatggttgactgctgcaatatatgctgaatccaaatgctgaagagactatgtgctctcaatggcaacacatatccttattgaaaaatgtatttcttttaaagatttttgacggaatacaacattgacttcataaaggatttggtctgttaatgcaatgattttttttttctgaaaaatatttttattttatggcttatggtgttaggataatttcattttcctattttattaagttatagatacatagacataccatgttagcgtgtgtatgtttcagatgtagttgcttaaaattaaaaaataaaactagtaataaacttatcgtacagtaaactatgtatcaaacacaatgactttaaatttagaactgcctccacattttgcgctgcctcggaacaaatgtaaatcttgcaggtagtggtgtgatagatgctcccaagtgcctagtttctttggaacatgctaaggattgaacggctcctaacacatcaaatttacatgttgattcccttatgtaactgcatctggagatgaggcctttctataggatcggtggccttagaagaggaagaaagagagagtgtgggaaatctgtgcgtgtaccaaggaaagttcacgtgaggacttataagacggacaccttctgcaagccagagaaccacccttagcttaaactgaccatgttggcaccatcatcttggacttctagcttgcagaactgagagaaaatatatttcggttgtttaagccatcatacctgtgacctttttttatggcagcccaaacacactgaatgagcattttacattttattaattaaatgataaaagtttttggtatctagaatatatagttaggcccctgaaatcaaaattaccagcattatgtttgactttttacttctatcaatggacacatcatttattttcaaaagtaatcataaagagaatcaatagccatttatgtaaaatttcacctgtaaacaaacatattagagccgctttctctctctctctctctctttatttctctctctctctctctctccctttctttctgtctatatatatatatatatatatacagataaatatacttgaaaaatattgggggtattttattagaaagatattttttcttacagttctacctgcttgtttatattaaagggttgaagtcagacttattgtcagaaggatgaatgccttcattatgattgcagggcatggctgaggaaagaaaagactgaagtgggaacagtaggagacttgctgagctaggagaagtgttgcttgggacagttgctttgtcatagacacctaatatatcaaggcatgcaggaaatacacacgccttctagagaatccaggcaggcaacacaagtgttgattatacgtggtactatgtagtggtaaatcgtagcatttgttacgtgatttcatataggattttgcaatctaggcacactctgccttaaattaaaacatcacgatatgtacttaaaacattttaatgtatatttcccaaatgttctaattggcaagacctaccactctgattttatttttcaaccacagagaaattttgatgaagcatgttcattaggctgcattaattatacatccaacaaacgtgaaacaggtgtttggctgtaagaggaatatttcatcaaaaaattgattgtaaactagtacttcatattatatacttatttatgaaccccctcacagaacattaataaaaattatgattaaaaacctagcttctcatttaggaaatacccttcttagatgaacactgttgtatttatgctataaaataattaatatttctatttatgcattaattttttattttcaacttttttaaaagttcagctttactgtgctaatttcatcaaaattgagggttctcagactgaaagaaccctcagtttctttctcagttttcagtctgaaaactgaaattattcttgaacctgtatcatcatattgaaaataaagtaaaacattatatgatggttcaggttgagtctacccttcccagtaggtcacagttggtgctttcagagttataagcttctctcagtacatcagtcctttctgtaaaatctggattcacctttattgctattacttttaagaggcacaaattccaaacattctgacataggtaagtaatcaggtttgtttattcctttagaaagttcaagcttttggaaattacaccatgtggtgagaggtcttaaaaaataaaacaggctttctcagcctttaatagaaaagcacctctcaaaagctttgtgcaaattctgaattatcatatataagcaccactgaagaggacgcttgtgatgtccacaccacacacttgagggctgtgtattcagagcctcatattttactgccccaagtttttgcagatattggccctggcattagtttacaaagaatagtcccttcagagactccttagtgttaaaggcacaattccttcaatatccactgcctatggagtagcactgggaggaggtaagtcaggaagaccaaacctttcggtatttgaagtcaggtaccaccagtacctttccttcacacctaatctccctgttttccttaaatattatatccatctatgagtgtgtggatatacacatatgtatacatcccttccctaacagtttgtgtacttatggatcaaaaagaccatacagacatacctcagagagagtgcaggttctagaccactgcaataaagcaaatattgcaaaaaagcacattgtacatattttttggttccccatttcatataatgattatgactaaactatactgtagcctattaattgtgcaatagcattatgtttataaaaacaatgtacatacctttattacaaatactttattgctaaaaattctaacagtcatctatcccatcagtcggtcataatttcttgccagtgtagggtcccgccaccatgctaattgcttttgactaatctgggtggtggttgtcgaaggttagggtggatggctgtggcagtgtcttaaaataagaatgattttgttgcattgattgtctcagattttcacgaaggatttctctgcagcatgcaatgctctctgatggcactttgactatagtagacattctttcaaaattggagacaatcctctcaaatcctgccactgctttatttactaagtttatggaatattctaatcatttattgtcttttgaaaaatgttcgctacatcttcaccaggagtagatcccacctcaagaaaccacttcctcggctcatccacaagaagcaactcctcaccaattcagtctttaacgtgacattccagcaattcagtcacatattcgggatccatttctaattctagttcttttgctgtttccaccacctctgtagtaacttcatccatggaaatcttgaaccctgaaagtcatctgtgagagttggaacctactttttccaatctactgttcatgttgatactgtgatctgctcccatgagtcacaaatgttcttaatggcatctagaatggtgaatcctttccggaaggttttcagtgcacttttcccagatctatcagaagaatcactatctatggaagctacagccttatgaactgtatttctaaaataatgacttgaaagtaaaaatttactccttgatccataggctacatgttgtgttactgggcataaaacaacattaatcttcttgcaccttggcaactagatgcattgtcaataagcagtcatatttagaaaggaatctgtttttctctgagcagggtggtctcaacagtgggtttaaaaatattctatttactgtgctgtaaacagatgtgctgtcatctaggctttgttgttccatttatagaacacaggcagagtagatttaacataattctaatgggccctaggatatggggaatggtaaatgagaattagcttcaacttaaagtcaccagctgcattagctcctagcaagagagtcaacctgtccttggaagctttgaagccaagcatcgacttcccttctctagctatgaaggtctaagatggtatgcttcttccaatagaagtctgtttcttcttaattaaaaatctattggtgagtgtagccaattccattaagtatcttagctagatcttctggataacttgccgtagcttctacatcagcacttgctgcttcaccttgcacttttatgttatggagatggcttctttccttaaacctcatgaaccaacctctgctagtttcaagattttcttcttcagcttcatcacctttcttagtctttgtaggattaagagagttaggtttgtgctctggtttagggcttggcttaaggaaatgtggttggtttgattttctatgtagaccaccacaatttacttcatatcagcaataaggttgttttgctatcttattatccgtgtgttcactggagtagcacttttgcttcaataactcttcctttgcatttgcaacttgacaaactggcacaagaggcctagtttttgggctgtcttggcttttgacatgctttcctcactaagcttaatcatttctagcttttgatttaaatggagggatatgggactcttccttttacttgaatacttagaggccattgttgaattattaactggactaatttttgtatttctctagttttgggggcataggtggtttttggtaattaggctaatgttaatattgtagtgtctcagggaataggggagcctgaggagagggaaattgatggggggatgcaggactttggaacagtcggaacacacataacattagttaatcaagtttactgttttatatggacatggtttatgagtccccgaaacaatgacaatagtaacatcaaagattctctgatcacaaatcaccgtaacagatataataataataataataaagttggaaattttaagagaattaccaaaatgtgacacagggatgagttgagcacatgctattgcaaaattggcactgatggacttgctcaatacagacttaccagaaacatcagtttataaaaaaatgcaatagctgtgaagcatgataaaatgaggtatgcctctatgtgctaagacacattatactcagctctaagaagttatttaaaaatggagttggctcaatttctgttcatttaaaattctgccaaacattttgtttggcatatattggttaattgttagatgtttgaatatctttattatgttatttttgtaatgtgttttcaatcatcagatttttaaagtcttagtaacagtacatatatatttaatgaaatgtctagggcatggtaccttccccagaggagaattcgcaggtcattaaattttgtgaggttgctttttttttttttttttttttttttgtggaggaaatgagaggagttcttctaataacttctcccgctgaataaaatgacctagattttttgtgtactggcaaagctggaggaggatatttttacattgccattttgtcctcaagagttatctaactgttttcaccatatgaaatccctttcaagtttctcgtctgacaatgaggatatgctgctggatttgtagtatcagaaagctgggaggcaaaaggtaagagttagctgaaaataggagataagagtgcaggtttcttctgaccattaaaaaaataatctacccagaaaaagaaaattagcatggcatcttcttgccctgttcattatcttttatgtatgaagaggatttattttaattattttgaaatggctgttaaaacaatttcaattattatttaaaaaaaaaaaacaatgtaaggctgagcgcggtggctcacgcctgtaatcccagcactttgggaggccaaggcgggcagatcacgaggtcaggagatcaagaccatcttggctaacacggtaaaaccctgtctgtactaaaaatacaaaaaattagccgggtgtggtggcgggcgcctgtagtcccagctacttgggaggctgaggcagcagaatggcgtgaacctgggaggcggagcttgaagtgagccaagattgggccgctgcactccagcctgggtgacagtgcgagactccgtctcaaaaaaaaaaaaaaattgtaaatgatcttaacataaattttaaccttgaccaagctgtacacatttgacttttaattccttaaacttgatggaatgaaacatctttatttcacactcaatttccactggactgattgccaacatggtgcttaatttttttctacttgtaaaatttgccctacatgtaggtaattaatagatacgataagtgaatttaccagtctctggaagtgagatgtacaaccatacgccaggctcttcagcttccctaatgaaatgttcttcatgatttatgtagttggtgattgaaagatattgaaccatttaaaaaaacataaaattattatccttaattttctcactattaatatcaaatttgaattatttgtcaggtgatcagtacacaggtattcaataacaatgctattatgttctagttagaacaatggaatagaacaatggattgaggtcattgagtccattcacccatgtgacagttttttcctttcttctctaagtggttatagaatttatacctgtatatatttagtaatgttcatattcaatatattccaattcgtattcaataagttccaaactctgttcaaaactctctaccttagaaccagtggatctttcagcatatagaaaagtaaaattattcattttcattgacttatacagattctttaaacacacattttaaattcaaaaggtaaacacctataaatgaatattatgtcaatggagaaatatatttattaaaaagattactggtgttaacatttccaacttggaagcaaagaccctttcttctgtctttgtacattgtactctcaccagtaactgcaataacattatacacaaatgagaggtgttacataaatgtatatatgtatatagacagctataactatagatattgatacattcatatatatactacacataatattaatgtagttctgaaaattacattggacaaaatagtttgttctcttctcctaatctgaaaactagtaataatctatgaaggaaaaatgcaaatgacatgatcttatgtgtagaaaaccctagagtccacaaaaaatacttctagaaataataaacaaattgagtaaaattttagtaaataaaatcaacatgcaaaaatcagttgcattgttgatacactaacagaaaactatctgcaaaatttattatgaaaacaatcccatttaccatagcacctataagaaataatcacttaggaataaacttaactgaggaggtaagaaacttgtacactgaaaaatacaaaacactgatgaaaaaaatcaaatcacacaaacaaatggagatacatcccatgttcatgaattgggatactggatactgtttacatgtctatactacctaaaattatctacagattcagtgcaatatctgtcaaaattcaaatggcatttcttaatgaaatagaaaaaaaatctaaaattttttgtggaattacaaatgaccctgaatccacaaaataaccttaagaaagaacaaaattgaaagcattgaaattcctgatttcaaaatatatgacaaagctacagtaattaaaacagtatggtacaaacataaagacacatataggccaatgaaatagaatagcaaatccagaagtgaaagcacgcatgattggtcaactgacctttcacaaggttaccaagcatacaagattggaaaataatagtttcttcagcaaatggtgctgggaaaactagatattcaaatgcaaaataataaaattggacccttatcttacaaaagacacagcaataaactgaaaaggaattaaagggttgaacatgagacttgaaactctaaaactcctaaaagaaaacacagagtaaaagcttcatgatattagccttgtcagtgatttcatggatatgactctaaaagcacaggcaaattaagagaaaataaacaagtatgtctacataaaactaaaaaccttttacacagcaaagagagcaatcaacagagtgaaaaggaaacctaaggagttggagaaaatatttgcaaaccatatatctgataaaggtttaatttttaatatacataaggaactcctacagctcatttccaaaaatctaataacctcattaaaaaatgagctaagggcttaagtagagatttctccaaagaagacataaaaatggctaacagatatataagaatgtgctcaacatcactaattgtcaagaagtgcaaatcaaaaccacaatgagatatcacctcatgccagttaggatgactattattttttttaaaaaaagacaagtgttgatcaggatatagaaaaattggaacccttgaacgctgttagtaggaatataaaatgtgaaacaactgtggaaaatattgtggaagtttttcaaaaaataaaaaatagagctaccatatgacccatcaatcctatttttggatatttgttcaaaataatttcaataaatatcttaaaaaagatattagcactaccatgtacactgcatctctattcacaataacaaacatgtggaaacaacctaaatgtccacagatgaatggatgagtaaaatgtagtatatccatacaaaggaatcttactcagccataaaaaagaaaattctgccatatgtgacaacatggatgagccttgaggatattatgctaggtaaaataagacagtcaacgaaggacaaatactgcatgattccaaggtatgaaaaataatcaaactaatagaagcagtgagtagcatggtggttgctggggtctgagtgaaagagaaatagggagttactattcagcaggtgtataatttaagttagccaagatgaataagttctagagatttgctgtgaaatatcatgcctagagttaacaagactgtattgtacttttaaaaatctgttaagaaggtagatcttatattaagtattcttactacaaattttaaataaaaattaaaacaataaaaatgtaaaaatattacttgggcctaaaataaaatatgctgaaactatgaagaaaaaatttaaacattattcataagatcatagctcctatgttgtactttttcttgttcttcaagctagcaatagtgtatatcgccaaatggcgttgcccttttatggtaataaaagaccaagtagtctatagttttgattgtggaccacaaaggctttatcattagatatccagcaacttcagtatttagcatttttcaaaagacatggagcataaaaaatttatatttctcttcttttctcatagttcatgagaattggtgtctgagaagaatacattaccattagcagcaagaatctgttgaagttatacttgccagtgtgtttggtgctgtgttagaaagttggtatgggaaactggcttttgtcttaaaaggcctataaattagatacagattgagaaattgtgggtgggataatattatatgtagcaaagctttattcttattttgtcaatttttaggtgattttattacattactttttaagtactaacaatctctcttttttcctcttcagaaaacaattgaatctgataaaaatcatcaacaattttatatgaattaatttaatccatctttttaccctggttcccagaagcatttgcatttttaaaaaataatttctttttaatggtgaactactatgtaaacatgtatgtttctagtagtagaaattcatactttttaaagaaccatgtggatacattttgggaccactgtgatgcctattaaatctggatacatcaacaacaaactatcttgcttatacgtaaatttatctagtctgtataatacaataaagaatatgtttgttttgcattccttttttaactttaaattctcaagaggaaaaaaaagtcacttggttaactattcaaataaaagttcttgaaaagttactgaattccaaaaccatgaataatacagaaaaaataagtgcaatttggaaataatttgaatatttactgcaataaaataaaaaatattcattgcctaagagaaaatcaaatcaccttcctatttataaaaaagtttattttatatatataactatatatgtctataacaaactatggtgtatatatactatatatgattaaatgctcaaattatgaatgttaaagactgctaatgatcatatcatattttatcaatcaaagttctaaatgtaattgtaattcttaaaattttgattttgctccccaaagaagagtttataaaaaaaaatacataaaagaaaaattaaatatgcagagtttagaagtatctatacttgtacaaaaatgaacaagtaaatatatgtatctatgtataaatttgtatttattgattggtagttgattattcattttataaatatgttatccaagttataaactgacctttactcacttgttccatatgaataattgatttaaaatgtagattggatttgttagctgatatgaattgacattaatgtagtgtaatactgatctacaaagcttacacataagggaacagtaagcattgtcaagtcattgtcatttgattctccatctgtgtgccttctttgaagtaactttatttccacggttttgcattgcttggaaccctgagaataccatggctcatcctggtatcttgctcatttttcagtcaggaggcctaggttatgctgaatttaaaaagaatccccagtgatcagtgatttgacacagttttaaaaatttcttttgcactgtgtgtccaatgtgagttgccagggaggccctaatcattgactactgccacagtgagatagagacttggcaaatcaggccctgactttcaaagtattcaccaggaagtgacacacatcaccttccctcacattacattagccaagtcaaatcacttggacatgcccaacttcaaaggagatgaaaattacaatcttaccatgttcccagaaaaagcggaattgatttggtaaccagctctaatgactaacttatctacctgttccttatttcctgtatgcttgcaattgccattgctcttctttgatgattcttcccactcccaatttcttctctcactttaaaatattttcattgtatttttgaaattccattccatagtaaacactcttaaccacatccaaattgtttaacttcctcctaaactaacagctgagtgtctcacaagaaaaactgcttgtcctgttgcacttatagtcattcactgatatactgatattcctcatactggtaactacagtttagacattatccttatataacttccaaacaacatttttaaaataaacgcttcattaaatcacacacacacacacacacatacacacacaatcataaaaccaaataataacagtgacaaaaagaaaaacaaaaacaaaatactggtaccattttctatccttcaataatgttaactgaagatcatcttctcctcagctatttttcaccaggttgtctttggctctgataacacaaaaatcagtacaattctgttcatttttcttccaaactggtagttctttcatttatttaaataatatctatcctagatctcatgataagtaatttcagtcctcttgacagtacccttaaattatttttttttctttcctttctaccacatggacagtttcaactccagtgcaataaaaagatcaaatatttgtcttctctagttatactttaatactctaaaccctggtttgcaaccttaggttggtccttaatgtgcttatcaaaccttttgtgtgatttttattaggtagcttgtatttttctccaaaacctcaccaaagtcctgtactctccacccacaacctttcttccatttcctccttccctctcaacaaattgacctattttctcttcagaaataaaatagaaacctgactcaccatgagaaatgaaggtacttgtgcgttcaactttgattgctgctttctgttaaagtagaaattaaataaaaatcatttgtctaagctccattccccccaacccaccaccgcatacttatggatcataggagcactatctctctgtatagcatcttcaagcctttcctccggccctttccattagcatttacccatggtcaacattttttattctatgcaaactcaccattcttggcagtatactttctctcaatgattattgcgtcattcatttcacagtttcttgaaatcttctactcacatagtcacacattctctctccctctctttcctatttgtgacatttcattacttactctatcagtataatttgtcttgacatcctttaatttttactgattttttttgttaaggtaaataagctttttttgtaactacatctaacagcctatcttcttattaccatgccatctatagcctgatctggcaacctcttgaatggtggtttttctgtgtttcttagtcctaatcatagtttttacttcatatatatatacgtgtgtgtatatatatatatacatatatatatacacacacgtatatatatatatacacacacgtatatatatatacacacacacgtatatatatatacacacacgtatatatatatacacgtatatatatatacacgtatatatatatgtatatatatgtgtgtgtgtatatacacacacacacacacacacacacacagatatgtatatggttccatggttttataagatgtatatggagaagttgagtaaaggacatgtggtaaagggatatataacgtaaaatgaaatgccattacacaactatagaatgtctaaaaagtttttaaagaaatggtagccaggtgtggtggttcccacctgtaatctcagcactttgggaggcctaggcgggtggatcatgaggtcaggagttcaagaccagcctgaccaacatgatgaaatcctgtctgtactaaaaatacaaaaaaaaaaaaaaaaaataccagggtgtggtggcgcacacctgtagtcctagctactcaggaggctgaggcagggtaattgcatgaacccaggaggcagaagttgcagtgagccaagatagcaccatcgcactacagcctgggtgacagatcaagactccatctcagtaaatacataaataaagagaaatggcaacagcaaatgccggtgaggtaaagtggtacaaccgctttggaagacaatttggcagtttctagtaacattaaagatacacctatcttctgacctggcaatcccactcctaggtatttatctgagagaattagaaacatattcacacaaattaacttgcctatgaaggttttagaaagttcataattgccaaaaaattgtaaataactcacacatacttcgactatgaaatgagtaaataacctctgatatacacatccattccatacactggaattattctcaatgataaaaaggatacactgttgttcacacaataacatgtatgaatcataagtacatttacaataacatgtatgaatcataagtacatttacaataacatggatggaagtggagaacattatgttacattaagtaaaccagtcacagaaatacaaatgtcttacgttcccagtcatatgtgggaactaaaagtattcatctcatggaggtagtgaatagaatggtgattaccagaggctgggaaggatactggggagggaaggatgaagaagggttggttaataggtacaaaaatgcggttaggtaagaactagtgttttgtagcacaatagggcaactatagttaacaataatttactctaaattttaaaataactagaagagtagatttggaatgtttccaacacaaagaaataatcaatgtttaaaatgatggacatccccattacccagataagatcattacaccttgcatgctcatgttaaaatataatgtgtactccataaatgtgtacaaatatgtattcataaaaattagaaattaaaaatacacaaaaagcaaagcaaacaaaaaagcgatatgccgaaagcaacattttgcataatccctatttatatgatgcttttaaaaaagaaaacactaggtaagaaaacacatcattggatcttttaggaaggtataacacagtgaaatttctgaggagagggaactgttctatatgtgacagtagtggtgaacttcagttttcaaacccataaagctgtgtactataaaaagtgaaatttgtgtatgtgaattgtaaagatcaatcagattgtcgagggggtacatggagtgcaggctgtgacaaaacgattctaactgtattaacaatgaatcatagacccatactgagtggtatgggaaagaaaggaatgaaactaagcaactttggcaaattgacatttgacttcatattctaaggccaaatacaaagaaacagttcccaaacactgtactctagttgataattttgatccttaaagggttactggttgaaattctgaaattaatttatatgtatactagagctgagcaaagtattaaatatattatatcataagaactcgaattctttctgttgtagaaagcagctaccaataaggaaataggaatactagagtgaacctcgtgatgctcattggcattggaggtactgaaatggaattatagttttaaaacttatatacagataaatagaggaataaatatatacctgtatatatatgagttggtatacatgcatatatatcttagctccatatcctaataggtgctagaaattgtaacattctaataacaaggaacatagtagcatccagatcttggttttgaaatactgtcctctgtatcatggaaccagggctccttggacatacagtcaatcgtaagagtgcagtagagacaatgcaaggtgagtgagggcattaaaaaacgccaaatgtacctggagaatcttgtgatgccagaaagtaagtaagtgagtaaaatatatatatatatatatatataatatttattaaatgtaaatatatttattataggtaagtcagctataatgatcattagatagatagatagatagatagatagatagatggatcaatcaaaagggcacaggagccaacatgaaagagtacctaatggatgaagctgaaacaacaagaggagtaaaataaccgtaacataagattagattccaaagaataaaatccatatctatgaatcaaatatgagtattataaacaactgaagaaataaacaaatggcaaataaattactacacagaggaacctcaattaaaactgaaggatgaatgaggaaaatagaaatcattattacaccacattatcctgcaatgatttttaatatggagttgcaggcaaattcctcctatggatcttcatataagtaggtcaaagtttacctgcatatataatatgtgcatagatatttattatatccccctaaatattttataattacaaaggaaaaaataataaatttacagtggagaatcatagcaggtatttcctttagccatgggttcaaagttagtatcactaaaaacacatatcgacattatatgcctccaatttatatttttactattattttatttttttattatactctaagttctagggtacatgtgcacaaagtgcaggtttgttacatatgtatacatgtaccatgttggtgtgctgcacctattaactcgtcatttatattaggtatatctcctaatgctttccttcccctctacccccaccccacgacaggccccagtgtgtgatgttccccttcctgtgtccaagtgttccattgttcaattcccacctatgagtgagaacatgcggtgtttgtttttttgtccttgcgatagtttgctgagaatgatggtttctagcttcatccatgtccctacaaaggacatcaactcatccttttttatggctgcatagtatccatggtgtatatgtgccacattttcttaatccattctattattgatggccatttgggttggttccaagtctttgctattgtgaatagtgccacaataaacatacgtgtgcatgtgtcttcatagcagcatgatttataatcctttgggtatatacccagtaatgggatggctgggtccagtggtatttctagttctagatccctgaggaatcgccgcactgtcttccacaatggttgaactagtttacagtcccaccaacagtgtaaaagtgttcctatttctccacatcctctccagcacctgttgtttcctgactttttaatgatcgccattctaactggtgtgagatggtatctcatagtggttttgatttgcatttctctgatggccagtgctgatgagcattttttcatgtatctgttggctgcataaacgtcttcttttgagaagtgtctgttcatatccttcacccactttttgatggggttgtttacttctcgtaaatttgtttgagttctttgtagattgtggatattagccctttgtcagataagtagattgcaaaaattttctcccattctgtaggttgcctgttcactctgatggtagtttcttttgctgtgccaaagttctttagtttaattagatcccatttgtcagttttggcttttgttgccattgcttttggtgttttagacatgaagtccttgcccatgcctatgtcctgaatggtgttgcctaggttttcttctagggtttttatggttttaggtctaacatttaagtctttaatccaccttgaattaatttttgcacaaggcataaggaaaggatccagtttcagctttctacatatggctagccagttttcccagcaccatttattaaatagcgactcctttccccatttcttgtttttgtcacgtttgtcaaagattagatggttgtagatgtgtgatattatttctgagggctctgttccgttccattggtctatatctctgttttggtaccagtggcatgctgttttggttactgtagtcttgtagtatagtttgaagtcaggtagcgtgattcctccagctttgttcttttggcttaggattgtcttggcaatgcgggctattttttggttccatatgatctttaaagtagttttttccaattctgtgaagaaagtcattggtagcttgatggggatggcattgaatctataaattaccttgggcaatatggccattttcatgatattgattcttcctatccatgagcatggaatgttcttccatttgttttgtgtcctcttttatttcattgagcagtggtttgtagttatcattgaagaggtccttcacatcccttgtaagttggattcctaggtattttattctctttgaagcaatcgtgaatgggagttcactcatgatctggctctctgtttgtctgttattggtgtataagaatgcttgtgatttttgcacattgattttttatcccgagactttgctgaagttgcttatcaacttaaggagattttgggatactgaatgggcaaaaacaggaaacattccctttgaaaacaggcacaagacagggatgccctctctcaccactcctattcaacatagtgttggaagttctggccagggcaatcaggcaggagaaagaaattaagggtattcaatatatgcccccaatttaatgcacagagaagggtacattatctctgtggatgacttcccaaaaatgtctaattttagtctaatcataaggaaatatcacgcaaacccaaattgaagtacgttacaaaaatacattctaaaatataattgacagtgttctttaacagagtgaaggccatgaaagataaactgaagaaatgtcactgattgcaggaaactgtggctccctgacaactaaatagattgtagtagtctggattagatcttggagcaacaataatataatttttttatttttaatttgtgtgaatacatagtaggtgtgtatatttatatggtacatgagatataggtatacaatgcataataatcacatcatggtaagtggggtaccaatcacctcaagcatttatcctttctttgtgctacaaacaatccaattatactattttagttattttaaaatgtacataaattagtcgaaatcatgattttgaatacaagtacattaatggaaaaactgatgaaatcaaagttctctactttggctaatagtatggtaccaaggttacttttcaatttgacaaatgtcctatttttataaaagatgtatatggagaatttggggaacaggtatatggtaattcttcatactatttttgcacatcttttataaagctaaaattatctcaaaatgttttttaaaagtgataaaaaaagtcttgaagctttaaaagtatccatttccccttacccatctgttcttctggattcatagagaatctttacattcttctatgaaatatgtattagaaaaacattgccacttgcaatcaataaccttcataccatctatttgtcttttaaatagtaccttgattcaatgatatttatgttcaccatcttgggagaaatgtgagtaaaatgatcattatagctgacatacctcaagactatgatcactgaattgactccctcatcttttcatacaccttctacttattgattatttttctgcttatgtattgatatatctaattaaaatattgcttaaaatttaagttaaagtgttatgtaaaacataattctgttatgaataatttcctgttggcttctatgctagatgtacatgctttttcctcaatagcaatgacatatactcacttaaaatagtatttctttgataacatggaactatagctgggtttaatctgcagtttttttttttttaactttttgttgttgctgttcaagaaagatgtggagaaagatgtggctttggagcatgcttgctttaacccatggtatgcctggtgactacaggagggaaagttttatagcaatccgatgtttcctaacactttattctggcattctgaaggtatatctttcagttgtttcttgattacccactgttgacaggtgagagcttcgtagctgtttgactcagtggctgatatgtctattctttgagaacacaattggcagtttggcagtcagcattcttaaaggatcagtggagctcaaacaggaacccttgttttatgcagctctttcatgaaaactacaatatgtgtaccagctgaaaatatcatatataatgagacctaaactttaaatctagtgaagtctaattgcctctctttgggaatactgtcaccagtgactgcaacagcacttttgcaatacctcagataagctgaatgaatttgaattagactaccttaatcatattgagaaatcacagcgtggaggacatgtatatccttgtagcagacatattacttgctacccgaacttgaagcctgttcactttaaggttttgccttttttcttttgcaagactgcaatttctgatggtatcctagaatctctggctatgacagctcttgcattaagattggcatggtgtttgagcagttcaaaattgcttgatatgtatgtagagccaatgttgtagcagatacaccagtgttacaagtcagctttatagacactcagcaacccctttcctctgttaacattaacagacaggtgcacatccatctcctaatataatagtaagagataatttcatcttggcagggagaaggcatgtggggtagtcaggtaaatgaattgaaaaaggacatgaattaggaataagaagacacagattttagtacgtaattctttagtaattagctttatgcctgtggagaagtaattttattttttctgaatctcagtttctttctctataaaatgctgataaaaggaagtgtcctgtttacctcatagggttgtgcaattgacgaattcggaagagttgctatgtaaaatcaaagttccaaacaaatttatcttgatattgctgttacactctgaattgatatggctctcccttctgcttccaagctcttatctttggaaacttgcaccaaaagtttctaaatgtccatcgtttctgaggcaataataccatgtggcaatcaaaattactttcatttgcatggaaattaagtctatacagaagcctactaagcagagtaaaccgaagtgttctgtcacttggagctgtgggtggatttaatctagatatttaaataaaaagtctagagagtcaaattaactgttaatcataatactggcttgcagtgatgttcattttaagactgtttgtgtacatgtagataggagagagttcgatgcatatatcacacctgttacagcaatagttaccgcctttggctttagactcaagaatcgccattcaatgacactttccccgtacatcttttttttttttttttttttttttttgagacagagtctcgctctgtgccccatgctggagtgcagtggcgcgatctcggctcactgcaagctctgcctcccgggttcacgccattctcctgcttcagtctccggagtagctgggactacaggcgcccgccaccacgcccggctaattttttgtatttttagtagagatggggtttcaccgtgttagccaggatggtcttgatctcctgaccttatgatccgcccacctcggcctcccaaagtgctgggattacaggtgtgagcccccgcgcccagccttcgtatatcttttctaaaattacagtctctttccttaccctggacatctattgtcccctatttggctttattttccttcctagcacgtataattgtctcacccaccatatagtctattcatttatctttaatctggcctactaaagtgtaatctccaggaggtaagatagttttgtctattttctttactgctatattttcagaacctccaatatccaatagtacctgccaaagtagtctctcaaaaatgtttgttaagtaaaagataaagtacccaaaataattaggttaaatatctttttctatatatcctgcccctctcttctccaattaaacattttaaatccctttaggtactattagaaatcttaattctaaaaataaaaaaattgacttgattatttggatattattcaatatttttggtagataatattaaggtatttattaccattgaaaattaaatcactttgaactctaacttataatcttaaaaacgaaccttcttttgctatatacatggcttgtttagtaatattgatgatcacgacaaagtgaccataatttattcacttaattattaaattttccaaacttttctgggaaaaaaatggtgtttttttttgttttttttttttttgtattgcagctgtgtctcaatgaattcttcactgttcactctccagataaccattcttttaattctgtaaatcatcatacattggagagacaaaaatgggagtattggaccgagttgtggtaaccatagttcaaaaagaaaattgacattctaaaggaaaacaaggattatcaatgattaaagttttcaaaataaagcaaaaacaatttataagttgatggacaatgcaatggaaagaatacagatactgaatctatggctttctgctatgtatgttttagagggattgctatcaatatgttagaatgttttagagaaggaattaaccatataaattatcttcggactctaagattcagtgattctattactattaatgtattatattattatctgaaaactaaatggatattttatgggtcaactggtttctttgctagataactacatgcaacagtataagatacatacctacatttttgaaatgcttacatatattacagtttttgtatctgtgtatgtatgtgtgtgcatgcacagtgtttcgtttttagcctgcttaggcaatggggtctttgaatttgataggtactctatttattctgtatttttccactaacttgcttgcaaaaaaatattaaagctggcagaacttatgagaacatctgacctttaatcaaatagttgggtgaaaattgtgtcttgtggagtcaacttttttaccttattgtgtatagagattaatactaattttaaatttgcaaatagctaaattaattataataacatatttatgtgattcttgggttctctgtaaagtctctccttcataactcatgtatactgcttaaatttggatttatcaaaaattttatatgttctttctccttatatttttattatttatatagttacaatttctctaatgtagtcttaattccttttaattttctggccataggaagattatttttcttcttcatctttttaataggttttccttaatttgacaaaatttacttgaaaatccctctctttgctaatttgcatgttggctttcttttctcaccatgaaatgtttgttttcttttctcttgcttgggacctctttcacaatagcacactattttcttaaaaaaaattaagctcgattttcttcttattggtttctatatagcagtggttctcaactctgtacactagaatctcctgaggagctttaaaaacataatgatgtcaaaactctataatggaccaggtaaatcagtatctctcaggggataggatcgtagacaagggtaatttttttaatactccttgtgtgattctaatgtgcttccagaattgagaagcattcgtctataccttctgtgttgaatttgtcaacaaagcaattagagtgtatttattttgtaacttgaatctgagagacgattaatacttaaagtcccactctattaatatatcctaccctttattttgttccctatcagtactaggaaaacatcagtgaagaacaaataatatattcttaagaatactgtccctttgtctaattcccccaagttgttttctctcatggttttatgtaacttttagtactgttaattaatgatatgaactttaaggtcagttaaatctgctgggtgtgagtgattaggtagatctcagcttcttaatttaataattgaagtcaacgaagtaaacacacagcccacagaataggacaaaatatttgcaaacagtccatctgacaaggggttaataaccagaatatataaggagctcagatgactctatagaaaaaaatctgatttaaaaatggacaaatgtttattcagacctttgtcaaactaaaaaatacaaatggcaaacagatatctaaaaagttgctcaacatcattgatcagcagagaaatacaaatcaagactacaatgagatatcatctcaccccagttaaaatggcttttatcccaaagataggcaccagtgaatgccaatgaggatgtagagaaaagggaaccctactacactgttggtgggaatgtaaattagtacaaccactaagaagaacaatttggaagttcctcaaaaaaactaaaaatagagctaccataagatacagcaaccccactgctgggcatataccccaaattaaggaaatcagtatatgataaagacatctgtattcccatatttcttccagcactgttcacaatagccaaggtttgtaagcaacctaagtgtccattagcagatgaacggataaagaaaacgtggtatatatacaaaagggaacactattcaaaatgatattctgtcggtcgcaataacatggatggaactggaggtcattatgttaagtgaaataagctatgcacaaaaagacacacttctcatgtccttgcttatttatggaagctaaaaattaaaacaattgaattcatggagatagagagtaggattgttacaagagtctgggaagggtagttggggaggggttggggggaagttggaatggctaatgggtacaaaaactagaaaggatgaaaagatccattatttgctagcactacagagtgactatagtaaataataatttaatcgtacattttaagatagctaaaagagtatagttagattgtttgtaaaacaaaggataaatgcttgatgggatgggtgctctacataccctgaagggattattatccattacatgccagtatcaacatatttcacataaaaatatagatacctactatgtattcacaaaaattaaaaattaacaaaagaatcaaggttgtccatgaaccctctgaaacttcaaatctgtatgcatttttatatattcttgtgtttttcttggaaaaagagtatgcattttttttcaggttctgaatgaagtctgtggccttcaaggagttaatagtttcagggataggccatctttgaatgcattttcttacagaaagttagtttactgacctacagaatgcttgcaagaaccaaatgtaatacatatgcatgaaagttgtaactagaagtactaaataaatgtattattgaagccatagcttcttatgggagaaatccgttagtagaaatgtatatatttgatgatttaaaatagaaaaatattccaatattggaaaaaggtcatggtcttataaagatatttggtttggggacagagaaagaaagctggcacaggcaatactctaaagctaattatgagacttttcatccatcctccaggaatctctgcttctgaaagcaaattttgtaattttttaaaattaacatttttttaaaaagatatatctataacctggtaggataactacttgaaaaataaaattccactctttggcacatgacaataaatattatgaaaaagtttttggatagtggaaaaataatgataagaaacttaatgtgggacatggtggtcttaaatcaagggaagaggagaaacctacaaatttagtttgaaaataagacctcagaatggattcacatctgggatttgattacacctttaattctggtggcttgtgcataaatttagaaacaagttcatatctatttagaaattgcagagcagccatataggatttgattaatcacacacatttaaaaatgcttttcaaacattttcattagtcacatttgacagcagcctcacaaacagttaataatgtagacatttttcaggaaaacatgaactgtccggtatgattgatggtaagagattttaagatgttttgggcagatacaaaaaagatggtggcaggttgaatatatggtctttgtttatccctagtaataataatctatcgagtttagtaaggactttctcttttttattatacattaagttctgggcaaactaacacaagaacagaaaaccaaacactgcatgttctcacacataagtgggagttgaacaatgaggaccttctcattttaaaaacctcaagcttggtatgtgtacagaaggataaatctagtggtagctgggcagacagttcagcttaaatacttgaatcttgttgaattttctttggtaacaaatgtaacattaactgagatataaagttgccccaacttttgctgagggaatagatattcaagaaggttttttttttttttttttttgagacggagtctcgctctgtcgcccaggctggagtgcagtggcgggatctcggctcactgcaagctccgcctcccgggttcacgccattctcctgcctcagcctcccaagtagctgggactacaggcgcccgccactacgcccggctaattttttgtatttttagtagagacggggtttcaccgttttttagccgggatggtctcgatctcctgacctcgtgatccgcccgcctcggcctcccaaagtgctgggattacaggcgtgagccaccgcgcccggccaagaaggttttaagtctttttttcttataagtttattggtgtgaaaattttaccttaattgctatttataatatacaacaccaattgttcttaccttttttttgtgtctcaggctataagatatctattatagtcaaattactgaaaatgttggttcatacaaaaatgcgtatatcttaaaagtaagttttctttgtcattctgtttacagatttgaggagatatttgaaataaaagagaaatttgatgtgacctgttttgacccaggtgcaaggaagccttcctttaatgtggtataaccaattgacatgaagcaaatgataggataattattagtgccaataaagctaacagttaatttttttggtatgcaaacaaaaatactgtgtttcatattgcttatcaattataaattcagattatttttaagataaccttttctctcctgtaacttgattgttttgttcaccttctaggcccttaggaggaagtcataacttcattttaatgtattgagactcctttctttaaaaagctaagcatcagaatccgtggtggcatgttaggtagcatgtcatgtcttgctactcattacaaacagtatcctaaagggagttcaaccaaatccatggaagagctgaatgttaattgtaatattgctctgcagctcatttggttcaaatagattataaattatgcatgaagcaagcaaaacatgagcaatatttctgttaactgaagtcatgaccttcttttagctaatcttttaatgtgaagctaataataaaaagtccagctattaaccaacagactagataagcaatccagtgtatggtacataaaagttctcctatcacatttttaaatattttgtttactattaatactgttttttatagtcagaagactgtggatatttttataaaacaataaacgttaattttagaataaaagtagaagataaacataatagcaaatctttcattcgtaaatatatattacatagttaagtatatacacacattattcatattcttttctttttaaacataattttatattctcaacaataaatttgcttaaaatttcaaaataatttagcatatccgccattgcatttattataaaaataagattaatccttgcaccataaaacattaaagaatattctaaaaactaacttcaattatagacttttaaatgcgcaaataaaatacatgtttgaactacatttatatatgtctgaaaaccagatgactaacctcctgcaatcattcattaaattagatttcttgagcatgaactgtgtaccaaacaatgtattaaaggctgagagtacatggttagaagagacaggcatgcccttgatttatggagcttacaatctagtatacatgtatatgtcacgtgataaaagatacagaaataatgcaagttttttaaaattcaactttaattttagatacagggatacaggtacaggtttaccgcatgagtatgttgcatgatgctgaagttaggggtatggatctcatcactcaggtggtgagcatagtactagtaaggtagtttttgccccacgcccccattcctccctccaccctctattagcctgcagcatctgttgttcccaagtttatgtccatgtgtgcccagtgtttagctcctatttataagtaagaacataaggtatttggttttatgttcctgtgataattcacttaggattatggccaccatctgcatccatgttggtgcaaaggacattattccattcttttttatggctgtgtagtatttcatgcttctgcacagaaaaataaactatcaacaaagtaaacagacagtctacagaatgggagaaaatacttgcaaactatgcatctgacaaaggtctaatatccagaatctatagggaacttaagcagttcaacaagcaaaaatcacataaccccgttaaagtgtgggcaaagtacctgaacacacacctctcaaaagaagatatacaagcagccaataagcatatgcaaaaatgctcaacatcactaattatcagagaaatgcaaattaaaaccacaatgagttactatcttacaccagtcagaatggctattattcaaaagtcaaaaaagaacagatgttggtgaggctgcagagaaaagggaaggctaatacactgttggtgggaatgtaaattatttcagctattgtagaaaccagtttggagatttctcacagaacttaaagcaggtttttaaaatattaatgttgcaaatgtcaaatattcttagtgcaaaaacaaatagatttaataaattagctgctaaatagtttaataaataaatgatttaataaatttaatacatttgttcctgttttattatataaagtagggcttatatatctttgcctgatgttcgaaaaatgccagagtgttagtagtgaatatccagaaaattttatctttctgtacttaaatgtgtttttgtcttaactggcagttctggtaatagcttcaagtgctcttacaaaaattcgaagataacaataccctaaattaggtctgcattaaatacattttttatattatagccatcactaataattaaacaaaggctgttttttaatgttaaaatattatgaaattatggttttgtttctacatattgaaatagtaatatatattatgggcagttactctagattaataatacaataatttaaaaatatttaataaccttgatcaaatgcttttcataaaacatatcattgatgttatgaaacacatgcaatactaaatacaactttgataatgtaaaaactcagccaatttgtatttctctatatggtagtaaaatacaatttattcctcccaatcagtaaatttaactggctaaataaaatagactacagattctatgtaacatataccattaagtaataattttttacatttaaatgtttcacattttaaatgctccataccagcaatcatgttgtttcttagcatttattattaaattgtgtatttatagcttacaatgtttcatacagtctctatgtttccacttaggaattatgtattaaatatattagaatattttcctcttttatccttactgaaatttttagctcaattatataactgccaaaacttacatgagacaatgaatataagacacctaaaacagtgaatagtacatagtaaaagctgttagagttatcagacattattatcagagaggataattctaggcagaacaaattcctataggagaataataaaaggtgaatgaggattcattttaggtgagaaatactatcaccatcagctgacatctggaagcccagattcctctcttaacagcagaacaattgtaaaatcaggatttgagtgaagtggattttctatttaagctccagtctttccttatgtctctcaagtctgagtgatttctgacttgactttgtggaaaagagatgtttcatcagtagagtacccaagtgcactcctttaattctaacacactcttactgatttctgataactctactccatttctctctcttattctctttgtgattgtacaacattgagaaactagggcataggtgacaaataaacttctttcctattaaaggatatgtattcctttagttcacattttatcatgtgataaaataaaaatcatgtgataaatgtgaaaatgtagttcacatttgatcaattatttaccttgagcacgacataaaattatcagcaatattcttatgttaagacagatttttagtgatgatatggcaacaatacatttgattaccaaatctgtatgtcaacaatatgtcaaatgcatcttctagaatttttacaatacattatatgctataatttgcccaatactagaatttttaggaataaaattatatcaaaacaattctatcttaatatacagtatctgaaactgacattaaatatactatgattaatatatcttataaataatcagattcatctgtaaaatttttatattaaataacatcttacatttataccgtaatagaaaatttttttaagttttacaattacctgtgtttaaaaacaatttgttagagtgaaaaaaaaaaagccccagactgagagaaaagacctaaaatcttcccttacatacagcaggtaaacaaaacaaaaaaattataatgctggaatttaaaccatcttaatcaagtcatctgacctcttgaaactcaatttccttagtagttaaatgagactaatagcatctaggcataattccaaagaacaatatgaggccaatactgttaaaatgcttataaagctatgtacatataatgatgtggatatgattgtgttgacagaaattagagtaaatgatcttatatatatttatcagaagaaaatcacctattttttcttttaaaatagaaatgcatgtaatcagagaatttgattatatgttcatgataagtgttttgattagaaaagaagaaagaattaaattttaccttgatttacttttaaactatctttagaggatattgcttataaaaatgtaagaagaatgtataatctgggcttaaattgaactgattatgtaaatatattgaaaaggagttggaggtataaatcacagatgtcgacttgatggagtttgttaccagcaaaatctactgctcacaaatcccagcgtgttaattacaagaaggcatctggtatacaaatttatgctaagataagaaacataaagattaatgttgaatacagtatgtcaaatagatatggcatcatctaccttcacttgctagttgtatttagccataattgctgtattagttcatgtaacttaaacagatcatagttattaggtataattaatagtattctaggtaaaaggtgtatttgtgtgtgtatggcacacttaaattacagttaaagagttgagagtcttgggagaagtgaaaagatgttacatatgaatctattctatgggggaaatcttatttttaactttataaatttccaaactttaaagctttagaaaatgaaaatataagaataggagtgtttgatgttatgtggtattaggcaaacacagtcctcaacaattgaccaagtgttattaaaagaaaccctgtattaatttttgtataaggtgtaaggaaggggtccagtttcagttttctgcatatggctagccaattttcccaacaccatttattacatagggaatcctttccccattgcttgtttctgtcaggtttgtcaaaggtcacatagttgtagatgtgtggcattatttctgaggcctctgttctgttccattggtctatatatctgttttggtaccagtaccatgctgttttgtttactgtaggcttgtagtatagtttgaattcaggtagggtgatgcctccagctttgttctttttgcttaggattgttatggctatacaggttctttttttggttccatgtgaaattagtgtagttttttctaattctgtgaagaaagtcaatggtagcttgatggggatagcattgaatccaaaaattactttaggtagtatgcccattttcacgatattgattattcctatccataagcatgagatgattttccatttgtttctgtgctctcttatttccgtcagcaggggtttgaagttctccttgaacaggtccctcacatctcttgtaagttgtattcctaggtattgtattctatttgtagcaattgtgaatgggagttctcttattatgtggctatttgtctattatttgtgtgtaggaatgcttgtgatttttgcacattgattttgtatcctgagaccttgcttaagttgcttatctgcttaacgagatttagggctgagatttaaacgtaagacctacagccataaaaaccctgaaagaaagtctaggcaataccactcaggacatagacatgggcatagacttcatgaataacaccaaaagcaatggcaacaaaagccaaaattgacaaatgggatctaattaaagtaaagagcttctgcacatcaaaagaaagtctcatcagagtgaacaggcaacctacagaatgtgagaaaatttttgccatctatccgtctgacaaagggctaatatccagaatctacaaggaatgtaaacaaatttacaagaaaaagacaaataaccccatcaaaaactgggcaaaggatatgaacagacatttctcaaaaaaagacatttatgtggccaataaacatatgaaaaaaagctaatcatccctggtcaccagagagatgcaaatcaaaaccacaatgagataccatctcatgccagctagaatggcaatcattaaaaagtcaggaaacaacagatgctggaggggatgtgaaaaaataggaacacttttacactgttggtggggggagtaaattagttcaaccattgtggaagactgtgtggcaattcttaaggatctagaaccagtaataccatttgacccagccatcccattactgggtatatacccaaaagattataaattattctactataaagacacatacacacatatatttattgtggcgctgttcctagtagcaaaacttggaatcaacccaaatgcccatcaatgatagactggataaagacaatgtggcacatgtacacgatggaatactatgcagccataaaaaacaatgagttcacatcctttgcagggacatagatgaagctggaaaccatcattctcagcaaactaacacaggaacagaaaaccaaacactgcatgttctcactcataagtgggagttgaacaatgagaacacatggacacagggaggggaacatcacacactggggcctgttgtggggtgtgggactaggagagggagagcattagaacaaatacctaatgtagatgatgggttgatgagtgcagcaaaccaccatggcacatgtatacctatgtaacaaacctgcatgttctgcacatatatcccggaacttaaagtataataaaaaaaaaaagaaagaaaccctgaaaattgtggcatatcgtcttagaaatactacttttttctctaaaagcaagcctccaggtcttttaatggggcctaaatttttttttatctagttgtaaatcatctatgtggaaatatttttgctcatttggccctttataattttaaccatttcaatgggttttttttgttcatcttgtaggcatgcaataaaaatgatgtagcatctatacctaaagattccatattgatatttacttcgtgattctttataattgctattagaaatacaagtagactataaaatacagaaaatgtcatgtcttcagtgatctaattcttatgtcttacttgacattagaatctaaaattattagacattagagtctaaaattattagaaacatgtattcctcaatgaaaagaaaggtggtcttgtccattaaatttcagaaattataagctaataatatgtgattatacgttgcatttttcaatataagaatgaatccattcaatatattacctttaacattcatttgtgattactcatattcatgtattcatttatcaattatttattgaacacaggatatcctggatatgcttatagcggccaggtatataactgtgaacaaggcagttcaactctttgcattcaggaagcttgcaatctggtgggaatgtaaagaccaaatttttgcaaagcaaataaattatatatgtttgtatatgtgtgtaaatctagtgattatgtgtacagtattaagatagagaaatgcaaaagtgattataaccccacttataacctattcttccagaatttaaacagtaggagtagtaaagttgttaataactttttaaaaggcgcaaagcaaaaagcaaaatatgctaaatgacatataatttcaaataaatgttccctggaggatcaagccaagtaccaaaatatttgcctgaaatgtataagggaatgttatggaagtaataggtaaagccttatgcatggataaaaactagagtgtgaaatatgatttaaagacaggaggaaaactgtaacttacataaggagaatatagagaaaaattgaaaagcaaattgagaccagattgcaaaatcatttaaatttcaagccaaactaatgacaaataaacttaagaaatgtcaaaaatgctttaggctgaattaatccagggactttatgacagactgatttgagaaggaaagaagagaggtatctataaaagtagggcatgtaatagaatggttactgcaaattccaagcataatatacaagaccttctattaggatgatggcaataattatttttatgaacactgtcttttacatcctattttctgtttttctttcatcttattgttggtaaatatatattagttgtcagatatttaaatcattcattaatataaaataaatactctttattatcacacactgcttttgcaattgtatgtaaaggatgtcattagttccctaataatcattttctcctgtctaccaatttaaatgttgatatagagaaaaataactatatccctccaaaagatttccctagtggattgatcacttaaacaattaagcctactttaaattgactactgagatctaggagaaagatgggagaatgggagtctctactgattattctcttccctgacaaggacaccaatttaacaactatctacataaacacaaaacaatgcgccttcataagaaccaaaaatcaagtgagcactcaaagtacgtggttttaactttatattgctgaaagaggcactgaagaggtaagcaaaatagtctggagtcaccaatgctatccctcccccattccccagcagctgcagctttatgcatggagtgtttctgtgtgctggggagaggaaagcacaccaattttaaggcattgaactcagtgctgccctatcataacagaaaacaaaactagaccaaactcagctgataactaaccatggagggaccatttaaaccatccctagccagagggaaattgctgatcccagtggtccgaacttgaggatctgcaagacttgcagcagctgcagaggtactacaatgatggtagtctccccaagtctcagcagctgcaggccaaagtgctctggagctctaaataaacttgaaaggcagtctaggccacaaggactacaacttctaggtgagtcctagtgctgaactgggcacagagacagtgtacatgtgccatactgagacactagttaggtcagctaagggattgctgtcatcacccctcccctgaccccaggctgcatggcttgtggctccaaaagagacttcttatctccactggaggagaatagagggaaaggtggtgaagactttgttttgcatcttggataccagctcagccgcagtaggataaggtgccagtcagggtaataaggtcccctttccaggccctagctcttggatgacatttctagacacacccaggggcagaaggatacttgatgccttgaaggcaatgacccagtcctggcaggatatatcgcctgataattgaggagttcctgggccccgagtgatcagcagtgatacttagtactatgttaagggctttgggtgagactcttagacttgctggcttcaggtgaggctcagcacgttcccagctgtggtgtctatggggcaagactccttccacctaagaaaagtggaaggaaaaacaaagggaactttgtcttgcacattaggtaccagctaagatacagtggggtagagcaccaagcggacacttggggtccttgattctaggacttggctattggactgcatttctggacctctcctgtgccagaggggagcccactgccctgaaagatgagtcccaagtcgggtaatattcaccacatctggctgaagagactttgggccctaagggaacattgatgatggtctggcagtactccccatgggcctgtggtggcggtggccgttgatgagagttctctgcctttggaaaggggagggaagagtgggaaggactgagtctcatggtttgagtgccagatcatctgcagtaaaatagatcaccaagtagacttctaatgtattttatcctaatccctggctcccagacagcacctccaaaaactcttgaggcctaggggaacttgccatcctgaatggaaggacacaggcctgcctgacattgccacctgctgattgtagagtcccaggaccttgaacaaacacaggccatagtcagggaatgattacagtgggccttgggcaagacacagtgctatgctggcttcaggtgtgacctggcagtctttttttttttttttttttttgagacagagtctcactctgttgcccaggctggagtgcagtggtgcgatctcggctcactgcaagctccgcctcccaggttcgtgccattctcctgcctcagcctcctgagtagctgggactacaggcgcccgccaccgcgcccagctaattttttgtatttttagtagagatggggtttcatcgtgttagccaggatggtctcgatctcctgaccttgtgatccacccggctcgggctcccaaagtgctaggattacaggcgcgagccaccatgcccagccgacctggcacagtcttagtcatggtggccacagggttgcttgtgtcacaccaccccccagctccaggtggttcagaacagagagagagagagagagagagagagagagagagagagagactgtgttcatttgggagaaattaagggaagagaacaagagtctctacctggtaattcagagaattcttccagatattgcccaagataatagaggtagtacctctacaagtctcctttttaaaaaaaaaaaaagttcttctaaaaataatagaatgcatgtgcagaacatgcaggtttgttacatacataggtatacatgtgccatggtggtttgctgcacctatcaatttgtcctctaagttccctcccctcaccctccaccccccaacaggccctgttatgtgtcattcccctccctgtgtccatgtgtattcattgttcaactcccacttatgagtgagaacatgccgtatttggtcttctcttcctgtgtctatattcgtttgctttttgtttgtttatgcaaacaatgtgaagttgttatcagcttaaaataatgggttataagatattataagatagtatttgcaagcctcatggtaaactcaaaccaaaaacttataatgtatcaacaaaaaatgaaaagaacaaaactaaatcatatcacaggagaaaattaccttaactaaagagaagacaggaagggaagaaagaaggaagagaagatcagaaaacaaacagaaaacaacaaacaaaatggcaggagtaagtccttccttatcaatagtaacattgaatgtaagtggactaagctcttcaatcaaaaaacagagtggtcaaatggatagaaaaagaagacccaatgatctgttgcctataagaaacacacttcacctataagggtacccatagactgaaaataaaggaatggaaagagatatgcccatggaaaccaggaagagtgagagtagctatactcgtgataccaaatagatttcaagacaaactataaaaagagaaaaagagtgccagtatataatgataaataagtcaattaatcaagaggatataacagttttaagtatgtatgcatccaacactggagcacccagatatataaagcaaaagttattagagctaaatagagatgtaggccccaataaaataatagctggagatttcaacaccacatattcaacatgggacagatcttctagaaagaaaatcaatgaagaaacatcaagtttaatctgtactaaagaccaaatggaactaataaacatttacagatcattttaaccaatggcttcagaatacacattcctcccctcagcacatgaatcattctcaagtatagaccacatgttatgtcacaaaaatgtcctaaaacatttaaaaaattgaaataatatcaggcatcttctctgactacaatggagtaaaactagaaatcagtaaaaagagtttaggaaactgttcaaataaatagacgttaaataatatactcattaattaccaatgggccaataaagaaactaagaagacatatagaccaatggagcagaacagagacctcagaaataacaccacacatctacaactatctgatctttgacaaacctgcccaaaacaagcaatggggagagaatctcctattcagtaaacggtgctgggaaaactgtccagccatatgcagaaaactgaaattggaccccttccttataccttatacaaaaattaactcaaggtggattaaagacttaaaggtaaaacccaaaaccataaaaaccctagaataaacctaggaaatacaattcaggacataggcgtgggcaaagacttcatgacaaaatcccagaaacaattggaacaaaagccaacattgacaaatgggatctaattaaactatagagcttctgcacagcaaaagaaactaccatcagagtgaacaggcaacctacagaatgggagaaaatttttgcaatccacccacctgataaaggtccaatatccagaatttacaaggaactgaaacaaatttacaagaaaaaaaaaaacatcaaaaagtgggaaaaagatgtgaacagacactcctcgaaagaagacatttatgcagccaatgagcatatgaaagaagctcaacattactgattaaggagatactgcaactgataccacagaaattcaaaggattattagtatctactatgagaaactgcctgccaataaactgaacaatctatttcaattgtatgcaggaacaagaagtgaaattattcttgtctgcaaacgatatgatcatgtatttggaaaaacctaaagattccaccaaaaaaaatactagaactgataaacaaattcattaaattttcaggatataatatcaacacacaaaaatcagcagtatttctatatgccaaaagggaacaatctgaaaaagaaatgttaaaaatttcattgacaataaccacaaataaaattaaatacctaggaattaacttaaccaaagaagtgaaagatgcctataatgaaaactgtacaatattgatgaaagaaattaaaggggacaccaaaacatggaaagatactccatgttcatggattgaaagaatcaatattgttaaaatgtccatacaacccatagtaatctgcagattcaatgcaattcctgtcaaaatgccaatgacatttctcatagaaatagaaaaaaattctcaaagttatatggatccacaaaagactcagaatagtctaaactgtgatgggcaaagttaataaaattggaagtatcacatacctgactttaaatcataccacagggctatagtaacctaaacatcatggcactggcataataacagacacgtagaccaatggaacagagaagagaatgcagaaagaagtttacatacctgcagtgaactcattttcaagaaatatgccaaaaatacactggagaaaagacaatctggtgaataaatagtgctggaaaaactggatatctatatgcagaagaatgaaactagacctctatctcctttcatatgcaaaaaaaaaatcaagtaaaaattgattaaacacttaaatctaagaccgtaaactatgaaactactacaagaaaacattagagaaactctctgggacattgatctgggtagtatttcttgagaaatatcccataagcatgggtatctaaaggaaaagtggacacattgaatcacatcaaggtagagcttctgcacagcaaaggaaaaaaaagtgaagagacaacgcacagaataagagaaaatatttgcaaactacacatcttacaagggagtaatgaccagaatacataaggagctcaaacaactatataggaaaaaatataataatctgactaaaaatgagcaaaaaatctaaatagatatttctcaatggcagacatatgaaaaggtgctccaaatcattgatcatcagagaaatgcaaatcaaaactattatgaaatatcatcttatcccagttaaaatggcttttatccaaaagacaggcaataacaaatactcaacaaggatatggagaaaagagaaccctcgtacacttgtcgtgagaatgtaaataatacaactactatggaaaacagcttggagggtccttaaaaatctttaagagctttaggattgcaagtggtttttggttacatagatgaattgtatagtggtaaagtctggaatttcaatgtattcataacccacatagtatatgttgtaacacaataggtaggggtacaactgtctttccacactccccttttctgagtctccaatgtccattgtactactctgtctgacctcgtgtacccatagcttaactctcacgtataagtgagaacatgtagtatttgctttctcatttctgagttacttctcttagattaaagaatccagttccatccaagttgctgcaaatacattattttatcattttttatgaccaagcagtattccatggtgtgtgtgtctgtgtgtgtgtatgtttacacacataccgcattttctatattcattcactggttgttggacacttattttgatttcatatctttgcaattgtgaattttactgcgatatacatgtttgaatgttttttgatatgatgatttaattccctttggatagatgagcagtagtgggtttgctcagttgaatggtggatctacttttagttccttgagaaatctccatattgttttccagagaggttgtattaatttacattctcaccggcagtgtgtttgtgttccctttgcaccacatccgtgccaacatctattgttttttgactttttaataatggccatgctggctacagtaaggtgatatctcattgcagttttaatttgtaattccctgatgattagtgacattgagtgcttttttttcatatgtttgttggccatttatatatcttctattaagaaatgtctattcatgttctttgcccactttttcatggggttatttgatttttgcttgctaatttgtttccttgtggatgctggatattagtcttttgtcaggtgcagagttgacaattttttttttcattctgtagattctctctttaccctgacgattatttcttttgctgtacagaaacttttttagtttaagtaggtctcatttatttatttttcttgcatttgcttttggggtcttcatcataaattatttgcctaggccagtatccagaatagtgtttcctaggtttttatttagaatttatggtgttaggggttagatttaagtctttaatccatcttgagttcatttttgtacatggtgagaaataaggatccagtttcatttttctacacgtggctatccaattttctcagcaaaatatatggaatagaatgtcctttccccaatttgtgtttttatatgatttgttgatgatcagttggttgtaagtatttgagtttatttctggattctctattgtgttccattgatctgtgtatctgctttcactagtgccatgctgtttggttactatagccttacaatataatttgaagttgagtcatacgatgcctccagatttgttctttttgcttaggattgccttggctatttctgctcttttttggttccatatgaatttcaagattatcttttctaattctgtaaagaatcatgttgttattgtaatagggattgcattcaatctgtcaattgcttttggaagtgtggtcatttccacaatattgattctttccatttgttcgtgtcatctgtgatttctttcagcagaattttgtagttccccttggagatttttcacctagttggttaagtatattcataggtattttatttttttgtacctgttgtaaaagggattgggttcttggtttgattctcatcttggtcattgttggtgtataacagtgctactggtttatgtacattgattttgcaacctgaaacttttctgaattcatttattaaatcataatctttttgaggggtcttctccaaagagatttattaaatcataatcttttggaggggtcttttagggttttctaagataagatcatatcattggcaaatagataatttgatttccacttttccaatttgaatgccctttatttctttatcttgcctaattattgttataatattattgattgatttatttatttacttatttatttatttatttattgaaacggagtcttgctctgtcgcccaggctggagtgcagtggcgccatctcggctcactgtaagctccacctcccgggttcatgccattctcctgcctcagcctcctcagtagctgggactacaggcacccgccaccacgcccggctaattttttgtatttttagtagagatggggtttcactgtgttagccgggctggtctcaatctcctgacctcgtgattctcccgcctgggcctcccaaaatgctgggattacaggcgtgagccaccgcgcccggccaacatttgttttttttatcttattttcttcattttatttttattcacttttttatatttctttcctctttttttcactccatgccttctttcattttgtacccctctgaaagtctggagaggataaagtctaagtcttaaatataattttgtctccttttaaaaattaagcttatattttacacttaattttcaattgctgtatttcagaagcaaatgaatctgctggttgtcctctacctctcttaaaagatgagaaaatatatgtagttacactttcccattgccttacttcgactgctactgctcttcggttttgtctctatattctgagatttttagccaattttaatataattaaaaaatgttttcactctatagcatacctatgaggatttttaacatttaatgattatgggctgagtatttacaataagttcatggctgtcatgacttctttaatcattcaatcattcattcacttatgcattcaaaaactatattttaacttctttctcatgaggctaagagacattgataacacacaaatcaggcaaatccttgtcttcttaaatacatctgtgagtcttccttcaggattcatgttacattactcagttatgtcttttgggaaggataaatggataatattatttctgagtcggtgatatctatgaatatgtttttatattcaatatgaatatcagattagctgtaatttgaatcatataatttctccataaaaaatccaataggatattttttgttttgttttgttttactttttattataaaaatttcaaacatgcacaagtgtatactagaatgaacctaaaatgcccctcacccaaatgacattcattggcttgataatatccatataccgtctatgcccttaactacccctgccactggatttttttaagtggagcaaattacaggcaccacattatttcatccataaatatttcagaacacctctccttttttttcttgagcaggatagatttttaatgatcatctataacaaacagaactgtttaaaaaaaaaaaagtaccaaatgagatgcagggaagaacctgcttgcatgttattattgactcgacttgagtcactggagtaaatgaatggcttcccagaacaagttccaatcttattacagggtatcaaagaagagtttaagcatttttatcaggaatactagtgtcttacagtaggataatttccctagcatttaaataagttgtggaaatattgaataagtttttttttctcaattttgtaattaacacagttaactctccttgtaggcttgtggaactctttcttttatagtttgattcaatgatacaaatgccattctgtttactcatttttacttttgtttcctgagagttcacattgaaaaatattcctgtaatctgtaaaattgtttttatttaatattgtataaatatgttaatattttattctcttctttgagataatatttttcaaattatctgttttcattgtcttttgcatgctttctttcttccttatttcttcggaagtttataaaaaatgtcttgctttttttctatttattaatctttgagtatggcatatgaattgccaccaaaatagcgtttgtaacattgcattgactcaccttctcaggtaatactaccttataatacttactttcttccccttgtaatactagcttgcttcattccccttataatcctagctggagggtgggaatatgatggtctttattctctgctcattttctcagctgcctggtagagaatggatagaacttgtgaccctcaaagtcatgtttgagaaaattagatatgtgcttctctgttgaaaattctgtattggggacaaaccaagttgggccgagaataggacatcatctgagtgtggcacacttgccatggggttgaatttatcttctgtttaattttttgtttgttttttgttttctccctgcccagcaaaataggtcataaaaccattagcttatgagacctatttattggagtatactttcaccaggatgagaacaatcattcatatcttcctgataaagcttgcctccagacttctccctttttattaggggtagaaaatttgattcttaaaaacgaaaaattttaagaccccggattttctttaacatccctgcaataacaagccccttcagattgaagactcttgaaacagtctttaggaatgtacttttcagcaccacagctccgcggtttgttctttttctaagatgggatctcaccctgttgcccaggctgaagtacagtcgtgtaatcaaggcccactgcagcctggaaccctgggctcaagcgaccttacctcagcctcccaagtagctgggactaccagtgcacaccactatgcttggcaaatttttgtatttttgtttatttatttatttatttatttatttatttatgttttctttttttagagatggggtttcaccgtgttacccaggctagcttggtcttggttaaggagttgtcacttgattactggaatcctttcaacattttcaaagtatattctgtctgcatgttattcttcaaaatgtgtggtttaaagttgaagtcgtgccgggttagagtacaagttaagtttgagtttcttttaggtttcctttatccccatccccaccactaggggctttcaaagaaatgatgtattacaagcatctccctttgtttttttccacctttcctatgtgttggtctttaaaagcctgaaatatgaagattggctaatgctctgcacatgacacacaagtacctctaaggttagtttgttgtaccatgtgtgtaaacgcccagggcatgtttggaatatcatgtaacagaatgtgcctggaaattctgtgccattatttcttagcattctgagaattatacgagtatagaatttagtattatatttattcattttattttagcctagccaaacattctgtatggaaaacactaccaggaaactttgcttctgacttaattacactgtaacttctgtgaaaattgtgtaatgtttgaaaagttttcatcgtttttgaagggcttttaaaaaactttttattcaattattaatatttctcttaaaaatagatttatgtatggagagacataaatagatttatattttaggtttgaaatttcatttcaagatctcactggatagtaaatactaatatttttctgaattttcttgttcagtttcagttatcataagggaaatgcaacattcagatccataggcaatagaatttgtttctgaaattttcctcaacttatttgagtgaatatatatatatttatatacatatacatatatattacagaatatagtaactctgtaattgtattttgatatgttattaagtcaaaaatgagcagcagaaattgtaaaatggaaagtttagtgtttttctcagctggaaaagaaatcagacaaactgaactacttctctagttcactaatgtaataagatatgtttaatttaattatatgttgcttaactgtctcatctttataaagggcacagtgctatagaaaaatgcatcttctaggcaggagtctaattaaaggggtgatatgaatagcttccactgggaaatgctaagtagtttccagatacgggtattatctcctttgtacaggtatcaaggccgtggctgaaaacactcagattatatgcccaaaatcacatagcaaatggtaagcttaaaattcatattttatattttatacaacatgtgggtaatatgtaagtgaaaaatgggcttcttgccatcttacttgtaagtgtaataatgcttattaggttttcaatgggaaataatgactatacttttctagtttaacatactgtgaattcgggtggtattctgattgaaatcttttttttttccattttactttaagttctgggatacatgtgctaaacgtgcaggtttgttacataggtatacatgtaccatggtggtttcctgcacctatcaacctgttatctaggtttagagccccacatgcattaggtatttgtgctaatgctctccctccccttgtcccccatcccctgacagttctcggtgtgatgtccacctccctgtgttcatgtgttctcattgttcagctcccacttatgagtgagaaaatgcagtgtttggttttctgttcctgtgttagtttgctgaggatgatggtttccagcttcatccatgttactgcaaaggacatgaactcatccttttttatggctgcatagtattccatggtatatatgtgtcacattatctttatccagtgtatcactgatgggcatttgggttggttccaagtctttgctattgtgaatagtgatgcaataacctacgtgtgcatgtgtttttagagtagaatgatttataatcctttgggtatatacccagtaatgggattgctgggtcaaatggtatttctggttctagatccttgaagaatcaccacactgtcttccacaatggtcgaactaatttactctcccgccaacagtgtaaaagcattcttatttctccacatcctcttcaacatctgttgtttcctgactttttaatgatcaccattctaactggcttgagatggtatctcattgtggttttgatttgcatttctctgatgaccactgatgatgagctttttttcacgcgtttgttggccaaataaatgcccctttgggaagtgtctgttcacaaatttcacccactctttgatggggttgtttatttttttcttgtaaatttgtttaagttccttgtagattctggaatttagccctttgtcagatggataaactgcaaaaattttatcccattctttaggttgcctgttcactctgatgatagtttcttttgctgtgcagaagctctttagtttaactagattccatttgtcagttttggcttatgttgccattgctttttgtgttttagtcatgaactctttgcccatgcctatgtcctgaatggtattgcctaggtttccttctacggtttttaaggttttagatcttacatttaagtctttaatccatcttaatttttctataacgtctaagtaaggggtccaatttctgttttctggatatggctagccttgtttttacagcaccatttattaaataaggaattctttacctattgcttgttgtcaggtatgtcgaagatatgatggttgtagatgtgtggtgttatttctgagacttctattctgttcccttggtctgtatatctgtttttgtaccagtaccatgctgttttggttactgttgccttgtaatgtagtttgaagtcaggtagcatgatgtctctggctttgttgtttttgcttaggattgtcttggctatatgggctattttttggttccgtataaaatttaaattagtttttcctagctctgtgaagaaggtcaatggtagcttgatgggaatagcatagaatctataaattactttggtctgcatggccattttcacaatattgattcttcctacccatgagtatggaatgttttttccatttgtttgtgtcctcttttacttcctttagtagtggattgtagttctccttgaagaggtccttcatgtcccttgtaagttgtatttctaggtattttattctcctctttgtagcaattgtgaatgggagttcactcatgatttggctttctgtttgtctactattggtgtataggaatgcttgtgatttttgcaaattgattttgtgtcctgagactttgctgaagttgtttattagcttaaggagtttttgggctgagactatggggttttctaaatatacaatcatgtcatctgcaaacagagacaatttgacttcctcttttcccatttgaataccctttatttctttctcctgcctcactgccctggccagaacttcaaaaactatgttgaataggagaggtgagagggggcataacttgttttgtgccagttttcaaagggaatccttccagcttttccccattcagtatgatattggctatgggcttgttataaatagattttattattttgagatatcttctatcaatatctagtttattgagagtttttagcatgaagggatgttgaatttgtattgaaggccttttctgcatctactgagataatcatatgtttttttttgtcattggttctacttatatgatggattacatttattgatatgcatatattgaaccagccttgcatcctggggatgaaaccgacttgatcgtggtagataagctttttgatttgctgctggatttgatttgctagtattttattgagaatttttgcatcatgttaatcagggatattggcctgaaattttctttactagttgtgtctctgccaggttttggaatcaggatgattctggccccatgagttgaggaggagtccctttttttctattgtttggaatagtttcagaagtaatggtaccagctcctctttgtacctgtggtagaattcggctgtgaatccatctggtcctgggcttttttttggttggtaggctattagttatttcctcaatttcagaactttttattcctatattcagggattcgacttctttgtttagtcttgggagggtttatgtgtccaggaatttatccatttcttctacattttccagttgatttgtgtagaggtgtttataatattctctgttggtagtttctatttctgtggaatcagtggtgatatcccctttatcattttttattgtgtctatttgattcttctcccttttcttctttattagtctggctagtgatctatatatttggttaatcttttcaaaaaaatccgctcctggattcactgattttttgaagggtttttcatgtctctgtctccttcaattctgctctaatcttagttatttcttgtcttctgctagcttttgaattggtttgctcttgcttctctagttctttaagttgtcatgttagcatgtcaattttagatctttcttgctttctcctgtggacatttagtactatacatttccctctacatactgatttaactgtgtcccagagacactggtacgttgtctctttgttctcattgctttcaaagaatttcattatttctgtcttaatttatttatttaccgagtagtcattcaggagcaggttgttcagtttccatgtagttctgtggttttgagtgagtttcttacttctgagttctaatttgattgcactgtggtctgagtgactgtttgttatgatttccattcttttgtatttgctgagtagtgttttacttcaaattatgtggtctgttttagagtaggtggtatgtggtgctgaggagtgtatattctgttgatttggtgtgtagagttctatacatatctattagatctgcttggtccaaagccgagttcaagtcttgaacatccttgttaattttctgcctctttgatctaatattgacagtggggtgttaaagtctcctactattattgtgtgggagtccaagtctctttgtaggtctctaagaatttgttttatgaatctgggtgctcctgtagcgggtgcatacatatttaggatagctagctcttctttttgcattgatccctttaccattatgtaatgcccttctttgtctcttttgacctttgttggtttaaagtctgttttttttcagagactaggattgcaacccctgctttttttttttctgctttccatttgcttggtaaatattcctccatccctttattttgagcctatgtatgtctttgaacgtgagatgggtctcctgaatacagcacactgatgaatcttgactctctccaacttgccagcctgtgtcttttaattgggcatttagcccatttacatttaaggttcatattgttatgtgtgaatttgatcctgtcgtgatgatgctagctggttattttgcacattagttgatgcagtttattcatagtgtcactggtctttatatttttgtgtgtttttgcagtgactggtactggtttttcctttccatatttagtgcttccttcaggagctcttgtaaagcaggcctggtagtgacaaaatcccatttctgaaactttcctttcaaggggaatctaatataaaatgaaataatttgcactgaatcatcaacattaagaggagcttttaatttgacacttactttataaaaacaatggggcaataatttataatgatccaagaatgtttcaagaatatttaacacaacttccaagaatatttatcctccctaaatgtctctttaagcttttcaaatgttaggatcactgaacactttcatttatttatttctgtttggaaggagtggtgggatttgcaaaatattgagttcataaaaaatgtcaatcagaaatgatgtacctactcaaaaatcaacatttggtattttagttacaaaatgagtaaatttagttctgatgttacaattccatacaaacacatatgtgtacacatacacactcacactcacgcatgtgcaagctcagtcttgttcattagtttttatagttggaatatgagattgatagattatctcttcttccaagttcactattgtcaattaatagcactgagatatctctagataaaagtgagacatgctagtatccagacacaaccataactatggtggctttccaactacacagattttgaggggaagatgtgctttttggtatgtgaatgtgagagatgtctctactttcaacatgaatttttttctaagtcatatctacctctccatgataaccattctgtgttctaattgattctaatgtttatttctttaaaagacaaaattacagctgtttgaatttaatgtggccacatgtgtcggatcacaagaacaccaaatttctatgtcggccaattttaagtgcttaaaataattttgggtactggagcgtgatataacaattaaaatttaatttggtcatatacattaaaataatcttaatgtattaaataagcttaatgtttaatacattaagaaataatgtattaaataaacttaatgtattaagtaaacaatttatatgcaatataatctcttgcttaactcacttttaattgtttttaaatactataatttttttaaaatttttctccttgtccctttttgaaatatttttaaataacttgagttataattataatgattgttttctcagtaagtaatgatttaggtttgctatatcagatatatgtttaatttgagttttctaggatgttataagtattctccatgtataagagaattctagctacctaggtacagaggaaaatagaaaaaaaaatctgtttctgaacatctaggatttttccaggcattggatactattcaaaagaaggttgttattacacatagcagagttatcccaaacattgtgaagatgctcaagagctcctgctcagccttgtgaatagatgaccgaagtagcctgtgattctatacttcactgatattgccacttgtttccgccagtccccaactactccaacctgcctcaagaatggctttaccagacatcctatgttaaagaaagtcaaggtttgtggaccacatttgcaaaagataaattataaattcttgaatgcaaagttacccatctctgtaatgtgaaacttaacaaatattgaatagtacaaacatttaatttcaaggtgtcattgtcctggattttagagaataaatgagtttgcagtgtcagatacttaggaagtcttgaaaaagaggttcattatgcataaagttctaaagtcaaacattgcttttatacttcttttgctctagacttattctaacaccttttaaataaggacttggacaaatagttcatttactgtattctaattaaaattttcatataattttaaatttatgttgaatatcttgttcttacttgcccttattagcatgtagcaaaaattttatcattttgtgatatctcataagctaaataaaattttgaatttaaactcacatgtgtcattttaaacatgaggcataaattgaaataatcacaaagatcgttttttgaattgtcgggccttgtgacttctttgatatttattatcttatgatgttttggtttgctatttttgttcatttccttttcaaataattatggtctaggtataatttacttgtgtgttttcattttaaagctaaaattgattttataaatattttctgacatctcttcaacttaaaatataaaatatgttatggttatacttattactataacgatgacttctttatctatatatcataaatatttccatgaagtctttatgagcaaagaaatattaatttcagttgataataaaattatgttttagcacatactgtgtatgagacactgtgctaagatgttcatgtgggttatttcatttaattttcacagataccagatttggaaactgagatttgaagaaaataagaaacaggtacaaaatcatacaaacactaaaaactcagatgacaagccagggcagtcttaaactacaactagtactctaaacaattaaactacagagtcatactacctgatgaaacttttaaaatatgaaacctttcaaacaatttaaaaagtacaaagaaataatttagctgacacccatgacccccaaacccccaattcagtagagattgacattttataattttattttatttattttttattatagtttaagttccgggatacatgtgcataacgtgcaggttaattacataggtatacacatgccatggtggtttgctgcccccatcaacccatcatctatattaggtgtttctcctaatgctgtgtccttcccctagcccccaacccacaacaggccctggtgtgtgatgttcccctccctgtgtccatgtgttctcattgttcaactcccgcttataagtgagaacgtgtggtgtttggttttctttcctgtgttagtttgctgagaatgatgtttccagcttcatccatgtcctgcaaaggacgtgaactcattgtttttatggctgcataatattccatcttgtatatgtgccacattttctttatccagtttctcattgatgggcatttggttggttccagtctttgctattgtgaatagtgctgcaatatattttataattttatttcatatctttcttctgataccctccaccactcctgtttccttttgagaactgatactaaagatagtctattccagtggttctctactagaagcagtttttctcccctgcctcagaggggaaaatttctgaaaacagttttgcttgtcacaactggggagaagggagctattattaaccaaagggtaaagccaaaaatgttgttaaataacctacaatgcagaggagggcatccacaacaaaaccctagtctatcccatttattaccacttctttttctcctgaggagtcaccgctatcaggaagttagggtgaattatttccctggaagtcttcatactttcattacataatatacattgaaacataattttatgtatttatattttatatagattgcatcagactgtttttcttagaaggtttttataaacttgacattgaaatccatttactatgataattttatctactttagctatataatggattttgatacttcacataagatacatcttatattgctatttttgagtcttcactgttccctgagctttattttttatttttgtttttaatttttttatggatacctaatagttgtacatatttatgtggtgtgtattatattttgatacaaacatataatgtttaatgatcaaatgtgggtatttagcacatccattacctcaaacatttgtcatttgtttgtgttgggactattccatatcttctagttactgaaatatacaataaatcattgttaaatataagccccctattttggtaccaaacactacctgttaaccaacgcctctttattccccctcccaaataccctacccagcctctggtaacaccagtctattgactaccttcatgagattttttttttttttcagctctcacatatgagtgagtacatgcaaatttgtctttcaatgcctgggttatttcacttaacataatgccttccagttttatccatgttgctacaaatgtcaggattttagtttctatggctgaataatattccattatgtatacatatgacattttctttatccattcattcatggacacttgggttggttctatatattggctactgtgaatagtgctgtgataaacgtgggagtgcacacaactcttttatatgcagtttttctttcttttggatatatactcagcagtagaatggcttggtcatatagtagctctatttttagttctttgaggaagcgccatactgtttttcataatggctatactaatttacattgccaccgactgtgttctctgaactttagtgtgagcttttcacgtttcataaaatttcctttggaattttgactgaaattgcactgaatctagtataattagtgcattgctatctttaatgatcttttcatctaataatgcaaggatttctctctgcttctgcacatctttcacgcttatgtcctgttttataatgtttttcaattattttgttcaattttttgccatacacctgatagtttagacacttttataaatgctgacttttaaaatattttctggtattttgttgcttgtgtagaggaatgaaaaagtgctgaatattctgaaagttgtctgggtctacttcataactgaagttgttttctgtatgggcaaccataatgtttgtcttttgtttcttccatttggattggtataactcttttgccagctatgaaatctagtatactatttgaataaaggcatgagtagtagacatacttactatatacctatctttaaagaggataatttttaatttcagcattaagtgtgttatttactataggttttgggtagttatatttacaattctggataactttttttctaattcacttacttctacatccattccataaatggatattgacttttgtcaaatgggctttctgaatctgtgggcaagaatatatgacctttcttctttaatatattactttgagtaattaaatgtattcattggataatattccaccatttttgccttcctagtaaccattcatttttgctcataataccttatatatgcataaatatacataaacattcactgctgaatttgtcattgagaggaaagacatcctctcaagagttctgttttgttttaataagcctttccctctgacttcctttattctttttaatgtttttattatattttaagttctgggatacatgtgcagaatgtgcaggttagttacataggtatacatgtgccatggtggtttgctgcacccatcaacccatcatctacattaagtatttcttttaatgctatccctcccctggccccctactgcccaacaggcccgtgtgtgatgttcccctcccggtgtccatgtgttctcattgttcacctccctcttatgagtgagaacatatggtgtttggttttctattcctgtgtcagtttgctgagaatgatggtttccagcttgatctgtgtctctgcaaaggacatgaactcatccttttttatggctgcatagtattccatggtgtagatgtgccacattgtctttatccagtctatcattggtgggcctttgggttggttacaagttttgctattgtgaattgtactgcaataaacatatatgtgcatgtgtctttagagtagaatgatttataatcctgtgggtatatacccagtaacaggatggctgggtcaaatggtatttctggttctagatccttgaggaaatgccacattgtcttccacaatggttgaactaatttacactcccaccaacagtgtaaaagttttcctatttctccacatcctttccagcctctgttgtttcctgactttttaatggttgccattctaactggcatcagatggtatcccattgtggttttgatttgtgtttctctaatgaccaatgatgatgagatttttttttcatatgttagctggccaaataaatgcctcctttgagaagtatctttatgttttttacttgaatgatgacaaaaataaattaggtttgtttttaatttatatttctttgctttagataaacattttctatgtagctatccttttatattttatttgttccctcttctctctctactccattacaatttgcatctctattgtgttgtgtttacacacatatatatcatccatttttttggaatgtatatttttgtcatacatatatattgatataattgtaattttaatcacaactatcacacatgtacacacacgtttatatatttaaaaattttgtgtaagtaataaatttgtgtgcatgcagtttccccttgatgcagatgaaggagtgtctattaaaatctgttattcattttgagttttagtaatatggggagggtgcagtgcatgtgtagtaagacttgtggagaagattcttaggatgccaataataataattttggttatcatcatattcgtaataatatgataggaaaacaacttaattgctgttccaggaattatgcagatatttcacaagcaaattgttacagattcttaaaacaacacagtatattgacaggtttattcccttttggcagatgccagatctaacatcccacaactattgagagtagagccaagttttttatctgcccccataagtagtgaaattgtatactcttctcactgtactctgttaacattgatagactagaaacttcttggtgcttggtcatagcacacttcaaaacaactggcaatgtcttctgagtgagggtagtcacaggtcagagtggattggataaaggttgatggatggttgccatcatctatgtggttcccggggaactctaatatgctcatagtatttgctatcatagtttcctagaaaagagtgcatcctctggacattcagcatctacatctctcacacctgcttggtggcaagttttgtagtccagtctgaaaattattttaaagccttatgtgaattatgcttctatttctccctttccttgaattgctatgcaggttttgccactaagccatctagtcataattccccctttgtatttgagaagcttactttaccattttttaaactttatgtgaagttttcagatgctcgaagtctgaattctgctttacatttctgattttcactttagagctatacacgttgttataaaatttcttttcttttttttttttttttttttttttttttgagttggagtttcgctcttgttgcccaggctggagtgcaatggcacaatcttggctcaccgcaacctctgcctcctgggttcaagtgattctcctgcctcagcctcccgagtagctgggattacaggcatgcgccaccacgcctggtcaattttgtatttttagtagaaacagggtttcttcatgttggtcaggctggtctcgaactcccgacttcaggtggtcctcccgcctcagcctcccaaagtgctgagattacaggcatcagccaccgcacccggcataaaatttcttttatgatatttatcttcaaataattgagagagaagcagtgaagtctgcctgcattcaaatactgactccattatttcgctagtataatttcaggctagatattaggcttcctgagcatcagttttctcattgtatgaataaaacagagaaatcataataaaagtacttacctcatctgattgttggaggatagaaacaaataccgtgaagaaaagatttatcattcaacaaatcataggcaagaggcatcacagtagtatccccagctactgcaaattgagaattgctatttttagtttcgctcattcatttctccacataagtttttcaatcggtaatcatagttctaaaactgtattttgattgtatttgaaattttcctaaatctatgcatttttatattcatatagtatttactatttggaactgtgtagcagttagtttatagtatttaggatctgtataaacagtcatgcgctgcttaacaatgaagacatattctgataaatgccatgttaggtgaggtcagcattgtgtgaaattgagaatgtgcttacacaaacctacatggtatagcctacacacctaggctatatggcatagcctggttcttctaggctacaagcctgtacagcatgttgctgtactgagtactgtagggaattgtagcacagtgtaggtatttgtgtatataaacctatctaaacacagaaaaggtgatgcttttcagtatgaagttacaatggctacaataacaccaggtgatagaaatttttcagttccggtataatcttatgagaccaccgttgtataagcagtctgtcattgactgaaatgtcatgtggcacatgacgacactctttagtaggtggaattgtggtaagcctatatatttactatagtgatatggtattaatagagcgaccccagttcattatatgtatttccatttatttgcatctacttggactcaaaaaaatgttatgaacacctccttttttgcgcaggggagttatctaaaagaactttgttgcggctagtgtggcaggtggcaaaggttttacatgtcatgtacatatgctgttgttataagcaaacaaatgtctgttgtgtgtgctaatgatctttgctgaattacataaatattatttgattatgtattactaaccaggattcattattgactttctttattgttattagtgggaattaatctgataccttccaaggcactcagtgttttctataaataacactattcacctttataacacatatttttatttgctctgtcttttaaattagcaggattccctataatgttgagcaatattggttgtgattcatagccttgtttgttactgaatttgaaggggtctttgaccatcattttgtcattgattgtaatgttagttttaggctatatgactatttctaaaatagtattttattttatttttcaaaagtattttattgggagggatgtcaaattttcacctggaattttttaatgataagcaatttaatgtttttagcctactgacattaccgttgttacattgaaatatccttttatctctgggttacatgagacgatgagtttttttttctactttaaaaaatatttaaaaagttaatttttattttataagattggattcaaatcataattaggtcactaggacctttatgcatttctattataatttttatttccttcccttttaatctgtgatataggggtgtaccttattctgtatgctctcctcacacacacacaaagtagctgtaatggtcagaatttatctttcgttctcttcatcttcatcttcatcttcatcttcctgtctttctcccttcctccctttctcctctcctcctttcctcctttcctctctgtctctctctctctctctctgtctctctatctctctctctctctttctctctttctttggtgtctcactccatcgctcaggctggagtgcagtgacatgacctcggcacactgcaaatttagcctccgggttcgagcaattctagtgccatgcccagctttttaaaatctttatttttgcatttaaaatttttttttagtagagatggggtttcaccatgttggtcaggctggtctgaaactcctgacctcaagttatccacccgcctcagcttccaagagtgctgggattacaggcgtgagccactgcacatggccacatttttctttcttaatctgataacttttaatatgtttatagctataggtatttatagttataggtatttgtacttatactttatgctaacagaggattatctttttaaaataaagagttattctcctgattttggtgtatagtaatgaatgtccatgtacagaagttctcttatttatttataattctattttattttttcaacctctgcagaataaaaggggtattttgatggtaaattttatgaaagttcacagatctgaaatcatttttctctcatcttcatatgtgaattacaacttgcttgggtaaagcagagttcttggatcacacctctttttttcttggatcacacctcttttttgtaagactctgaagttattcctctgttagtgtctgaagttgagtgtcacagcagagaactctgaaacaataatgctttggcttctttgaaagagtttgcttttgttctcttatagacatagaaaaaaaaaccctctttttccttgaaatttaagactatttccttaacaattgtactgaggtcattgtgaattcaatctcaacactttttttgtagttttgaaaagttttctttaattctttcaaatctttttgtaaagagttataaaccaagtgaattgaaataaacaacttattcttgtttattaattcagttctacttctgtgttctgtgttttcaatatctgtcatctcctttttcatcctctgtctctctctattaaattggtttctattttatatgtatcatctgcttaacttctggtaagcagatacatatttgagcaacatgaattctcatatatagttctcccaatcacttctcaaataaatgctcgttaaaattgtaacaacaaaaagcttgtaatcctagcacccagaaacaagttataattatcgtatattcagaaatatataagcatatgatggtgtcttaatgtatacataatatattagataactgaacccattttcaactcaacatatagtaggcattacatacatcatcaaaatttagaaattttagaaaagcaacagaaaaacatcatttgtgataaccacacccagataatgactattactcaaatgagtatggcatatatataatatatatttttatattatatatgtgtgtgtatatatacacactctctggaaaactgttctcttttcaaataatttttaaaatgctatattacataaatttaagataattatatacaataattaatatgctaatttgtatattaatttttatacattttacaatgtactactttctcaggacagcaagaaaatatgtcctgtaactagtatctctttcaacaaagtttgtgaaatgcagtattttttttttttacttatatccttcttttttttcctttagatatcttacttccttctcaatgcacttccaatactagctcactctcactgttcagaaagggggactggtggaaataggcacatctcttactcttatccagacaaaaatgtttctgatacctcatttcccccaagatagtttttcttatgtcctggttatatcttacattatgtgccccacagtgtggaatgctctaaagagcacaggcttttgaatgagccaggctaaatccggtactgcttctaccacttacaagatgtgtgtgtttggtgaattagtttactttccagaatctcatttttaccatcatttaagtgtagatcatattacctttcttaaaagtcactgagatagatagtagactcatttgcagattatataaaatactcctacacattcaaataaaaaggaaatgaccaatattcatatagaaatatttctacatgaattccttaagagagaaaggcaattttattttattttttaaaataaactgtattgtgtactgtcagctcacatatttacttatttttgcccccttgtgacaaaagcagctataatttactcatttaccaaaactcctgtatataatacgctaactatcattcctcatagtttacattaaatctctcaatgtgttaatcctaaatatttgatactttgtatcgattgacctacatctcctcatagcttctgcctcccacagcctgaccctggtaaccagtattttattttccatctctatatatttgatcttttttaaaatttcacatacaagcaagatagaccgggtgtggtgattcacgcctgtaatccgagaactttgggaggctggggcgggcggattacctgaggtcaggagctcgagaccagcctggccaacatggttaaaccccgtctctactaaaaatacaaaattagctgggcctggaggctcacgcctgtaatcccagttactcaggaggctgaaacaggagaattgcttgaacccaggacgcagaggttgcagtgagctgatatcgtgccactgcactccagcctgggagacagagcgagactccatcttaaaaaaaaaaaaaaaaaaagaatgtcatgcaaggaagatcatgcaacatgtttttttctgtgtctggcttatttgatccagcatagtatcctctaggtccattcatattgtgacaagtgacaggatctcctttgcaaaaggctgaataatgttcataaactatgatagtttcttcatccattttttcattgataggcacctagattattttcatagctcgactattgtgaataaagctacaatgaacataggattgcagatatctttatgaggtggtgattttattttcttagaatggtagttctatttttaatttcattagaaatctgacactgtttcccataatgcctgcaccaacacagtacaagagtttccttttttcccccattcttaccaacacctgttatctcttatcttttttataatagttatcctaacagttatgaggatatatagagttttgaattgtatttcctgtggaattagtggtgttgagcactttttcatgtccttgttagacatttttatgtcatctttggagaaatgtctattcgagtcttttgtccagtttttaatcaggttatatatttcttactatattaagttgtatgaattatgtgtaaatcttggatattaaccccttatttgttatatggtttgaaaatatgttttttcccagtctgttgattaccttctcattttgttgattttttcttttgctgagaagaaactttttatttgatgccgtttcttttatttatgtttgcttttgtagcctaagtttctggtgtgatacccaataaatcattgctaagactaatgtcaaggagcttttcctctatgttctctactaggagttttatgatttcaagtcttatgtttaggtctctcatccattttgagttgatttttgtgtatggtgtaagagaaggattccatttcattgtctcggatatgtcaatccaggtttgtaaatccagatatgtaaatccagcaaatttattgaagacattgtcctttcctcatgtgtatttttggtgcccttgtcaaaaattagttgactgtatatgtttagatttattttggggctctttaatctcttccactggtctgtgtatctgtatgcaagtatcacattcttttgattgctatagctttgtaatatacttttgaatcaggaagtatgatgttttcaacttttttttttttcagaattgttttggctattcaagatcttttgtggtttcatacaaattttagggtttttttatctatttttgtgaataatgccactgggattttgatagggactgcattgaatctatttattgctttatgtagtgttaacattttaacagttagtgtttctgatccataagcatggaatagcttttcacttatttgtgtcctatttaattttttttatctgtattttctagttttcagtttacgggtctttcacctccttggttgagtttattcctaagctttttatgctattgtaaatgggattgttttcttgatttatttttggtctaggtcgttatttgtgtatagatatgctccaaagttgggtaaccatcaccgccatccatctccgaaactctctgactacacaacattatgaatgtatttaatgccacttaactgtacacttaaaattgttaaaataggaagttttatgttatatatatttgccataataaaaaattggaaaaagtgcagttaatatttaaggagaaactatactattaaatttcttttcttaatattatttctttaaaatatttaattaaaatactgataaatttattttgcaatctatccatctgacaaagggctaatatccagaatccacaaggaacttaaataaatttacaagaaaaaacaatcccatcaaaaagtgggcaaagggtgtgaacagacacttctcaaaagaagacatttaggcaaccaacaaacgtatgaaaaaaaaaaagctcttcatcacgggtcgttagagaaatgcaaatcaaaaccacagtgagataccatctcatgttagttagaatggcgatcattaaaaagtcaggaaacaacagatgctggagaggatgtggagaagtaggaatgcttttacactgttggtgggagtgtaaattagttcaaccattgtggaagatggtgtggtgattcctcaaggatctagaaccagtaataccatttgacccagcaatcccattactgggtatatacccaaaggattataaatcattctactgtaaagacgcatgcacatatatgtctattgcggcacaattcacaattcagcaaagactcagaacaaacccaaatgcccatcaataatacattggataaagacaatgtggcacatctacaccatggaatattatgcagccataaaaaaggataagttcatgtcttttgcagggacatggatgaagctaggaaccatcattctcagcaaactggcacaaggacagagaaccgaacaccagatgttcttactcatgagtgggagctgaacgatgagaacacagggacacagagagaggaacatcacacactggggcctgtcatggatggggggctaggggagggatagcattaggagaaatacctaatgtagatgacgggttgataggtgcagcaaaccaccacggaacgtgtgtaactatgtaacaaacctccatgttctgcacatataccccaggacttaaaagtgtaataaaaaaaaatcctttttaaagttaaaaaataaaagaaatgatatgatgttttgcatgttgattttatattctgcaactttattgaattcatttattagacctaacagtttttggtggtgtctttgacgttttctacataaagggtatcatttgcaaatacagataatttttcttcttccttttttacttggatagcatttatttctttttcttgtctactctttgtagtacttcagtactgtgttaaatagaagtggcaagaatgggcatctttgcttcgtaccagatgttaaaggaaaagctttcagtttctccccacttattatgatgttagctgtgctttttaaacaaatgtcctttactacggtgaagaacttttcgtctatgtctaaactgttgagaggctttgtcaagaaagaacgttgaattttgtctaatgtttttacctgcttcagttgttatgatcatgtggttatatctttcagtctgttaacatgatgtatccattggttgatttgcatatgttaaaacaaccttttagataaggataaatcccacttgatcatgaaatatactcttttgatgggatgttgaatttaatttgctaatattttgtcgagtaatttttgcaataatgttcttcagagatattggcctatagttttctttccttgggatatctttgtcttaggtctcaaggtgatgctggcttcataaaatgtgaaattatgccctccagctctattatggaagaagttaagaaggattaatattaatttttatttaaaagtttggtcaaattcagctataaagccattgggtcctgggtttttctttcctgggagatttttaattaatgcttcaatctcttttattgttattggtctgttcaggctttctatttattcctgattcacttttgtaattcatatttttgagtaatgtatcaattttctctaatttatcaaatttgttggtgtatagctattaataaaggttccttatgatcctttacatttctgattttatatataagtcttatctctatttgtttagttagtctggctatgggtatgtcaattttatgttttcaaaaaaggtatgcaaatttaaattacaatgaagtagcacaacacacccaacaacatttctattgactgacagtgtgttttggtagtaataaacagaaataggaacactcataccttgctggtgggaataaaaattgccacagctactttggaaactttctgaaagtttctgctacaagtaaacatacactgtctctttgatccagtaatagttcacctagagatttcagtactcatggcagctttatctataacagccccaaaatggaaataattttaatgtctgtcaatagtagaagaaataaatgaagtgtggtgtattcttaaaatggaatgctacactactaatacacgtgaagacactgaaagaagcgttctcagaaataaccaagactttatagactatatgatgactaatttcatgaatataaagtcatgagcaggaaaaaacaatctgtggaaatagaagttcaaataatggttacttccatggaatggcatgggtatgactgaaaagaggcaaaaggaaactttcaatatcccgatccaggtagccattttataggtatatacacatataaaaataaattgtttaattgaacccttaaaatgaatgaattttatggcattcaaattatacttcaataaactgttactgaaactccagctctacatttaagatatgtgcacgtcaggaagtttctgattatatgcattagctcaataaaaaagaaaaaagttaataaaacaatgagatgtgtataatatacaatattttttctgacatttaacagagtctcaagaaattggagctattttggcttttataagtaattctgaaaccagtatacagtacttcatataaagtcaatttaaagaaaaaatgtgcttcatattcctagctactgatttaaacaattagtttttggactactacctgttcatgaattgggggcagcctatatatatgcaatgaattttctaacaaagaaagtcctagatacagaaatgagttatattctgtatcatctgcaaagctgtttgaagaaaattaaggaagtataaaatagactacaaatgtgtttccattgcattgcctgtaagagatggttagtaagaaaagaaaacacactgaaaaagatgaatctctgaatctgggacaaatctgctgtgtctgagtctgcatcaaagcctgccttactgttttgccagaatttgtgttctttttccagagaaaggtgctatctatttgacgactgatccataacatttgttaatgaaaactagcaaacaaacaagaaaaaaattgattttcttaaactatagtcctaatctctggatttaatgtgtctctagagttaaagttctcactttgatcttttaaacaaacaaaaataaattgaaatgtttccacctctaatagtgctaaccaacaccatcatgcttagtgattgcatggcaagtgcaatacacgttatgcagaggttttgattcacttggtaaatggagcttcaaaaattattatcaggtttttaaacaatgatagctatgaaatggtatttcaaaacagcactttaaaactatacccatttaatttgttgtatttttctgttacatttttataggttcctatttctcctgctgctgaagttgcttagccttatcgggttttatgaatggaacagagtctgaagtagtttacttaatgagcccaaactatctgtgtatttcatctttatgtaatagacaaagactacaagacttctttctacttggttctagtgagcctgaggcataaacaattttgggttggcttataacaaagacagctatataatatgagaattaaaacagaaatagaagaacaagggattagaaacaaacttctaatattttttgtaactacattacatcttattttgtgatttcctagcagtcaaagcaaaaaaggtaacacaattggttttacatattttatattctactgaaagtaatcacattcagtaggagtaatagttttttccttataaataaatgatgaagaaagatctacatcgctgaaattttgaacaacttaatgaacaaaggttttaccaatcatttcacagaatttggagaacatattgtattggttctcaacaaaggatgaatatgtcccataaagtttctatccaaattatatggtgacgaatgggagagacaaaaggggagagagagaaggagagagatcacgaacaaaaggaattaaaaactactgtaaagcaaaataatgtgggtgatggcaggtttaaaaaatgttgagtttgaggtgtggctggggcatcagagtggagatgtaaaaaaagtcattggacatgtaagtatgacttaaaggataggttaagacaagaaatatagagctagacgtttttgcataaggtgatagttgaggaccaagtagaggacagtaaagttaaggaactaaaacactgaaattagagatggaaggaatttttaaaggtcgaaaggaggataaataccttagtaactgaaagcagagaaataaaagcagaacaatgggaattctttcacgtaaagtaatgaaagaaaaaaacaattggaaagctctcgtcagcagtgctacagaggctccagaggaggctgaaaaaagagttacatcatcagtttgtgtcaagaagatcattgataagctttgagtgagcagttttcttaaaatgtggggagacagaaaaccaataacaaggtgataacaggttagttgagagatggtatggaataggacatttttaaaaagtattcttaaaaagtcaaatatacactatgcatctctggagaaaatattctaaaaatatttttgtcctctcaactttaatttcttgcctgttactgaggttttgaacttttttgtctgcactcagtacatttgatcactttgtttcatctttaggaccactcttagagttttctattatatgtgtgtgtgcatgtgcatgtgtgtgtgtgtgtgtgtaaacatttttagaattaaagaaaaattctgcatatgtgctttgggtacagggaagcaagtaaatggatgaagggtccaaaggcaagaggaaacaattaatgcaaatcctggattaagctaagaatgaaaaattgaagcacaaagaataatttcaggatgaacacattctgatgcaagaactatgggagagaagaggtagaaaatatggaatatgtttaaggtggaagaatgattgctaggtaatggtttgtatcttttcagtaaagtaggaggcatagtctactgtgagttacaatagtgaggatggtagaagtggatgctgagaacagtatgtcttgctacagatatttttggtgatgacaaagtacaagtaatcaatttcagttttttaaaaaaagtattctgaggaatgtatttggctcaaggatcctggagatgtattgtcatgattagactgtaaaaccctgtactattttccaaagtcatcagcagtataaggatttaggtgaggaatagagaagggtagttatatctagtattgggaacagatggcaaatgttcaggaaagcaaggaaatatgtggcctttgtaattaaacaataactagctgaaatgataaaatggaaatctgggtatccagattctgtttatcaactataatctgttgattacagtttagtaggtatagtttgctatttttttcatagaaacagactctaatgacagatggctttcgttattatagggcattaataactggtggatactatcttgtattatgcttgttttcagaaaatacatagttaaatcacaaaagaactttaaataccagcctattgtttggggtaacctcaacatgataaaggccatatatgacaagcctacagctgactcacgctcaatggtgaaatgctgaaagctttttttctaatatctagaagaagacaagggttatcattcttaccagtttcattgaacatagtactgaaaatcctaaacaacaattaggcaagaacaaaaataaaagacatccacattggaagggaagaaggtacatggttttggtttacaaatgacataatcttgtgtagagaaatgttaacacccccacaaaaaaaaataactggtgagacataataaattcagtaaagttgcaggattctaaatcaacatacacaagtggtagcatttcaatacactaacaatgaaatgcctgaaaaataattttaaaaaagcaatctcatttgcaagagctataaaaataaaatacttaggaatacatttaaccaaggagatgaaggacactgaaaactataaaacattgagggaagatattgaagaatacacataattggaaagaaatcccatggttgtgaattggaacaattaatattgctaaaatatctatactatccaatgtggcatacagatcagttcaatatctaccaaacttcttaagttattttttaaattaaaagaacttctaaaatttatatggaaccacaaaatctcatgaatagtcaaagaatcttgagaaagaacaaatagctggagacatcacattacctgatttcaaactatattacaagtctatagtaatcaaaacagtatggtattggtatgaaaacagacacataaaccaaaagaacagaatatggagacagaaataaaatcatctatatatgggcaactaatccttgacaagagcttaaagaatatacaatggagaaaagataggatgatcaataaatgatgttaagaaaattatatattcacatacaaacaaatggaattaaactcataccacacacaaaaatcaactcaaaatggattaaggatctctaaatataaggtctgaaaccataaaactcccaaaataaaacataagagaaatgctcattgatatgctcttcacagtgatttcttggatctgattccaaaaacggagaaaacaaaagcaaaaataaacatgagactacatcaaactagaatccttatgcacaacaatggaaacaactcatagatgaaaaggcaaccaatgttataagaaaaaataattgcaaaccatgtatctgacatgaggcaaaatccaaaatatataagaaactcatacaactcaatagctaacaaaacgaaatgaaacaaatgaataatctgatttttttaaatgaatagacattttttcagaagacatacaaatggccactaggtaaatcattaatcatcagagaggtgaacaacactaatcaggaaaatgcatatcaaaagtacaatgagatattccttcccacatgttagggtggccaatataaaaaaagaagataacaagttttggtgagagtgtggagaaatgggaactctgtctactgttggtgggaatgtaaattggtatagccattatggaaaaagtatgaatgatcttcaaaaaaaaataaaaatagagttaccgtaaaatccatcaatcactcttaaaggcacatattcaaagtaaatgaaatcagtatcttaaaaatatgtctgtacccccatgttccctgaagcatcattcacaatgaccaacgtatggaaaagcctgagtgtccaccaatggattaatgaaggaagaaaatgtgccatatatatacacaataaagtacaaagctttctttgtgtattcttctatttgcatgtaataatctattgataatacctcttcaaaacaatttggaattgctcttgaacttgaagcttcttctactagtctcactgatgaaactgtaaattattaaggatataaataagaagtgtaaggaatttttaattcagaagctaacaggaaagctctttctttgctccagaggtaggctttcatatttgcttctccttcttcccacagaagaaataattaagctttaattcgaaaataatacctttaactgacgctatgaagttactgtggtatgtaacatacgagtagggtgaggtttagtgttgtctcattttgttcagatagttttagaaggagctaagaaagcattcgtattaagaacaagtaaattaaaatgagcctaatttctaattgaaaaacacacatgaatacttagaaaaccactttattagtgaaatttgtttacagacttcaatataacaaggataagaacacttttatagtacctgctttgtgccacacactgatgtcactgatctagttgctgaatgtgtgaaattcatttaatccttgaaacaacactacgaggtagatagtattttaatcatccgattacagataatgaacagtctgaagatatgcaccagatcagacaagcgggaagtagaaaggaccaagattcaaaccaaggatgtctcattaaggatctcatccacaatactcaactgcatttgagtattaaaaaagaaaaagccacaattgccatgggattgactttattatataaaacagaatgatgacattatttgtaatcacagactccagtcattttgtttcagaaattaattctctagtgaaataaggaaataagcaaatgtaattcataaattgtaacaataatttatttctctgcttggccccagcacacctgaaacagtgttttgttcaaaatagagcctcaaattggtatctattagtgtatattttgccacttgaggtgttttaaactgtgtagtgagtcaaactaatcagaaatatcaaaatacgtatacttaaatacttttaaaacctcttaatatggtggactaaaaacataaaaatgcagaattcttgagtaaagtgtcaagattatctatcatgttattaagtggcatttacaaaccctctagtgagttacatgtaggattgctagcaatatgggttttgacttctcagagtacttagagatttttataaatcaaatgtgttaagaatgattaaaaatgttgaaattctatatgaataacctgtttattttctttccaaagaatgtaagtgccccccaaataataacagccaacaattttttaagacgtgatggtagagcagcagtcatattcactaaaatcttttaagtcttctgaattaagccttttcacagaaagaacaaaggccagcaggatggttttaaataatgactacaaactgatcagtgcacggactgaggaaagcacatttgccaaacaacaagacagtaaaatatatgatcaaattttaatattacagttcttttcaaggataatagcttaatttaaaatggaactggactcctctctcagtttttgcatacctaaggattcgtaaaatataaactacagattagggactataaattctgaaaggctttgaataaagcaataaataatcgtggtgcacattcttgaaaatctctctgaattattgacaaatagcatgccttaaataatacaaattgcttatagttcccaacagcaagctagtatgacaattagataaagaagttaagcacgtattttattatatggcatatacatgatgcatttttatatacagttatgtgcataataatctttttttgttttttatttttatttatttatgtttatttatttattttttttagtatttattgatcattcttgggtgtttcttggagagggggatttgccagggtcataggacaatagtggagggaaggtcatcagataaacatgtgaacaagggtctctggttttcctaggcagaggaccctgcggccttccgcagtgtttgtgtccctgggtacttgagattacggagtggtgatgactcttaaggagcatgctgccttcaagcatctgtttaacaaagcacatcttgcaccgcccttaatccatttaaccctgagtggacacagcacatgtttcagagagcacggggttgggggtaaggttatagattaacagcatcccaaggcagaagaatttttcttagtacagaacaaaatggagtctcctatgtctacttctttctatacagacacagtaacaatctgatctctctttcttttccccacatttcccccttttctattcgacaaaaccgccatcgtcatcatggcccgttctcaatgagctgttgggtacacctcccagatggggtggctgccgggcagaggggctcctcacttctcagacggggcggccgggcagaggcgctcctcacatcccagacggggcggcggggcagaggcgctccccacatctcagacgatgggcggctgggcagagaccctcctcacttagacgggatggcggccgggcagagacgctcctcacttcccagactgggtggctgggcagaggggctcctcacatcccagacgatgggcagccaggcagagaggctcctcacttcccagacggggtggccgccgggcggaggctgccatcttggtactttgggaggccaaggcaggcggctgggaggtggaggttgtagcgagcggagatcacgccactgcactccagcctgggcgacattgagcactgagtgagcgagactccgtctgcaatcccggcgcctcgggaggcccaggtgggcagatcactcgccgtcaggagctggagaccagcccggccaacgcggcgaaacctcgtctccaccaaaaaatacaaaaaccagtcaggcgtggcggcacccgcccgcaatcccaggcacttggcaggctgaggcaggagaatcaggcagggaggttgcagtgagccgagatggcggcagtacagtccagcctcggctgggcatcagagggagaccgtggaaagtgggagacggagagggagagaatctttttttattatactttaagttctagggtacaatttaaaattatattggttttgtcttaagttcaaagatatgaataactgctattttcattaagtataatcattactaagttaatgaagtatttgcaaagactctaaatttgaaaaagcatgaaatattagtaagagataataatgtggtaagtggatcccttctctatttggagagaatgctttctcttgggcatgcaaaatgcccttgagtgtgatttgatgcgttggacagagcattgggctgggagaacagataaagactctttccactttgccagttattaggctggctccttggccaagttaactaaacatccttagctctaatatcctcagatgtaaaataggaaaaaagtaattttcattttaatagatggtagtgaagaagggatcaaatcatacaaatcatacatgtaaagtttaaaccactaccggtaaggtatatttaaggtgttcactatcacttgccactttacccacttcctattatatttcatctctatgttttagatgaaccacctttcactaagtattatacttattatacttagtacttacctgatttatatgatcttgattaatatgacagggcaggagccattggagccattgtggctactttccttttactttagtctgttcagaaacactcaaaagcagcagctatctatatatacagaagtagacctctttgttgccctctgtttggccagtttctcaagagccaggctatcaccaactctctaattatgttatctgtcattcaaggcttaaaagtttggaagaatcaaaaccttaagttaggaatttttccaccctatttagttatggtaatgtagtaaagttaatgctgtcttaagactcgaaaagacttgaatttgtagcctcagttacaattgcgtaatgaataattcaattatatttggggctcagtttcctcaactaaaaaatagagatacttatacatgcacttatagctacacacattatacacacaaacacacacactcacacacagtgattataatggggactatgtgtgccagtgtcaaactgttagacagtatgattattctcaatattctcagcacataggttgtgcttgatttcaagtttctctgttaatgtgaattctgagtatcctaattcacctcttccattgttttatattacccagcatgtcacttatactactttgcatagaataatagagcagtaaataatagagaacctgaagtctgaccttcttacttgaagaatgaggaaggaaactgggtggtagatcaaaagctctggtcatgtacttcactgtgatggacctctttgggttcttagtcttgcatttttctttctgtattcctgtctgtatttgagaaataaaaaacaaatatttgtatatagtatgattagttatattattgtttttcaatgctctaaaacaggagatgtggtggatgggaatagtggaaggcaatttggtctgaagaatgatttgatctcagaaaatgttggcaaaaccacatctgatggcagaggttcaggtttccaccaagctcccaaaagccagagtgttcagagatagttatgtgaaaagctgagaatattaacagtagcaaatgagagcccaaaggtaccttcaatcaaggaagatgatggtgtaggacatgacagaggacgtggttaacctaaaatagagtcttctcattaacttccatgacaattatttctctgcatgccatgtgctcaagtgtagactacaaaattagctgacttggcactaaattttgctgcacgcaggctgaaatggatctcctgttagctaccttgctgcacatcaggagatctagaaaggagacttttcttcctaaaagctgcttccactacaggaatcgccctgccaggatacatgggatgaaagttggcaaaagttttctctctgaaccactaaatctcaatacctatgtgagcaaattattgttataatgttatgaagtgcctaggtttatcagagtatatttgggctgatcgtctcactaaataccctttgcacttatatggagttctgtaaacgtgtccttgcttgtacatattctgcataactggaggtatataagcatgggcagtatgctgtggcacaaacattaggcccatgatttctgaaaacctttttgcatttcttttcaaagtcatcactctcttcatggatccagtttccttttaaatacccgtaatattgaaacaatttgtccctttgatatgcaaaagtctcctgaggtttactggtgattagggcagcaggttttcttgcagataaatcaaacatcaagtcccatggcttcatgccatgcacacaaaatatctaaacaacttcacttaggcacacttacatcatattttatttaatgatatcttgctcctcagtttgaaaagaacacatttatgattttttaaaatctagagtgtatttctatactatttgattttcttggagttattggaaagtatattgggtcccactaaaagaggagaatttcaatcttttagctgtgcaatggttgtcatagcaaaaaaaaaaaaaaaaaaaaaaagaaaaaaatagttttaataaaaagttaagccaaaccagcactactcttcaatagttcttatattcatctcttcctaactcctttgaatattccatggagctacagtttcagacctttcctactctcttcatattccattttttcctgcacttctttcctctcaacatatttttaaaaacatattattaagtcaaagctgtcaaatatgactctccttagctttcttcatttttatctcggactacctgtagcatcaaatcctttctcctctttctatttcaaagggggtggggtggagaaggtggttttctttttctagaggctgaacatgtgggcttgaatttgggtacttccccgctctggaatgatactggatcctgtgttaagaatctttactgaatctttgatcttgccctctccactgggcccttttcacttctgaatacacacattttggtttacctgctcctaggttaatataagaaaccaacaagcaaaccaaactcctaccacttattcaacatatcttttctgtgttctttttgttgttgttagttttttttagcactaaacttcttaaaagtagacctcacttgctttcacttcttcatgcttctcattttgtcttgacctcattatgcctgtgcttctggtacctatgctcatttttaggcatgatgtttttgttttactttcttgttagtgcttcccaaattaagtgttccatctgctcagccactgttctcaagccagcccttgtccctgactcactctatcttaatggtttcattggtcttccagacatgcaaaccaaattctaagtatacttcaacttttctcttctacccaatttgtaactggttactaagtcctgtatgcatagatcttctatatatttctcaaatgtattcctttctttccatttctgttgccatttttcaaatgtgttcctttcttttcatttctgttgccatagcagtagtgtagacctccatttacttcattgctcctattgcagacatgtcctcattagtttccctgtttccagcttctctctgtacctgcctaaaaatgcaactccaacaacatttcttttctgctcaagtgcttcaaagtcaacaattgcaactcaaagtagttctgactccttcacagttgacaagaccttctgtgatctggctataatttgatctttgtgggcttagctcataccacttttctataattagttcctcctgtaagtgcaagattttttggtttcttgtacctttatgctctcttttccttttgtttctttttgtccacaagaaattccttctcaccaaagcaccttatttatccataatgtttgaaatcctctatacctttgctttttcctaatattctcaactgaactcttcatctcactcttccaggccaatagcatgtgcccttctcttaacaacatttgtattttctgtgttttgtattgttcttctgtatacatgtacaatttttcctactctatttttctgtgagaaaagtggctttctaattgttgacatgtaatgcatgaaacaattttaaaaattagaaaaagttagttaattttaaacacaaagtctaatttattcagaaagattatctgaacattatgtctccaaaatcatgatacacttttattacactttattgtatttaaattggaaatttctattaggtctttttttttgtctttgttatatctcatggaatcataagagtttccaaataacatttcactttcattacattcctaaataaacttgtcattaatcttcctttatatttcatataattgtcatagtaggcatgtatcttgtctttagtggaatattcattctgtagatcccactgtgtttccttgattgctggagttaaagtagaataatatcacatgtcctacaacctcagtaaagaaagttaagaaacattaattacccattaatatggaattggaagagttgaataattttgcctatataatgttagtatttatgtctgtaaaggtgtttttatctacttaccactatggagctatgcatttttcaaataggccgtattcttctttgtgagtcattaaatatcttttattacttaaaatttagatattgtctattttgaaagcacctaaattgcatatacgttaaacatcatagaataaaatatttcagaataaaacaaagcagaggtaatcaaagtaaggggatagaataggtgatacagtcacctaacataagctgatggcttttattggtttttatttggcttctgaatattctggcagctacaacagaaatgtaagcatgttgagttaaatagtcactggataattattgacccttgacttcaatttatacagtctaacttggcaggaatatgaatgttgggcaactggtttaaagaaagccacaatcagcactcagtgtggcctattaatataaatagagtaaagcaacttataggagacaccaacaagtaaattgaaaaaaaaatgaattctaggatttctcataagaggttggaaaaacatttgtgtgtgtgtgtgtgtgtgaatttgaggtaaatagctctgtgtagtcctaaattattagcttttttttttctaattaacatcttctgaagccaggcactttatgaaatagcttgtagttaacaggtaatggactctaatactgaggagaattcctaagggaaaggcaagcagacctcatgggaaagctatttagcaataaatcttatttgatatgagaatgtctatctgcattccacgcaaagaaaaaaaatctatgaggcatcaagtaatgtaacattaaggtataaatggatatctactgaagtaatggagtgtatttgaaagagaatttcaattactttattcagaatatttcttttctcagtattattgtgagctctttgtaacttcatataagagataatttcttaggggaatactagtatgtcaaatttcgtttgattcaagggacagttggtgaacagtacattgactctggcttgcaggctatgtgaagttagtttggaagatttactaccatagattgaatgtagcggctcaccataaacccaatttatcatcagacattactttatctgatagttccacaaggtagaaaaattatgctgcaggtttcattaattttttggtatatgtgaccggattctaagaatatatagtctcaatgtgaacattttatagtgaactgactttatttcagacaatccacattaacacatgactctatctctaataaaaaaacacaaacaccatccaggcctttttttttttttctgaaattgctcacattagaaggcagaattctattcctctgttcattttcctaattatcttaaaatgtataattctatgccaaaggagaaaattctacttgatccctcaaaagaatatccaaacagacatgtgtgaatacattcatttctacacatacaacaatcaactaatacatgtcaagaaagggtaatttgtcagtttttcaagaaacatgatagggtggctgccatactgtatattttagtctaattattagtgtatcctattttcccaacaagcaaaaataggaccataatactaccagttttaacttcttatcattatagacaacatttaacaatggttttacaagcagaagtaaagatttatgcttgccttgttttccccttgtaaatgtactctaacctacaaattttcaaatgaacatttcttgcaagaactcagcaatggcagggactcagtttctctgactatttgctaccaagttctctcccttattaacccttgctttgttaatttacctatctggaggaaaaaagaagcaaatcagagatccctttgctgacctacctatagctttagagtcattcttcagaatctgttggattgccccttctctatgcctccacataaaccaatatcggatcaaacttattcttataggtcaaactatctgtaacattctcctacctttcagacttacataattctgcaacttttgaactaatcaagtaaattagcaagtgctactaaaacctattcagaaatcttttctacttccttcaataccctttttccttgattgcagatttgttctcataccaaaaggataataactttggaaagaaataattaaatattggttaaaaataaggatttaagaaacattttaaattacatttactgaataatcaataacaaattctgcatttaaggtattttagttgaggataataagctcaaatcaaatgtatttgactaagctcaagaactagatttgtagaattttatgagagaatcagctatagttagtgattatgtaaggtcttcaaacatttatatttagcgtatactaaaataaaaaataagctttaaaaatttttcaacttttttctccagtttttttagtcatcagacatgatgtgtcttgtgacagtagacatatttagtcttgtcaactgatagccaatgattgtaatttactaataggtatggtagtatgtatgcaaatattaaataaatgaactagagaatacctcttacatactaaatgaatatattactagtgtatttatttgtcgtggatttatttgacttaaaccactcattcatttatttattttgatttattaactacctgctgtatgtgccagatacaaacagatattgcaaagatatttaaaatattgtcactgaccattcattgacttatggttaagtgtaaataccaactcatgaacagatgagtatagtatagtaagtaataagcacaataataaggataagttgagatatgatgagaacagaaaggaaaaaaaaatactttattggaagcaattggaaagtttttacagaaatggtgacatttggactgaggcttgaaatgtaataaatatattcggtgtcaaagggaagaaaagcattctgaatagaaaatctgatttgaaaagtaaagcaacatgaaagaacctggcacttttgagaaaattcaaaacattcagaatgcctatactgcctgatacataggaaagagtaaaggaagtccatcttggtctcttagtacttgtaaagagataaatacagatcaaatcaggaaaggcctttcaccgtatgctccaatatatgagcttttattgtggaaagcagttgaatgattgtaaggtaactaatatgaaagattttcattttaaatgcatcagtctggtagctttgtggatggtggactaggagagagcaaaattggaggacatgagactggatagaaagcgaaagccaaaatttgggttggaaacgatgaagtcctaaataaggttatagctttagaaatttgagaacatgtggatattttcactctgtgaaatatttttgctatttctttgaagtaagagtaaaaaatgattttgattaaaatagaggtactaagtgtgtgaacatagggattcacattcagtggtttcatctccaggagtctatattccaaatttcagtatctttctacttataaattagtaatttagaacaattcattgccatggagattagtgttgaagtaaatggatccagacaggatttgtgttcctctacaaccttaatattggttttaatttgagaaactgcccacacctaataaaatatactctattacaattggctattatttcatattattggctctcgaggtgaaatgatctgtccaacctagatttctcattgctttcaagtttggtctgcatttaccattaacacgtttacttttgctgtggttcctgattttaaccccttctcaccagcgcctctgctgttttcttgctctatctttctctatgtctcatcaccagttctttctcctttttcttatccatttatctccactcaaatctccagaccaccctttctttacatatgaattaccaggaagtttccagctgttcttaaaatatttctatggagtgttcatatctatgctgatatgatttatatgatagtactgtatattttatagcaaattgtattttgaagaagctctttttaaaaattcatagcactaacttaaaaaactaactaaaatgacaacaaaaataaactttttgcaatcttagaaaatgttgttttaacttattgagtatttaaaggaatacctgatgcttcaaacaaaaactgtttttatagtttcctataacaaattcaagataattctagtaaagtacatttattatattgccagagcagttattactaatagtaaaaatagtaatagccgattttttaaccatttatgtaaaagcttaattaggatatttaacttagtagatgcaaaatttatatttgaaactattatatatatatttttattattgttatactttaagttccaggatacatgtatttctaagtttatgcaaacgttatattacaaaaccgtaacaacacagataacagatgagcacttgaaaaatttcaacccaatttaaaaattagggaagattaaaaataaacagtacagtgtaaatgaatgtatcaacaagaaacattatttaagaagaaaaataatgattttcattcctgccctattacttgctcccttggctcctcccaccaccatcacagagaaagtaagagagggagagggctgtgaaaagtaggaaaaataattgtggaaaattccaaacagtctgtgtctttcttatttttattttttgttgttgttgttattttgttcttttttaaaactcactttatagtttgcacaaaaatatcttacctttttttttcctgatcatagttactttctgcctgacttaatagtgaaacccttgaattcagagagtttttcattctgttcttcacccttaaatatgtgtccaagaccactaccttgtaaataaatgtccaatgtaacttcaagcttaacaatcctgtttatcttcctttttcattctagtactttttccttgaatacaatttaatttaatagaagtaatccagatgtagggttttgtttgtttgcttgatttttcacagctggccatgacgatagcattagttgccagcattgctctagacttagtagtgacaatgcttggggcatcctttttctccctagctgggtcataaaaagtcattcaggggaagtactctcaaacgcgtgagtgacacaaaacatgccggagtctgaacgaaggtctctgtatttgttgtttattgctgtgaaacagactaaatggcttaaaacatgctgtgagttgacagtttaagctggtggcagaggaattctcagtggcaagtgaaggtaagctccaacggacaagcacttttcagacctctgctgtatcatgtttgttaatatcccatttagcagtcaagtcacatggtctctctggtccaaacaggggacaacaaaaagcgtggatacacagagatatgactcactgggacccttggtctcacattctacagaacctctctcatactgtctcctccacttcagtttcagaaactatggtcatgaaatagcagacagctacccatcaaacacctggcaagtagatataacccttcccacagatgatgaaaatctgagctctctactataaggagagactgaattaatgagctttataataaaaagattttaaaagtttatattttttctctttcagtatgccagttcctttgccaaactgtaaatacagaggtcttgaaagagatccacatatactgctgaaataggaattatataaatagagataataactcattaaaaaacaaaaacaataattattataataatggaatgtgaaatcaaccagttgccagacaaccttgggagtggcggaaacaaaaacatcgaattggagtccaaagactcataaattacttgaagttgaagtctatctctgattttccttaattttctcaatgtggtgttgtttatcaccgtatagatgctcctctatttacaatgggattatgttgtgataaacccatcgtaagtcaaaaatatcataaactgataatgcatttgataatctgataaacctatcataaagtccaaaaatcataaatggaacccttataattccagatgctccttgacacacgatgaggttacctccatcattaattagaccataaagttggagactatctgtataggcactcagtaattgttatatgaatgaaaactgaaccaaaaaggaaaatgaaaatgacttacttaataaatggaccacctgtgctgaatattggccctagtacttagtaaatatgttattttgagtaaatcaaatttttctgaaccatgagtttgtcttttatattataggaacatgacccttcactatatatatatatatatatatgtagacttagggagctgatagtccagaaatgctgtgttgtctctgtacagtgtatttttgtgtgtatgtccatttttgaaacacagaataggtacttttaaaggtctgaatacatgaaaaggaaaggcggcctcatctactgacactatatgggccataagccactagaaaactcactttgagtgaaaggcattttatcagatatatatagcattttatcagatatatatatatctgataaaacaaaaatggactattctgtggaatcgttggaatttttgaagatagaaccatgtcacccttctttgaagatatctgcttctcagcacaaggtcttacactgtaggtttgctcaataacagatattaaaaagtagagaaacacagacacggaaatattgacaatattcagtgaaataaccctcatgctttaaaggaatagtatctcaaagtttgaagagtaatcaagcatcgttcatacataacttagcatccttaaggtaacttctgatatcaagccacattaatttttggattaatgttctgtgctaattttgtgctacatgatctgaaagtcaaattggaaataccacatcagtgctgatcatatttaactggcaacaccttaaacagtatctggaaactcaggagggaaaaagctatcaatttgcaatagtctgaatatatgtatttgtgcaatctatttaatgtatgtaacatttttgaagctggtttatagtttttgaaatatacttctaaatagtgctttctgttaaaagatattggctatctatgattaaaatgtggattccaaaaccatttcaaatttcatatagtctcatgaggatcactaatgatgacagaaagcaagtatatagggatgatgggttctgtaaatgtaccattcttcagggaaacacggggaattgtaaaattaggtcaagttgttgtgctaagaaggtggttattgcatatatacttatctcagcagctaagggactgcttccaaaatgactacccagttaagctcagcccacacattgacacttaactgacaagttggcacatgtaagtggacatcttgcatctacatttagtacatatttagttccgtgagtatattagctcttaaactctgttttcaagcccctcctgaaccaagcctcaggcgttagttctcctccattcctccatggcaatcatgaggaatgtttgacaagctcgtggacagaaaacctgtcagtattttggacagagattcatccaaataaaacaggaaataatagagacaagctgaagaataaatgtttaaataattttaattgattagaacttatttcaagcactagaagagagaaaagtaagagtttatgcattatatacatatgtgtaggggtgtgtgtgtatatgtgtgtgtgtaaggaaaagattatagtaagaatacgtgcattttatataatataatatgtgtactgtatacatataacaaaatgtgttggagactaattcattatgatttattctatttctcaaatgatgaatattaattcctgtcttacaaattgtcaccttatcatactgtcttatcacattgccttatacaatatgatatgaactttgagtgaaaggcatttatagtgagggttgggagaagcaaatagagcatcctttcatttctctttatttctaatgctaatgtggacactgaaaacaatttatgtgatttatatatgtgtgtatacatatacatatatattcatacacatatatcaatgtctatatagagagaagaattatcttgattgtaaacactgtcttttcaagaaaaatgttacattagtatttttgacatattatcatcttctaatgtgttctaaaagagcagtttattgagggtgttattcttctaagaaacttgacaaatggtcacagtttactaaatgacttttcaaacttctttcactttgtgttataccgctttaatcatcttagggaattgatagtccagaaatgctgcgttgtctctgtacagtgtatttgtgtgtgtatgtccatttttgaaacacaaaaataggtacttttaaaggtctgaaaacatgaaaagcaaaggcagcctcatcaactgacactatatgggccataagccactggaaaactcacttctgaataattgatttgttttagtagactgatttttataactcatccttttcttcctttgtcttgtctgtgaagttgctgagagccaaaatgtgtaaccctcattaaataattatacaggataataaaacatattttatgcatgattattagtttattttatattcatccagatattcatttttcctgctgtgctgtaagcaattcttaaagtgtcttcaaatattatttggaatgaataaagtacaatataaataaataagaataatttgaagtagtgatttataacagaggtctaatgcagtgatgagcacattgatccaggaaaaagagcaaagtagcaggagtaaggaaaattcagactgtaaaactggctctgttcctctttactcataagaccatgagcaaatcacttcacctgtctgtcttttgatttctttctgtgaaattgaatatactaaaataattgtgaaaacgagggctaaatgctttgagaaactttgcattctgtatgagtcgtgtaaagtgctattaggataccttattacaatgttgtaaagacagcaccttctggaagatatggatttcctgctggatcctgttcatttgcactgttagcactggctacacttgagggaacaagtgttcttcttgttcagtttccacagattgtacttttgaactttgctcaaatagtgccaacttgcattggcttcctcgagtccttggagcagtaatgccccttctttaggaaataatgagcaaaactgtccttcaaaaaatattcttacttgagattcaaataaaattgaaaaattcgcagtttagtgtttcgtatttgctctcttgagagttttcctcctcatctaccaattcctagtccagcgctcggggtagcatagagattgtacctcactcagtgcatgaagccaaaaaattaagatgcactaaagaagtgcaaagggcagcatcatgttaactgggagccataaccagtccagatttataagattcataaaagtggcagaaaacagagactataactgcatataataaagttctcattgtgcgaaacagaaaataagctttgacaaaacaaattacatgcagagaaaagaatcttctccaccaatagcaacagtgtgggcaagtgtttatatttgaaagaaaagttatttaactcctgctgttttcaaacaatcattttaagtataggctttgttgtgactctgttagcctttactatgaatgagtacatattatagtaggatactgctgatcactattgtcaaatacagaggcattcttttttaagagaaagaatgtctgatactcctttcttaaactcttgaatatttaggttgctagaataaatataagatggagagctaagcaaagcaaaccaatgataattattctctaatttagaatatttaacattttcttaagagttgactataaattttagttattaattgaactgaaacattgaatttttgtagtcgggaatctttgatctaatacatttgcatcatgctttctagtttaaaaagtgccttgaggtaccttttcattatgaaataaggcataggtcttatttggtacctttatatgggagactgagtgatgcatatggagtttatttaaacatattttatttatactgaaggctagagagtcaactaaatttgaaataaaaaaaataattgcattctcccatcattgcagacatatttttgtgggttatatgatgtagtcaagggcattaagatgtctcttctctatgatgacatttaaaatatagtattcagattaaaatgttgcataataattgtttataattttcatctgaaatatcacaggtgtctttggaattaataacactttttgtttatagtgattgatttattacattaccaatggtattccaaataaatatgtaatgttttaaaatacagtattctgatcaattgtgagactaaaagaacctatagattcctttattcactttataaagagttttcttaaattttcttcaaaggtttttatatatttacattaaaagcattctttaatagaaatatttatgttaaaaatatagctgtcatctcctaagcatagactctgggagtcaacttttagttttgaacattaattataaaattactacttttttataatgttgtattcctccccattgcttttatctatttccaaacacaccctccaaattaggtgacaagttttccatgtggtaacattcatcacacagaatatctgacattattagacagatgacataagagcatatttcttcctaggtgaatcagaataataatgctgtaatatacgtaactgaaatgcaaagagcagaggatatccctatcagaaattgagcaatgaggataggactggctttacagtgtaggagtcccttgaactatgtcctgaaactagtaggtgttttatatacctcgattagcaaaactggaaagtacctgtgataagaagtgctgaagacatttatgtccagtagatgacagcgtgtatctcaaaatatatttttatattaatgaagacagcaaatggcacaagagcctgtgtgtatataaacttatatttacagaaatagataaaagtaaaggactaggaaaggtaataaggtctctttccatatgggtcttcagatgagttattgcatgacagctgcttttgatctagtaacatcttccctaaagaaaaggacaaacacatacatcattgtctctgcacactttgaattgtaataatacttaataccatgatcttattaaactaaaacaaaaaaaggaggagctatattagtaacagggacttacgtatggacctgacaagaaaggcaaacaggtgttctcaatggaaggcaaatgtgatagcaaatgaaaaggggatggggtaagctccaataaagaaggaacactggacactatgagcaaaaataatgaggtatgaaacaacctgtcatcctcgggaaataggagtagtttgtttggtcccagcattcatatagaaaggagatgtgagtgaagaagggagaccctggagcatagaaggctagtgaaagatcagaagaacctcatatagcattataaaacatttaacgttgtcctttagatactgctgcatttgagggcattggtgttttaatcagtatattcaatgatcaggttgtaatactgggctcagtgatggtttcactagtccacttctgatctaagaagtcgtgaggattgagagaaagaaaagaatgtgacaggtgttaagagctagagatgccagcttttggtgaagaattagtgttgagggaaaaggagaaaaactaggataaattagttgagaatttgaacttggaaagaaacctttcttttttttttattatactttaagttttagggtacatgtgcacattgtgcaggttagttacatatgtatacatgtgccatgctggtgcgctgcacccactaaatcgtcatctagcattaggtatatctcccaatgctatccctcccccctccccccaccccaccacagtccccagagtgtgatattccccttcctgtgtccatgtgatctcattgttcaattcccgcctatgagtgagaatatgcggtgtttggttttttgttcttgcgatagtttactgagaatgatgatttccaatttcatccatgtccctacaaaggacatgaactcatcatttttttatggctgcatagtattccatgttgtatatgtgccacattttcttaatccagtctgtcattgttggacatttgggttggtttcaagtctttgctattgtgaataatgccacaataaacatacgtgtgcatgtgtctttatagcagcatgatttatagtcctttgggtatatacccagtaatggatggctgggtcaaatggtatttctagctctagatccctaaggaatcaccacactgtcttccacaatggttgaactagtttacagtcccaccaacagtgtaaaagtcttcctatttctccacatcctctccagcacctgttatttcctgactttttaatgattgccattctaactggtgtgagatggtatctcattgtggttttgatttgcatttctctgatggccagtgatgacgagcattttttcatgtgctttttggctgcataaatgtcttcttttgagaagtgtctgttcatgtccttcgcccactttttgatggggttgtttgtttttttcttgtaaatttgtttgagttcattgtagattctggatattagccctttgtcagatgagtaggttgcgaaaattttctcccattttgtaggttgcctgttcactctgatggtagtttcttctgctgtgcagaagctctttagtttcattagatcccacttgtcaattttgtcttttgttgccattgcttttggtgttttagacatgaagtccttgcccatgcctatgtcctgaatggtaatgcctaggttttcttctagggtttttatggttttaggtctaacgtttaagtctttaatccatcttgaattgatttttgcataaagtgtaaggaagggatccagtttcagctttctacatatggctaaactggaaagaaacctttcaaacagtgattctgaacgatgaaatttaggaaaataagaaaataaaaggagagaatcaataaaaggagacttttagagctctcttgagaggcttatgttaatggagctgagaaatgtctgcattgtctgtgatttcaagtattattctctggtagttcatatatacttctaactagcttactgtgtgataagcattcagatgacattcaaggtataggttattatttatgtatataaagaagttttaattttgatagccaatattatttaagtgtataaaagcttaaaatatgtccatataatcaaagcattttgaacttttctttatcactaagtgttgtcaacttctgattaacatcagggataaaaaaggggtatgatggcttatggaagacaggtctattgcctcctaccatgtactaatcattattaaaatgactaaaacataacaatcttttttgaccttttgccaacactaatattaactaataatagatttctataagtatatttcagttatatatttttatagaactcaggcataattaatttgcattattattctgacggaggtatttgttgttgtatacattttgtttcagcagactatcttaaatataagagactaaatcaaaatattagcattgtgttgaatgtcctaattttacatataattatatgccttataaagagtgaaaatattttctaaattataggcatttgcagcttatatttcaaattgaatttattttcattatatacatacatacgtatctatctatctgtatatagagaggcatactcacacgcgtaaagtaatttaaccattatttaaataattgtcaatgttgcaaaaactcatttatagatttacattaattagttttaatttctttttttaaattaaagtacaaaataattttgagataaaaggatcaatatttgcctgcaatgagaaatgttaaggatatcaaattgtcttttaaaacattttataagaaggaaaaatattctaaatttcttagtctgaaccataaatcaaattattttatccattatcatctcccttatggagggaaatacatgaaggttgttctacatttactcaagctgaggcatttatggagaacataactcttaatagaacataagctattatataatagaaagtttataaagagtaccaaatataggaattagtggtaacacagggagctggtgagagcagtggcatagggaatagggtcatcttggtttaaattgtgccttttacaatgaaaatattttgaatgtaggcaaattatataacctccctgtgccttaattttgtctaaggaaggggaacaatgccctacttacttcctacagttgtgaaaacaattaatatgatgtattcaaaagaaattcataacatacattttatccattaactaattcatcatcatcctccccccttccactccccttagccccctgagtcttcattatctatcattatactctatcattgtatgtccatgtgaacatatatagaatatatatctatatattatctgtcattatatgcctatgtgaacacattttttatccctcacttatgagtgagaacatgcgatattttttctttctgggcctggcttgtttcacttaagataatggcctccagttccatccatgttgctgaaaatgacaaggtttcattcttttttataactgaatagtatcttactgtgcatatacaccgcactttattcattcgttgatagacccttaggttgattctatattttgcttttgtgaatagtgctgagattaacatgaaactgcagggtttcttttagatgtattgatttattttcctttgagtagatacccagtagtgggattgctgggttaaatggtagttctatttttacttctttgcgaactcttcatactttttttccatagtggctgtactaatttacattcctaccaacagtgtagaaaagttttcttttctctgtgtacttaacaatatctataatgttctgtgttaagtttggcattatttttattgatacaaattttatacaattaaatactgtagttattttctagttctagataaatttaaatttaaaaacataaatttaaatttttatcatcacatgatgaaaattaatttgatgatagtatcttccactttttaaggatttactatgccccagacattgccacaaccaaccctatgcgacaggtactattatctttattttataactacagaaactttcgtgacttaggaattttaagtgagttgtctagggccatgtgagtctgactccagcttatatgctgttacatgtatgccaggctgcatttcctcaaatcaagaggaatacaattaccaaagctccactcatgtgttttgtctatattcccctcacaaatacagtcactcattattccaaaagtttagaccatggaccaaatagaatattccatagattttagtaagagatatttggctaagcagatttttgcaactgagtaattttgattctttatattgaccttttaaagtttattaaaaataacatcctctctgaacctatatgtgacatgagaacagtgggatcttaagaaggttgagttgtcaaggcttattccaaagttttcttactctcatattctccctaaaatataaagtaaacataggtatcaacagcattgagacaaaaaggtaaaaataactgtttgcaacatgtggcacttttagaaaatattttacccagaatttatagcttattaattttaaacagttggtatttaaaggtagatctgttatgagttagccatgttactgaggcattataaagaaataaaagaaattctgcaatatgattttttttcccccaagacagagtcttgctctgtcgtgcagtggcatgatctcagctcgctgcaacatctgtctccccggttcaaacaattctcccgcctcagcctcccaagtagctgggattacagccatgagccaccacacccagctattttatttttttatttttagtagagatggggtttcaccatgttggccaggctggtctcaaactcctgacctttatggtattcccgccttggcctcccaaagtgctgagattacaggtgtgagccaccgtgcccgtccaggaacacttaaatgaggtttaaattgtatttatttaaacttattacttaacaaatattttaaaatacaaacatgcatgcaactgtggaaaacagttttatggtttttgaaagaatatgcttaagttaaaatgtgttctctactccatttttattaaaaaatatatcagttaagtgggtttaaaatacataaaataattcacatggaggtaggcggtggttttagtggccaatcactcatgcaaaatattttaacaaacattttccaccccagtgggttgatttttctgttttgttttattttggtttcttttttttgctatatccaagggaagctttccattgaaagtgactaattatttatctaatcgggacagaaactacatgtccgctcaggctttgatcccctttttagtgagtgttttatgattggcacatagctctagtgagttttacctgaatgacaattatcaaccatcagtggaccatatgcagtggtgggtagaattgctgtcagctgccgatgggccatctggagtaatgcttactaagtagtttaaagatggctcagaagtacaactgagagccagcagctattgaagtaggtcttgatctctccataccaaaacctgagtgtggccttagcaattaagtttctaaaaggaattataaaaggttatttttcttgacaatgtttgttataatcatatttagtgaggcataggtttcatagtggtgtgcttacactgtatttgtttggaagatatctagacatcttttatcaggaagttattcatagaaaaaatgatagtataaatcctggccaaaagcatggccacctgtttttatatgctgtcatagctgttaaagtagaggctgttgttttaaaaaatagatttatctactgaatctacattttatctgcttcagagacaagtgatacatattagtgtaattaataaattaaaagaaaaacaataccccccaaaatacctctttgcagcaataatacagatcttttgtgaagaaatctcttgtaagactctttaattttcttaatattgatacattgggcctctttgtcatctttgttttctaaaacatgtttgaaaaatgtgtttacctttgaaatttataacattggaagattcagaaacagtgacagacgtcctttgccaacctgtggacacaagagcagaggaagaatggaaagttgtgtgatgcgttttggctacagtattattcaggccaatatgccaatccaaggtaattgttaattttcatctctgcctctgcaaaaaaactatagtccacttcaggtaaatgcaaaagtggcattgttagcatccgagaagttggcccttactttggattgttgattctgcagttgtttctgcagtcagagggaacatctctttgtcagtgtgaagttatactgctatcttatccagtttccttaagaatggagctctgtaagacatctagaaatgaggtgaatatggaccaatggcttttaaacaaagccatgattacaagttttcatagcaaaaaccctgatatttatgcttttggtgataactatagatttttttcttagaaaaattatgtagaattatacatacaagtccttcgaaaatttttgggcttttttgaagaaaataagtacaagcaaagtaaccgatagaaaaagcaagaatgagggctcaattaaaggaaaaaaaagtaactcagagcaatgacaatactcatgaaatgagaattgattaacttaaacttagggtttaatttggcacccattaacaaagttgaattttgccatttttaaaaagcaagagttgctgattttaggaataacaccaagctaaaataggaaaagcaatattcacatgcaagggaaggtatagaaagagatttcttaagcattggctttagtattgcatcattatctgttctaaaaaagcaaacagtgaaatgatccatatccaaaatattacatttttatagagtggtatttataatagtgtatgtatgtatatatacttccttatatattcatatgtgtatgtgtgtatatgtatatattcttgaatattgtctatatacgatctacaaagaaatagttcaatttaataagatgttcagaaaagtaaataaaaattgtatatgacttatgaatataatcacatgtacagcatgtgttttaatatattttataataattgagtcagcctgctattagtttaattaaaatttttacaccttcttgattagactgctggtttaatgacatcttccacactttgagccgtgaagtgtggctcattttaaagttctgtaatgagaaggaaaatgtaaatctgatgaacatctcaacagactaaaaaacaaattttagtttttacttgtggaaaaacaacagaatccagagatgattagcattttgtttgaaatgagtttagtatgagcatgatattatggactcttatgtgggtaaaaacctttataagggagcctatgctataaggacatacctcagtgcttggagaacaaagtagcacattactgatgataaatagagcacagggggagagagatagagagaaaggttgctctatgttttcacaaataatgttattataaagttgaacaaaatgagaatgttctggtgactatgataggtaatagaagagggaaatattggtttaatgtgttgtaaagtatgtgcaacactgaggctgaaacattattggattttttttgtttagcattttaatacctcactaattcctttatgaagcaaacatttgaataactctaatgagctgactgtaagctgccagcaaactcagcagccattttatatttactagaccattatcactggtctctggagttgattttatttatagcatgaacaccaagactcttattaaaatcctgtttctttttatattgttctgaaatatatggatttacatgtaaaactataaaccctatatataggtactctattttcattaagctaaagaaactgcacaatttgcattgcctttgcattttaacttggaatgcaacactaaagtaatataacacatgaattcctactattttggagagagtaagactattcatttaatcatttacattatggtaaaaaagtgattattagagaagtagaaccagcatgctattcagtaataactgcaaaaatagtagtatctcttacattttttatttatttccagcagggttttcgttttagtttttaaagggaagtatagcagtgaatattgaacacataaatccttctagtggtggtcatttaccatttatgagcattagaaactcggtgactctgggtttccaaacccctttgcttgttcttcgttgcattacatacatccctgtcatggttttcctcattttattatccacttgcccttcgtaagacaggtgggagagaggacaagtaagcgtcaggagagcatccacatgatactttcccctgtctgactgctgatgtgttattttttgacaaatttatagttttcaatccctccttttcaaatggtgaacaaagatttctatgatagaccattgccacagagactcatttatggaaagttgctgttatgggaataatagttctgaacagttacctaaaaatataataacagatctcataattcctgagagagagagagagagagagagagagagaaaaggaaaccatattatcaagctttatttatggccattttgatttagatgttctttttttggccaatgcttattaatcattctacctgatacattcataacataataagtatcacacataccattttcatctaatgttaatctattttcattcataaagtctctggatatgaccataatgttccaccaattcttcgttttgaactgtaaggcacacatttaactcaaacaaaatgttttaatgtaatctattttcttgcttctgaaacaaacaggacatttttagtcgctgaagtagctttccgcaattaatttgttgaattctgaaaaagaatataccctctattggaaaatcttagtgaaaggttcagacttgagaattcaacattttattagcatttaaaagaaaagggaaaaaatacagcaaaaaactataggttccaacttatttccaaaatctagcgggtgcatcccaaacctaaaaacatgcagtggaaatcaccatgtctgtatacacgtcatggactgaaacagtgattttaagtatgatttttccggtatgagtaaacttacattcaggttttgaatacttaaattttatgtgggggcataatttaatgctacccaattgctatgtctctgcattaacaggagcatctctaaaaaacaccttacacttgcagtgttgctacttttcattctgccattataatttgctttgaatgccactggcactgtctcggagaaatctaataaaatgaaacaaaagagggaatgatactagcatatctttgtgtagagatgtgaccataatctcctttagaacaaggactgagttgtattaatcttcctttttttaaattatattttaagttctagggtacatatgcacaacatgcaggtttgttacatatgtatacatgtgccatgttggtttgctgcacacattaacctgtcgtttacattaggtatttctcctaatagtatccctctccctgccctccaccccatgacagaccccagagtgtgatgttccccaccctgtgtccaagtgttctcattgttcaattcccacctatgagtgagaacatgcggtgcttggttttctgtccttgtgatagtttactcagaatgatggtttccagcttcatccatgtccctacaaaggacatgaattcatccttttttatggctgcatagtattccatggtgtatatgtgccacgttttcttaatccagtctatcattgatggacatttgggttggttccaagtctttgctattgtgaatagtgccacaataaacatatgtgtgcatgtgtctttatagtggcatgatttataatcctttgggtatatacccagtaatgggatggctgggtcaaatggtatttctagttctagatccttgaggaatcgccacactgtcttccacaatggttgaacttgtttacactcccaccaacagtgtaaaagctttcctatttctccacatccactccagcatctgttgtttcctgactttttaatgatcgccattctaacttgtgtgagatagtatctcattgtggttttgatttgcatttctctgatggccagtgatgacgagcacttttttaagtgtctgttggcagcataaatgtcttcttttcagaagtgtgtgttcatatcctttgcccattctttgatggggttgtttgttttttttcttgtaaatttgtttaagttctttgtagactctacccacctttgtcagatgggtagattgcaaaaattttctcccattctgtaggttgcctgtttactctgatggtagtttcttttgctgtgtagaagctcttagtttaattagatcccatttgtctattttggcttttgttaccattgcttttggtgttttagtcatgaagaccttacccatgcctatgtcctgaatggtattgcctaggttttcctgtatggtttttatggtttcaggtctaacatttaagtctttaatccatcttgaattaatttttgtataagttacaagaagggatccagtttcagccttctacatatggctagccagttttcccagcaccatttattaaatagggaatcctttccccatttcttgtttttgtcaggtttgtcaacgatcagatggttgtagatgtgtggtgtcatttctgaggcctctgttctgttccattggtctatatcttgttttggtaccagtaccacgctgttttggttactgtatccttgtagtatagtttgaagtcaggtagcgtgatgttgtttcaattgcagtgtctgaagcaaagtagatactctttgaatatttctataatgaatgaatttttatacttaaatcattctccatactaatctataatttcatatctggatctacttttctgggttcccacagagttttctggatgaataataaaggactgctgttattggcatatgaataaaattaaccaaagcagaaaaaaatataaaaatagaaatatattaactaagattatagataaaactgagcacaaaatggaatgaaaaacagtaataaagtaaacgaaaataacaagcaagtttctatgaaagagacggttactgatattgataggtagaatgtacatttagaaaccaaatggatcactattgcctatgtcaaatgatacctttttgatatatggtatgcaatgctttgtagaactagtatataaaacctaaactggaccacgttcataaaattggacagtaaaatctgttgttataatttatcattatctccttaaactggctcagtaaaaatggaaatggtattttattatatttgttagttgttatagccaatcagaaatggccaaataatttaccaagaagtataattcatatctcttctatctggatatggttttcatcaacggaaccttgctccatttaatctaatgttgccaacattgctgtcaatatattacagtagaaataagaataaacatgagtgtgtgtatgtgtgggggtgagcaagaaaaagagaagaaaatataggtaagtatgaggtctaagtggcatgtgcacctagctagggaactcctcccgtaatctgcagtgcagaaccccctgaagtagtgaatttttttgtagatcaagcttgtccaacctgcatcccgtggatggctttgaatgcagcccaacacaaattagtaaactttcttaagacattatgagatttttttgcttttctttttttaagctaatcagctattgttagtgttagtgtattttatgtatggcccaagaaattctttgtcttccaatgtggcccagggaagccaaatgattggaatccctgtgtaaatgataaatgcacattggcctcctcagtgaagaaagcatgagacaatttctgtaacagtagcaaaatgtgggagtcttagaaataatatccattcattacaataacttataaagaataaaaaaaaagaaggtacctaactctgacagtataaaagcacactgaaatatctaacaatatttaagtgataaagaatagatactttagaatgaataagaaaatgtagctcaaatctgttaatgtttgttgaaatataaaacattttattagtagacatttgaagccactcaggataaggattaggagttcagttgagaattcggtataagaaaataaccaaggagtatgcccacttcttggagaagaatatggtaatttactcctggccctttaatctgcttcagcccccccgtcgtttgtaccttaaaggactaataaaaacaaataaaccaaaatggagagtaattgctcagcaagagattatttcccccttcaagcactctcaaccttggccaccaatctctatgtctcccctaatttagttctaatctctaagtcaaggtgaattatgtcctatgaaaatgaaaggatttggagaattgttgagccattttcaatattatctgagaaatcctaaagactagtaaagatgtcaaaggacaagagattacctgttgttcatccaaaaattaagagggaataaattctcagagtaaactcaatgttaattcctgatagaaattattattattatacatgcaatttgtttagaagaattcttgacacatagcaaagtcatccaaaaaatgatagcttctaatccttttccttccttttcttcctcctctttttactcattttatgatgattattattattgtcattattttatcatcattttcattcttaggatacaatagaaattaaacagtataaagacatcgagagcagtattttatatatttttttccaatcaataaattataaatctgattatctatgcctagtaaagttgagcaattgtggagctgagctttctagtgtgggggtttctagaagcaaaacttaaccaaataaataataaatatatgaagtatgtttaaatattgaattttctagtattaactaaaatatgtctcactaaatgaacagactgctttgaagtattaatgtaaagaaatttcagattgtacatgataataatgagctcacaggaaataacaagaaaatggcatagcagaatcttttctaaatcctaattggacctcttcattggcacttcataagatgaagacaaccaagagatcagactaagtgtttaaaaaaattaagaaagctattgaaagcttggattttcatacataattattaataatatatcttaatcaaagtatatcatgtatattctgacctgatttatttgctgatgataatataaagccattgcaattagacagcatttagaaatattgctgttttatctttatctcagtctttttaactttattttcatttaatgtttataatggccataatttgatataaaatagagttttaggtaaaaagaacggaactatgccttctactgttttatagccctgataatgtagtaaacatcactaatgttaggagagaagcgaccagtgtgctagaaacaaaagattagagtccagtgttacggaaatgaaactagcagaaagcttaaaagacacatggccatcttttttgaccactgatgggatatcacagggcttgaggcctgaaaatcatttacgggattttgcaacatgaaagtcattagtgatttttacacaagtggtttttttattgctatgaagttttgtcctcaaacaaacatagaccctacgtgggaccaatttttgtgtaggtggggctaagagtacttcagccctaatgccaggcttagtgctgtccttgaccacttctctgctaagtcctaaattgcccagtgtaatgagagttggggaaaaacagatgccaaggaaaaacaagtgagagtagagactattcccagaagagatccagctctaggccctctttccttgatactgtagtgaaataaaagtgaaacaggaaatcacttctaggagggcttaggaatctaattctgtccctctgctgtttatctctgttgtccagttaataactcacctataataataatttccttcttttttccttccaaccatttcttccttctgcctctttttctgcaattattattaatgagtacctattatgtgacagatagtgacctaggccctggaaataaagcagggaacaaaacaatgttcctgttattatattgctgaatattctagggtggaagtgggagtgggaaagagaaaccttaaccaaataagtaataacaaagatttaaaattaacaggtatgccagatggtgataaatgctatggagaaaattacagcagaaggaaggatatgaagtgtgtgtgtgtgtgtgtgtgtgtgtgtgtgtgtgtgtgtgtgtgtgtgtgtagaggggaaggcttcattttaaatgtagaaggaaggccccactagtagagagaactctcacaatggaatcctactttctgtttaattaaccaagggcaaagggatacttaaaaaaattaaccaagggcgaagtgtacatttttcatttatagacagtgtttaaaattataccattgggaaacataatgctattatatttgtcttgagctagatataaacacacttttgctgcattaatagattgaatgcttttgtcagtgaagaaattcaaaggtttataattataccattatgcttctttattttcactgccttttaaaacaatagcaagcgccatatatttcgctttgccttgtagttttaatttaaaaaaatctaaattacttaatcgtttgtctttcatggtttctttcccattttttcttcctttttttctgctttaggagatgtcattaactaatctgttaaactccataaataagtaaaatgatatattcacagtgtaaatgttttaaaacttaaaaaaaaaaccatctagattcatttaatgaagtcctgaagatatgttaaaactgaagtgctgctggcaagttaatggaagatttgaatatgcaaacagtgaagactagatcgcttctctaattaagattcagttcatattggctatattcagagctccttgtcttaggtcccagttttctcatgtattctcatggggaagggtcttccttgctactattgtttccaattttaattttaattttttgttactttctaatattaagtaataacatgcattactaaatgcttcagaatctatatttatttatatatgttattattgatatatggttattataaggcaaataaatattaccatgcttattaactataatatttagtttcttttaagctaaaatgtgcaaatcataataacttggcaaagtcacattacacttgctatacttcttagttatacttacaatttaaatgtatttatgttatgaagaaagagcacagagttagggggccaggcaaagataagatattcttcagagatcattttgaggtttcaagaatgaagaaaataaaaaatccaacaaagtttacaaggcattcttaaaatctctaaaaatcaatgttcaccctttcattggaagaaggtacacaggtcgattattagaatgtaataagttttgaagattttgaatacttgtcttaatagaacttgattgactaggttgaactatgttccttcaatatcatcccttcctaggagagaaattcttgccataaattggaaacatatctagttccactttttcttaaatgaacggagtgagagcaaaaacatctgcaaccccacagtttgttgtcttcactaacataagtttattattccactgtcttcatcaacaccctctactattcaaggcaactcttgtctggaagataaaagttgtttagaacctaaagatttgtttcagagagttcctgcaaaatctatttgctgtgcaactgtttaatagcatcaaacaattattttccaggactcttagaaccctcacctcagaactctctccttgctatgcccatcaattctacactattataacagcatccttgcctagtctgaattcacccactgtatggaaacacccaccttcagccagtcccccaaacttataaatatcttgacattgcaatctccacagagatactcttaagtctctattacggtactagataccgtgatatgtgatatttcttactgctttacaacagtaagaaaaaaactcacctttgccataccaacagttgttttctagtattttctggaaacttatatttgacaattttcactgtttgttttctcataagctgttctttttctcatcgcttttttagtaacacatgctttattttcccagtgaaatctctactttttcttcctatttcttttaacatttgttctcttcttcaacttctttcaaattatttcttctttataccactcatcttgagcatttctatttcaaacattgggtgtttgtttgtctgttgcttttgtgtttgttttgcttttttgagaaggagtcatactctcttgcccaggctggagtgcaatggtactatcttggctcactgcaacactctgcctcccaggttcaagcaattctcctgcctcagcctcctgagtagctgggactacaggcacatgccaccatgcctggctaattttttctaatttttttttttttagtagaggtggggtttcaccatgttggccaggctgatcttgaactcctgacctcaagtgatccgcccgcctcggcctctcaaagtactgggattacaggcatgagccaccatgtcctgcttgttttgtatttttaaacacttttttcttatctttgaaaaaaatgtctctgttgtctctcaaaattaattttggaattaaaactcgataaagctgtttttaaaaaggtgcatcttggctctgtgctgcttagactctcctgtaaatgttctctctctggatttctttctctccgctgtttcttctcacttcatgcattgtctccatcattgtctttagttttaaaaatgtccttatgatattctcatgccctctttttctgtaaaaatcaccacctcttgcctctctaaaccctcctctttctctgatctgtcttctttcacaacaaagaattgggggaattaagatttacatatgttgcttccacatttcagcaatgattcactttttaatactttgcaatttggcaaaatcacgtctctctatcaaaaccactttcatagataaccaatggctttctaattgcctagctctaggagtgttttcttatctttaaggacagcaagaattaatcaaacaaaggaacaaaaaagctgttgcccaaaattatcttaataaatctttctcttacctgactttcttaatactagtttgattttaggaaatattaaaatgataaccattctaatggcaaatataaaagagtccataacttgttgaataataaaacaacccatttgttctgagcatataaaataggacattaccaaaaattttaccagaaatattgtatgtttgtacatatatatgtgtgtgtgtgtataagacattcttgttctctgaggaataaagtgcatatataaagtactttagagttcatttatatattatgtatataatctcaattaccctttacagcaacattgtgaggtatatttatttttaatcattagtttataaaagaagaagctaagtcacaaattatttggtgtatttaggctatgttttttatatttatctatttatttttacttttattttaagttgaagggtatatgtgcaggtttgttatgtaggtaaactcgtgtcgcagaaatttgttgtacagattacttcatcacctattaatactagatattaaacctagtaaccaatagttattatttctgctcctctctttcttcccatccttcaccctcaagtagaccccagtatctgtttttcctttctttgtatccatgagttctcatcattcttataactgagaacatgtggtatttgcctttctgtttctgcattagtttgctgaggataatggcattccgttccatccatgtttccacaaaagatatgatctcattctttttatggctgcatagtattccatggtgtatgtgtaccacattttctttatcccatctatcattgatgggtgtttaggttaatttcatgtctttgctattgtgaatagtgctgcaatgaacattcacgtgcatgtgtctttatggtagaataatttatattcttctgggcatatagccagtaatgggattgctgagtcaaatcacagttctgtttttagctcttggaggaattgccacgctgctttccacaatagttgaactaatttacacatccaccaacagtgtctaagtgttcctttttctgcatgatcttgccagcatctattatgttttgactttttaataatagcaattctgactggtgtgagatggtatctcactgtggttttgatttgcatttctctaatgatcagtaatattgagcttttttcatgtgcttgttggcctcatgtatgtcttcttttgaaaagtgttcaggtaatttgtctactttttaatggttttttaatttttattttaagttccctatagacgctagatgttagacctttgtcagacacgtagtttgcaaatattttttcccattctgtaggttgtctctttactctgctgatagttgctttcgctgtgcccaagctcttaagtttaattagatcccatttgtcaatttttgcttttatcgttattgcttttggcatcttagtcatgaaatctttgcccatttctatgtgcagaatgtttttgcctaggttgtcttccaaggtttttatagtttgggattttacatttaagactttattcatcttaagttgatctttctatatggtgtaagaaagggacccagtttcaatctgctgcatgtctagccagtcatcccagcattatatgttgactagggagtcctttccccatgcttgtttttgtcagctttgttgaggatcagatggtcataggtgaacagccttatgtctgggttttctagtctgttccatttgtctatgtgcctgtttttgtaccaatatcttgctgttttgtatactgtagccacgtagtgtagtttcaagtcaggtaatgtgatgcctccagctttgttctttttgctcgagattgccttcgctatttgggctctttttttggttccatataaatttttaaatagtttttctagttctttgaagaatgccattggtaatttcataggaatagaattgaatctgtaaattgctttgggcagtatggccattttaatgatattgattcttcctattcctgagcgtggagtatgtttccatttgtttgggtcatctctgattctttgggcaatattttgtagttcttatcatagagatcttttacatccctcgtgagctgtttttctaagtattttgttatttacatggcaattgtgaatgacactgcattccggatttgactttcaacttggtcgttgttggtgtacaggaatactattgacttttgtacattgattttatatcctgagacttagctgaagttgtttcttagctgaaagagcttttgggttgagactgtggggttttctagatatagaatcatgtcatctgcagagatagtttgacttcctctcttcctatatggattctttttatatctttctcttgcctgattgctcttcctatgactttcaatactatgttgaataggagtggtgagagaggacatccttgtcttgtcctggttttcaaggggaaagctttcaggttttccctttttggtatgatgttggttgtgggtctgccatgggtggcttttattattttgaagtatgttccttcaatacctagtttattgagaatttttaacatgaagggatgttgaattttatttaaagccttttttgcatctgttgagataatcatgtggcttttgcctttacttctctttatgtgatgaatcacacttttattgatttgtgtacgttgaagcaaccttgcatcctggagatgaagcctacttgatcgttgtggataagctttttgatgtgttgctggattcagttttcaagtgttttttgagggttttcgcatcaatgttcatcaagaatattggcttcaaggggtgtgtgtgtgtgtgtgtgtgtgtgtgtgtgtttgtgtgtgtgtgtgcgtgcgtgtgtgtatatctgcaaggttttggtatcaggatgattctgccctcataaaatgagctggggaagtgtccagcctcaatttttaaagaatagtttcagtaggaatggtaccagctctttacataggtctggtagaatttggctatgaatactacatctggtcctaagctttttttttggttggcaggctacttattactgattcagttttgaagctaattattggtctgttcagggaatcaatttctttctgattcagtcttagaagggtgagtgtgtccaggaatttgtccatcttttctaggttttctattttgtgtgcatagagatgttcgtagtagtttctaattgttatttttatttctgtggggtcagtggtaacattccttttttcatttctaattatgttatttggatcttctctcttctttattagtatagcttatgttaagttgaggaattagtcttcaaattcttctcatttggcttcaaatcttccctcaggctgtttctaatgcactgcagagtttacatgaatagaatttatcatgaaatggacactcagcattaaaacatcaaaaaagttatgaaattcatttttatagttgcaggtctaaatgcatgctaattttgaagtacagtatatttgttatattaagaacaatttaagtacttttcatccatatgcattcttaattgccatcataaatatttgaaatggttttaccccaagtttattcataaatatggattatatgggatatttaatagtttgtttttaatgttttaacttgatcataatcattaaacatctaataattttcagcttttttacctagaggccactgcaattactaatgattatataaagtcctattaaactaatatagggtatattaaagaattattagtagctaataattagtagctaataagtaaaaaaaatcaaatagcaaatgactacagcaatttgtttattacctgtttgcaaattcaggcacaatatagcaaatcagcaagtaagtctaattcaaggggttaatttaggaacataggatgatggtgaatctgccaagtttaagacacaggtttccaacactttctgaatatcaccattctgggcatcaaagagcagaagtgcagagtcaacaatttcctcttaagcaaatgaaggagaaattaaacatgtttcagttatacattattgataagaacttagacatatggttgcatcctttcatgatgaactgggaaatcctgttcctaactggaaagtcaactacaagttataattcctttactacaagaggattaaaggattttggttgccaagtagtagtatccttcaaaattggtctgggatacaatttcttctcattaggtgatttagaggcctattgaaaaatacaaaatataccagtttaaaagccttagaagttcacttagaattttacatcattcaaattctttgtcatggcagtctactgttaatctcattctgaacaataatgtaaatagtaaaagtaaataaatttaaaaaggtaacaggcaaacatttgctgatctcttagcatgtgccaggctccgtactagtgcctgactcaaattttcttatttattcctaaatgaaggtaataaaactcagccccatattattgataaggaactgatgcctggaaaagctaactaacatggagggtaattcatgtggtaagtttagctgtgatttaaacgtaggcagactgattccaaacacactagtcttaaccactcattcatattatcagtaaaacagtgtgtgaaatttagttggttttggcatttccaatgagcaaactcttacacttctttacttttatatctattgatcacacttgttaagattgggaaaaatggttttatttaaagataaatctttgtctgaatcaatgttattatttagattaacaatgactgttcctttttatgtcacttggtacaagtactttttttcagttatttaaatagatttgatgtaagaagctatgaatacataagaaatggtcttataatttttattatgtgtgtatcaatgtccctaaattttggagacattcactacatcaacagtttgtgtctataaaccatcttgataagtgtaattaaagtataattatcaaaggcaaactatcagcagatgtcctagcttactgctgagagtcatattatgaaacctctgccctttgaggattgtttgggttgaagacttaagatagagatgcagagagaggaatatgtaaaatatatcataaatttatgttttatatatatattatatatattatatattgtgtgtgtgtgtgtatatatatatatatatacacaaaatatgtccagttaattacctggttattagcacatttgtttaatgaaagtctttagaaaagaagatgaagtttatttgaactatcagagctgatgggtttgaataaagagaaaacagaatcaaaagttgttctatcatggcatccattgatatattatatttattatctattgctatataattattccaaattatcccaagaattcgtggcttgatgcaacaataaatatttattaattacacagtttctgtgagtcaggaatttgggagctgctaatttgaacacttctggctcagggtttcttgtgaggttgtagtcaagatgtcagtcagggctgcagtcacctgaaggcttgaatggggctggaaaatctgcttccaagatggctcactcacatggctggtattgtggtgctggctgttagtaagaggccttagatcctgtctctatgggccgcttctgagtgtcttcatagaaacacaccttgaaagcaatataacatcatttccactatttgtatttattagaagcaaatttacacacctggcctacataaaggcaaatgagattctattatttaaagagaaaagtgtcaagtatgatgtggtcatgttttaaaaccacaatgtatatgcataaatgtagtattaagagtagagtataactggtattccatataaatgtcctagaaaggtaggagataaatttttaaaagtgagtaagagtttagccttaaatattggtgaaagaatttaaactcaattctttagtcatgttcatatttatggatgtatttttgacaaattgagtgatgtgataacaatgatgctattagggtgattagtatgaccataatatgaaggattaactggagagggaaggaactgtaagaaaggatatcagcttattaaagctataccattagttacacaactttataaattttagaaaggtgcccaatcatactaaagatttatcaggagagttttctagattttctcatcaaaagatatttctatatttttaacaagtcatactctatatgcataacagaagttggcacactttttctttaaaaagttagatattttgtgtgttgtagcccacatatatttatgttacgtatttttctttgtttttatttttataatcccttaaaaatgtgaaaccctttgtagcttcttggaggtacaaaaacaggctgtaggccagatttggaacatgggctgcagcttgacaattcctgatctatagtcttacatttaatttagtttcatattaatattcagcatatatctattgaacaggtttatagtcaaagcactttataaatgctaatgagcaaaaggatgaaaataacaatatctaacatatactgagcactgaagtttccaggtatcttgcaaagcatttgacattgtttctgtaattccctcaatgttctaaggtgtagaaacttggaaaggtcaactgagtcttagaaagactaaacacactgcccaagtgagggagtcaaggattaaacccaagttgttacacgataaatacagtaccagtagcatgcaaagaagagtcatgcctgccacttttcttcatgggacctatactctgtaagaggaaactaatatatatagaagtattatctggcaaagctagaaatgcaattctagaggtccacattagattaagcaggggtgataaaatacaaatcagcctaaaaaataccagctttctcttcctagccttaattcctagctggatgaacttgtgcagtcattgaaagttactgagattccattgcaccatctttgaaatttactttcttatttaagatgcttttttattacagaccgtcagctctttgcctatccatggacatagtgaaagattatagcattacatagcaggctaactccaaatttcacatagtattattctaaggaaataatagagacctagacaagcagaatttagcccataaccacattctagagagagagagacttaaaaatacccagtttaggaaggcttcattcttggtccaaaatcattacaggaaccagaaccttaggttggttgtcacttgttttcagataagtcggagtcacaagaaaggtagaagaaacacaagcaaagataacaaggcagggaaatgccatggggttcatcaccatagtaaactataatgttctaccccttgtcttaccatatatgtaggtgcatgtgtgatatgtatacacatgtaacatataagatcttacatgtaacatattagataaaataagcttttgagaaatcatcgccttcttccaaaagtttccccatgaaaaagtcttactatgagttgataatttatatccaaaacaaattttaatttgttaaaatttaaaaaaaaattgaaacatttgcagtatgtagcattctggaacaaaatacaatttccttctagcaggttaccattttattagaaatctagcaggtaatctagcaggttaccattttattagaaaaatcattatacatacatgccaccattatcaaaataggtcatgaatttaaacatactgatatagaaaccctatcatcagtaaactaagttcactaaacagaagagtattggccaaatcactgggaatttctggcaactttctaaaaagttgtaaaccttatgacttagagtttaacctttcttctacctaaggaaaactttggtgtgccgaaagctgtttgcagctgatttctattaggaatggtgctagccaaccaactatattagtaggtaggatatatattttcatccatttttcaaaatctcatacttagaatacatggaagtttataataaaatgaaactcaacataagaattatgatgaaaacgaggatattctcgcaaagatattcacatctgtgtgtcttgagtggcatttcttatgtgtatatataacattcatccaattatcacaccatattcattttaaatccatagcctaagacattattgggtataatgacataatcatatagaacaatattttttattttaattttataatcatagattaaaccttcagactctttccaataattaagtttccacttatctgcatgtctgcccggtatcagagatattttggcattttttaaatttgttggtgagaagacgttgggcattataatatttatttgatgggtttgtaagtaaacattaagaaaatactataggaaattgtgtctatggtctgatgacattaatacaaaaataattgaacattgcccatttattgtaactactgagaccactgaagatgaccatatatttttctagtaaatcagtaaataggtgattgctcctgtctgttgccatttccactcaccacagggatcctgtgagatcgtgagattgaaatggactctatgaacatctttagtctaacaattttcaaaatctttttacatctatttttcttgctcacccatgctgacatgtgaaatctggctctcatttttgattttgtgctgattaaattgaaaccacctttagagaaaattgatatacacatgctaaaagtgaaaattcttctgtcatagatatttacagctaaagttacagtatatgggcagacctctacacaccagcaatgtgtttcatgttggttgcagatattttgttttatattttatggtgtcttttcctgcagtagaacaggtgatgcttgctctgtggggtatggatgcatttttctaatttccaaagtcagaatgttgtcaagatttttgatagggtacacacagttcacttttttctttacgcaaatgaatactatgaaatctgtgtagacatgacatacattcttactatttcttcaattttcgtttgttattccactataatattaggtattttgtacaaatgtgatattagttttataattaaatctggttatatggtaacttaaatggttacttattagatgaataaactaataaaattttctctttttaaattatgtgaactgctgaaattataactatcatatataaataacaaatatcatccttatttctgcttttattcaatatttctcagctagaggaatatttctctagccgagaaaatattttattcaatatttctcagctagtaacatcagtaatttctaattaatatacattagaatatatcttctatttccaagaaatattgatctgagctaatgtatcttataatggatagtttacaagaacattttgtgattaatccttataacattcacataataatatacattgatatagtttaagagcattaatatgctgtagaactcaacacttgaggtagtccaatctttaagtttttattcctttttttatattatgtattcctataaagtaattcttttaaattttattttaataaaatcttgatgcctatcgtcttcccttgaattgatgtaattaggcttcaccaaaccatcttattgttaagttagttaatatttactagttgaagttattcttttggtccatattattgagtttccatttaactgtatttatttgcagatataagcttgttattggatcactacaaaatttctgtacatacacttctttaatttttacgcagtataaactaatatataagtgattgagaagattctgaaccagacagtcagagcagaataaaaattatttatatcagttgcttttattttatttccttgtttagtgaattaatcatattctatatatgttgtactgtggcaactgtgtttttccctaacccttgctctactatactggttgaagtattattatctgttttattttctcccctccaggaccagaaagtttacttttcttgttaacagatttgtagaaaatataagtaaaaattccatgtcactgtctgttaaacaagataattattttaaacgaaaaacttacttgttataatgccataatcaaaccaagatgcatggtagctttcgaaggctttagattcctgcaaaattctctctattaagataatggtctggcattttgacatgaatctatctaagagctgaccccagttccttttttggaaggttaattttgtagtttctttaggacttgcctgccagttatatgccgatagccagttaattgttggttaatccaagcatgtgatgagattgctcttctgattgttcacaagcaagaagggatgaaattacatcagtctgaagctggccctttccattgccacagtatttagtggcgttcacacatggctgtggaggatgagattgaagtgttatctcatcattgctattctctcatttttactagccaactctcctcagtagtttagaaggctagggaagaaagtcatatcctagctcactacaacaaagatcaagttagacctgtttctgtagacacaaattttggctgatacatgtttgtcagtgctgaggatctgaaattggcttgggaactatagagctttctctacttgcaggtataaaaatgtcctgttattaagatttaatatttaatagtgattttattaatacagtttgatattccaaataagatgccagaacatgaaatgataatttctagaagttcatactcaataattgctacttgtcattatttaatggtcactggttgattttggacgtgtcaccaacatggcttaagtttaaaatagagctgtatttataaatgaacatcatttgtgtactatgattatctaaactgtttaattaacaaagattatgtacttttgaaaaaatcaaataacatttaaaataatacaaataagaactgatacaataactcttgactatctctctgcaggggttcttaactgttctggaacaaagtatgaaagttttgaactttctctcaaaaagtcaaaaaatcacctatgtgtatattaaacaatttcacaaagaaaatgcagaggctttgaaactgaaaaacaactatttagaaatctataaccaccttccaccacccctggttgagaatctcagctctgcatttgtttgtttgtttattatttatttattactttaaatttttttgtcaactttattgttttcagcagtcttacattcacagcaaaatttgaacggaaagtacagtttgcatacactgtctaccttcacgtatgcatggcctgtccaacagtgaccatcctccaccagagtggtggatttgtcattactacatgatacatcactatcacccaaagtccatggtttccattaggattcactctcgctgtggtacattctgtggatttggactaatgttgtaatggcatgtatctacctttatagtatcgtacagagtatttttagtgccctaaaaatcctctgtgttctgcctattcatccttccctttgtcctaatcactgagaaccactggtcttttaactgtctccacagtttcgccttttccggaatgtcatatagttacagtcatatagtgtgtagcctttttgtattggctttcacttagtattatgcatttaattttcctccctgtcttttcatggcttgatatcttatttccttttagtactcagtaatatttcatggtctgtatgtactacaatttgtttattgttcatctaggagctcacttgctggagcccatggtcagagtgtgtttagttctgttagaaactgccaaagtgtaccttttcgctctcccaaaagcagtgaatgagagttcatgttaatgcacatcctggccagcatttgctgagtcagtggattttgtcaattctaataggtgtgaagagttattcaattagaaaaattatttgaaatttaaaattaaaaaaattaattaactaaaatttcaaaatagttaaagcatggtttaacttatcctttctgtgtacttagattttcattcaatctttacaactttttaaaatatcaagactgaccttaggaaattgatcattcactacatttttcatatatatatatatatatatatatatatatatttacacacacacacaaataacagaaaaacaaaagcaaatggaaaaacaaagtgcttaaggccaaagctttatttttatatttgcttttgtttttcagttattaaaaatttaactgcacctttatttctatacctaatctatggcaatacatattggtatggctggactgaaactatttatgttgatgtggggaacctaggctgagaattgagttacctaccagtttcttcagtagtttctaagaattaaataattgatgtgctgtgaggaagcggtgaaaagcgaaagaagcacaccaattcaaacagatctaatggctaggtagaaatgtaataaatgtctaaagcctactactccttaggcttcaaggcaataaagacattcatggttttgaaagaaagagaggccttggtatttttcccacattagatgactggagaccttagaaaattccgtttcaataaaatgagatgagtttaacatagattgaaatctgtcagagatagacaaaattaggctgggaaaaatgatttagtcaagctaacaactaaggtatttcatttatttagtttagtttcttcagtttatgtaaattcaggaggggataatgatattcttgtcagggataacataatttacaacatttatgttcatgtatactgtagttaataaaaagatattttactatgacttttaccacaagatgtttttcagaaatcttcagatactaaatgaatgctttactttgccttatggatttgctattttctcatcttaaaattaaaattataatctgatgctcagtagatataaaacatatttccaaatgcattaatgttagaatcacagattaaatttgacctttaaaacatatcttaggaattggaatatgattcccttcagaatcccagagagttcatagaagtataattgttataaatatttttgtcagttctgtaatctcaagatatttcataaatccccatgtagctatttattgcatgggcatgttcataagacaatctgaagatatctaaataatatttaagtatttattgctctgtgaaacagtggctggcctagtacctgctctttaattacataggaacaccatttacattttataccctttttcttttgatttttttcccttcaaaaccacagtcattttactctgattttaaactttatgaatatttttcaaatctcattttagaattggatttcttatagggtgttttattccagtgctgtatctctggaatatgttcaatttctacatttaaactttttattttgggcaaattcataaactggcaaatatgattatcagatgtaaatatattaaagtgagggtttgattcaaacttaggaatttaaagaaacttggaaaaagcctcatatttacatatgctgttatgggggtaggacacatatgaaatttttattttgtaaattatcctgagtatcccattgtaatcatacaaaggaagaaattctagatgataattattttttatatctgaatgccattttattatgtacatacagtatgtctgtgatataacagtatatctatagtattagatgataatttaatactatagatatactgttatatcacagacatactgtatgtacctgtttatatatataatttaatactatagatatactgttacaccacagatatactatatatacctgtttacatactgtgagcttttggaaggccatacaccattttcatatctaataccttttgccataggaaccaattttatccgtttaggaatgatactctgcccattggaaagacatgttctggactatctcccaagagactcctttttccagctaatgtccacttgatagacttgtcatctagagatcacttcaagtaaattacttcaggcaagacagaacctagctcctgtccttgaaaaatttattatttccagcgatgctactgctgtattaaataaaataaagtagcacaattgcaagtgcaaagtaagatgttttaggcaaaattgaacaagcggaaaaagaaaacggtcatttttagagagaaactttaagtttctaactaaaaattggtatgtagagtaaggtacctaactgaggattaaatttaaatgccaagcaaagcattttatatttaatatctagttaaacatctaggcctatgagaacaggcaataaaagtttttattgggtcttgacctgattggaaattgatttgtgaggaaataattgtagttgtaatgaatagtctttgaatatatatgtttaaggagtaaagaaaggaattggaggaatacaaagaaatagttaaatagcattgaatacaaaggaaacacaaagaaatagataaataacactgaatgcacttttagctcctaagtaaactatcagatcattggttatgagggacaataatatataattttaaaatataatatcagtaaaaactaagaaggaaataggaaaaacatttttgataattttaatatgtttaaaattactctgattattattattttttttagaaattcagttgacattttagttcaaggaattttttactaatcctttcaaacttgctaaattttcaacaatattccatttgatgttttagtttgcctgaagtgatgcaaattctaaagctgatttttacagatttatttcattttttactttgatccccagtgaatgcattttaaagtaacattattacttttggtgctagctatggcttacctgttaccaatttgcaaaaacacaaggagttacattattataaagaaaaataagtcaactaattacatgaaaaaatgtatttattttaaaatttaaagtacttgtcttgactagagaaaatgataatagtaataatataataaccacattaataattaaccccatttattgaagactttctctgttgtaaatacttaatatctgttatctcaattaattcttacaacaggtctgtgagtgagcactattattatccttcttttataaatgagaagagtaactcacacagacttcagttgacctgcctgactactacataagtgaaggagacgagaattgaatgtatttcctctggcttctgtgaacacatgcttaaccactatatcggagttatgctctataaaataggacataactaagtttttcctctaaaatgtaacttttgagagagaagtatttctgaaataaaaatctgatgttactcccctacttttaatgatttatggtttcccattgccaacagcataaatataacatctttaaaatggcgcacaagtcttttagggtcccattcctatccattttcttagctacgcatcctccagctcaaataccccttttcttcccaccacttgtaggtttcactctagaagcactgaactattttcagtttctttaatatatcatgctctttcttagattctcactgcctagaatatctttctcccacatatcatatgcctaaatattcttgatcagtttttaaaactagttcagatgtcacctcatctctgaaattttctctgaacaagcctccacataggtataggtaaccttgtcctcttatgcccctcatatctatttctaatgaattataccatcactagatatttttattcaagaacatgcatagcttcatgaagcctcttaaaactagtttcatgtggttctttatattttcagcatctacaccactgcctgaacacattttaggaactcagtgtttgttgtattaaataacacttatgaaaatgttttggatttttttgaataaaaatatactctaatgttaatgttgtatttctgcttaaaaccactactgtgtttcctgtgaattagagcgtctatgctttcaaagcattgatatgtaagtgtttaacagtggaaacatttgaaatcaaaaaagtatatctaagcttttcccattctctgataaatacagctttatcagttgtctcatctttgcaatccttctctaatttacaaatctaggaatctttcagtttcttcctgcacaggtcttgatgagtatatttcgtttggtgatatcatatttcttaacaatcattctatatttaagtaaagacctcatctctgcaggagccaaccactctcaatctcacttcagataatattctgaatgagaccctacagaagagaaatcagtctgacatttattagacattctcatcatgccagacactgtgttaggagattcccatgttggagataatcaagcacaatttttggctcaaatagcctaaagcctcagatccatgatttcctagcagtctgatcttagataagttatttattccttttatgcctcagttttctcacttctaaaatgaggatgaaaataacctcctcatagaattgttgtaataattatatgatagcactttgaaaaggtcttccatattaaaaacacaatatgcatacgtggccgccatttttatcatcatcattattatcacgactactaataccgattactttctctgctcctcataacaacacggtgaagttagttggaaatatatttttacactgaattataagaagcattatggaagaaaatgtttttcatttgtatttatatctatagtgccagggtccatatctagcacatagtaggttcttataaagtttggaagtcttcaggtccacccacagttttaataattcactagaaagattagcaaaatgcattgaaagctgtttttctcatggttatgggttatgggttatagtaaaagaatacagttatacaaatatatatatagatataggtagatatagatatagatatagacatatctgtagtccaggctggagtgcagtggcacaatcatagtacactacagcctcgaacttcgggactcaagcaatttttcccaattcaggttccgagtagctgggattgtaggcatataccgccatgcctggctaattatttttaaatatttgtaatgacagggtctcgctgtgttgtccaggctggtctcagactcctggtctcaagcactcctctggcctccaccttcccaagtgttgggatgacaggtgtgagcccactgcacctggttctggttaacatattatataaattgctaaacacacaagcagaggaaggccagaaaatattgttttgatttgagagatggtagaacaatggatgatgcatacaattcagttaatgtattaattttacctgctcctaattaatatcagtcatgtgtcacttaatgacaacaatacattctgagaaatgcatggttaaatgatttggttattgtgcaaacatcgtggagtgtacttacacaaacctatatgatattgcctactatacagctagactatatggtatagcctataatccattttcttagttacacatcctccagctcaaataccccttttcttcccaccacttgtaggtttcactctagaagcctattgctcctaggccacaggcctgcacagcatattactgtgctaaataccgtaggtaatagtaacacaaggtaagtatttgtgtattaaacatataaaagatacagtaaaaatatagtattataatattatgggatcactgttagatatgtggtcggtcattggctgaaatgctgtttgttgtcagtgcatgactatatatgtaaataattttaaaactgtgtcaattatgattagtccactattattttccattttgccttgttccctctccaaaaacaaaaggattgaggtcagaattataataggttgtcaagagcaacaacaacaataacattgctaggtaacaagtacagcactttcatgacctagttacttgctgggacacttacatgttgtttaactgacacaacaaatgtctgacggatgtaccattatcatgtccattatacagctatggaaactgcaacatagagtagttaatttgtgacaagtcacataggtgttaactggtaaatctggtgtgcaaatgcaagaacgttcctgtcaacatttaatttttttccaatttgaatattgtttaaattgttgccttttcgagagagatagcaagctgttaatcctataaaggagacacattttctggactagttacccagtggtggtgttgggagcaagtggtatatatttctaagctatttgtaagagccccacacctgcctgtagtttccccagacgtgtagctaggtatgtgacctgcaattgtcagaaagattgtttgactgtatgtattaagagcctgattccagggcctcaagtatggaggaggtgcctgcagtgttagctatgtaattttgttcacagctcccttcaatctatgcctgcctccccactgggccaatttatactgcagtgtaaagtaatgaacagttacagtgtccctggggaaaatcagcaagttttattcagtattgcattacaggcaattgttatgtatacttccccattagtcaggttgaacagacataaatgaaatctgcagttatttcccaaatctcattaagaaggtgctttactcgtatttccatcaaatcttttactaggtgtctaagagctaaccagatggattgatttcagttacactgtctctctaattctcttcccagaatctggcagagggattaataggattaaagctagttttgaaagaattgacagaagaatagaactgggggagaagaaaaagaaaggatgatgaataatttagataattagatcctaaataatcaacatattttacaacccttcccaacagtttgagtccaataggccaatagatcctgaagaattacatggtctattgccaagccagctcccgcaggctacctcagcatctccctcctaaagcatagctcattcctccaccttaacaatgatcagaagatttcagggaaagtaaaataaacttgctatttctgagataaagtctagagggtcctaatttccttattatatcacattagtttcaactaaaattatcatttgtaagtaaaggatccatcttgcattacatagagtataaaaaggtgaggaggtataacaatctgaggggttttcatggagtccaagcacagggatgcattcaggctcacgaaggattggaactgaaaactggaacgttctaaaggcaccaggaaatcattacccctctccctttctccttctgtctctcgctgtgtctctcgctgtctctctctctctctctctctctctcattctctctatgtccctctgtggcttcttcttccttcttcttcctctgctacttcaggaccacagtgtttccagatccttctctaggaacaaacaattcatttattctcctggaaattgcacgtttttcactgttttgtttgccttttccttccacacttgtgattattacacttcattcaggtatttaaaactaggattcctatgcacaagtgtaaatctttggaagggagaacttatttggcccctgtggatcagcttatgtgtatgaatatcattaatttggccctgagaggtgaatggcaatctatgggatggcaggacaacaattagtcattagttatatatacatttgtttctcaaaacgttaatatctttgtggtcaataatcatcttatttctcattgctttgcctaaaacctgacacaatgtcgtatattggataagtttaattgaagtttttttcagtaatgatagtattttgaaagaaataaagggcatggtgactgcctttagagagcctgcagaagcctttgtaaaagggacatggatgaagctgcaaaccatcattctcagcaaactatcgcaatgagaaaaaaccaaacaccgcatgttctcactcataggtgagaaatgaacaatgagaacacttggacacaggaagggaagcctcacacactggggcctgttgtggggtggggggatgggggagggatagcattaggagatatacctaatgtaaatgacaagttaatgggtgcagcacaccaacatggcacatgtatacatgtgttaacaaacctgcaggctgtgcacatgtaccctagaactttaagtataataataataataataaaaagaaagcctgcagaaatagaggttcactaagagacatttctcagcatttaccaagcggtaggagagcacacgtttattgataaagtgcaggcagcagaacccagtgttactgacagctgactaaaaaaaaaaaaaaaaaagaaaaagaaaaaatggtggcaacacataagttgattcagtaaatgcatattaaatccacattcatcagcaccataaaagcattatctttggaatgaccatcttggtacctaaaatagattacatcattcaagtttctaattttattttgtaaagtttatattgacgtttattctatttaacaaaaatcaaaaatctaaattattaaatggcttattttaaatcattgtacatttactatttaaagtaaataaaattgtgccccagatgtcacaaaaggctatttttatgaaggttattaatcacatgacattcagtgactattaggatgtgcgagttactcacttaaagagtgtttggatagactacgtggttttggaaatttatttgcatcctaaggtttcatggtgtgcattctcttctatacattccaacttagtttatgtagcaattattattattgatgaaaaaggttgatagaaaattttgctaagatcatactgctactaagtgatagtgtttgtcctttgtatgttcctaactaagaagaaggcattattcatttattgccaaattattcaagataagggcttgatccagttgttgaaaccttaaattatatctaagttactaaactagatttcaagttttcaaaagaagtatgttgaggcaaatgagaattttacttatataagacaaatggttatattttctatatattatatataatagaaatagaaatatatattatatattatctttatatatatctttatatatagatatatatgtatatatatctatatatatagatatctttatataaagatatatatgtatatatatctccatatatagagagagatagatatgtttctctctctatatatatatatatatataatatgtatatatgggtatctatttattgtttgtctcttcttctgtaatgtaaattccatgaggcctggaactacatctggtcacagctgtatcctaagagtttagtgcattttctagcatatagcaaagatataatcaagcataatgtatatatccacaatatggatttagtcactcgccacataaggatcaggatgattctatggttaggtggcattacttcgaatcatataaaactttattctgcaagtaaagaaggttacatattagtcatttgggatcacttgattagataagatttatttaaatatttgattatatgtatttatatatttgattatatatatattatatatattatatatatatagcaagacccaatagagtgtctctctctctctctctctaatatatatatatacttgcagaataagtactgggtcttgctatattgcccagactagccttgaactcctggtcttaagcaatcctccctccttggcttcccaaagtgctgggattagaggcatgagtcatcatacctggccccatcagtttctattttatacatttctctttctcttttgcatgtttcttgaaatcaaagggaaactaatgtaacaaatataaatcagaaccttgaaagaaatgggtctaatgtattaatctcattatgatatggatcataagaaatatgtactcatacatagcttctgctctctttggttctgaccacatacacacacacacaaacacacacacacacacaaaatagcagaccaattgttactttttctgtcagtacattttttactagtgattatattcacttgctacagaagtttattactatggacactatatcaaagattttcagatctaaatattttataatggatattttgagcataaagatagacaaatttttagtgactatgcatgtcacactacaaactacaaacactgttgtataggaaaggctaaggagtgagcatcaggagttcagggtaagagtattgacacagctagaatatggctcacaatggaaagtccaaattcccaaagctcctagactgctctgctctgctactttgaggactgagaatccagcagaccccactgtgatgaatcacaggattctataccaagacctgcctactccacccactgaaggcctcagaaatctgctccattctttctattccagcaaatgtctgtacttccaaaatagcacatgctcccttacatatccaagctttgcccatgttcttccttccatccgaatggtcctccaatcctttttctgttttttcagtgaactcctgctcattcataaaacctcaaataagacataatattctggcagaattccgaattctcttctctggattcccattaaaatgcatgctctaactctataagggcattttaatcccatattatattgtgtagccatctttcctcagtgtattatttgaaggaataaggtttttattcctttttacattcactgcactgtgtaaaaggcagaggtgaaacattctggataaatattcattaaataaaataaggaatgatgttacataactgggtgcatttcatgcagtagagtttttatccctcaaattggtctgcttcagaatggggctgactccctttgattcttggtaatggggaattcttatctaatcaggtgatctcaaatgactaatatgtaaccttctttacttgcagaaagaagttttatatgattcaaagtaatgccacctaaccatagaatcaacctgatcctcatgtggctagtgactaaatccatattgtggatacatacattatgcatgattatatctttgctatacgatagaaaatgcactaaactcttaggatacagctgtggccagatgtagttctgggcctcattgaatttacattacagaagaagagacaaacaataaatagatacccaaataaataatttaaatacagtagtgatgaaatgctatgaagaagaagaagaaaaataaaacgtagtagggaagggaagaggcataaaagagtttaaggaaggttttgccaacaggtgaccatttgagcagaaacctgaaggaggtatgaagtgaaacttgtgatgacctggagaaaaagaactcttgataatagatatagcaagtgcagaaacccaagatgccatgagtagcagtgaaaaaatatctgagaaataaccatgagtaagttcacagtaaggatctggatactggtctaagggcaatgggaacccattggaatttgtgcacaggagagtaaaatattctaatttatattggaagagaccactcttgctgttaaatggtgacagaactttctggggaacccactagaagcagaggtccaagtaatcagtaatgttgacttggatgaaggttggagcaaggaaaggtttgagcaatggttatactcagggtatattttaaaggaaatgttgacagagatttactattgactatacaggcattcatatctgtcttaactataagaaaaataagcagcttctaacagacaggaactgccctagtactgtcagccattcctttgtgataattgaagtttccctaacacttaaggctagaccatgctcaacaggctattcttctgttgagcataaagaatgtaacggaaaaacattatattaggcccctctctgactatgatggatcaagacaaaaagaaaactgtcagattttaatgtagataataatgtgaatattgtccaaaccacaaaaataatcaaatatctctcatcctgatatgttgcttctttaccaattacagcttggccttctttgttctctctgccttccatataataatttttaagatacctaaaaagagaattactcctgatttccaactgcatccaatccagagaaaaggcctaatttacttaatgcttccccaagtaatttaacacaatccccaatactgtaatgggtctttctttctaacagcctcttagtgagacactgcacagttccccatggtgagtgttctcctccattgtaaagtcaagggaccaaacttcatcaaccattttatttctggtgactgttagctggggacattgacagatgttggtagtggaccaataattttataatgctttgggaaatttatgtgtctattttaagcccaaaagcctatagcatgatccatattaaatgtcttagcaaaataagtttaggctcaagtctagaacctgcagacatgtgtcatatgaataaatcagataagagcaagcctggggaattagtctattccaagaaattgttatattcctagaagtgtttagtctcagagagcccctttcttgcacttatttccccatcttgaagagaaaagtatgttctgatctgagaggtcatggccaaaaagtgaaaatgatttcattatcattcttccagatttccttaagcttcatagtcaaacactgaccactctattgagattatcttaggtttcacatacagtatgtgcattctttcggagaggactactgttactgcaaactcgtgggcagaaataagcctccttttaacagttttctctgaagaattgcatttcaactgcctttaccgactctcaggtaaccagtatcttcacaggctagtgttaatccagaaaagaagagatgaggcagccaagctgagcctcacttggattttaaattatgtctgtggtgtattgattataatgaaatggaggtgatgtggtgaaagcaaagggtgtggcagagtctaagaccacatggtatgattttggttgtcttttagctattttgaatgtcactgttcttatctataatacagagataagtaagatatacagcatatgaaatgatttatatgaaattatgttgtgtttaatctgtactgtatatgtgtccttacagtacacaatattttctttatttgctcctaatgggcaatttatcaaaaaattaattgcaattgtgagccatgtaaagtcatctaaagaaaaaacagaaaattatcttgagctcattaattatcagctgtgcattgactgtaaaagctatagattctcttaattaataatggaatcattagatcacaatatcccttgtcagcaatggtaagctccacctgttttctacttctaaaggtgccttcaaagtcaaataagataagaaaaaaagaaggatctcgaatagatgactgctaaaaatttaaaattacatggagaaaccgaactaatatgaaagcatgtttgtaaagtattttatgtggtatttattataatgatgtggaggtggagtcaatgatgagtggtatggagaaaatcaaggatgtggagtcagaacagaggtcatgtgctatgattttggctgtatgtcttttaaccatctgaatatggatttatttatctgcattacagatataaatacagtgcagactacacaaaataatgtatatgaattattttgtctcacaaaaatacttttgaagtgtttatagaagacttcttggctatgtgaaacaaagggaacagttacaggtgatgccaaattactgtgtgtggattgctggcattgaccagtgtaaatgtttagcttgagtggttatcagtaacatgggatatcttgaaaaatagtttgtaatgttatattaaaatagcactctgataagaaatcatctaatttccaaaatgtcagatctattcctagggagtaattctcacactgggagcatttcattgtgtcaataatatttaaatgagtcactgttatttgtaaacctttcattgtgatagcacaaaataatgtgtgaaaaacatgattatatggttaccattctctttaatagggtttgcagcctctatgtacacataacagctgctgaagcaaggcctcaattaattttacataacaggagcaattttacacaattatttgaaaatctttggccacgttccatttctctgacataaacatatgggccaaaatcacaacaaatgattactccaatgggatctcttataataatacttatattgaagttattatttttcttgattaaatctttcaacttctatacaatttcatttgatgtttaacaccttttttcctatggataatacttacaattggttattattagagctaacatttattgaatgcttactaaattctagtctctctgctaagtatttcaaatgcatttctacctctattcctcacacttcctaaagaataggttccaacattattttacttttaaagaggaagaaactaacttatcaaagttaagtgacatgactaaggtcacagtgatcaataggcaggactcaaacccaggtttgctggtgtctgcagcaaattttcttaagtccaaagcctctgccttccttttgtcattatagtatgttatttgtcaaagataaattcaatataatattttaatttctaactataaatataaattacttcaaaatgcatgtgtttattagttgtactgattagtaagatcatttaggcaccattagcttttttttttttttttgctaattatccatttagacattcattccacaagtattcattaagcatctactatagtcaagcctctccttgagttgacagatttagtcacttctcctgccaagaaatgcagacttgtattccctagtcaggaagcatatttctttttaatcattttatctcaggatgtacttcctttccatttgggaagagaataatgatagttgagtccagattctatataaagctaatatctttgaatcacacgtttctctgttatcttcctatttccttaccttacaaatacccatattatagcatcttttgtattgcattgtaatttatatttacatttccattttcccttttaatccattaactctttgaggagagaaatggtatttatcatgtttttagcatgtaagttgcaattctctgcttaatgaattgtgttgtctgaaggaatgaatcagtgaagttcccagtgtactctagagaatttaagatcaatgcttgagacaactctaaaaagaagacaaaattgctgggcacagtggctcactcctgtaattccagcactttgggaggccgaggcaggcagagtgcttgagccaaggagtttgataccagcctgagcaacatagtgagaccttttctcaaaaaaaaaaaaaaaaaaaaaaaagacaaaatctttttttttttttaaatcgtattcaacaggtatcagtaatgactagctcagctgtaaatgacagaaatggtctcaaatgtgctaagctgtcatgatgcaaggtgagtcctcttgaagctttcatttgtcatgtaccaagttctcagagtgaattgtacaatgacacaaagtatggtttaagtaataggctttactggggaaatgtattattcaaagttgagcaagaggagaagacctggtgaagtggatccacaatgtaatttcccagggaggaaaggcgaggccaggtccattgccagaacacctactcttactgtgttcagccagccccattagcctcacagtgggaagctaatgaggatgaggagacctatgccttctgatataactgaatcctcacttacacatttccccagtaaagccttttccttaacctgtacttagttgtagtgcctaactagtaaactataaggcatcaaccttagaaaacataaagaaaaaacatatggctcatgtcactgaaaagacacaggcattattggagactgtacaaattgttaaacgactgtgttagtttcctattgctgctataaagaattactgcgaagttagtgccttaaaacaacacaaatttattaccttacatttggtgagctcagcaatgggaatcactgggctaaaagcaaggtataggtagggctgtgatcctttctggagattcttgcgaacaatctttttatttttttctctatttccagcttctggaggctacccccattccttgactcatggcccccttccacatttgaaccagcaatgactgatggagtgtttgccatattgtattactctgacactgactctcctgcctccctcttccatcttgtaatgacctttgggattacattggacctgagaggataatctttctatcttaatgtcattttattagcagccttaattccacctgcacccttaattcaccctacacctaatataacatactcacagcttctagggtgtggctatttttggggatccattgttcttcctaacacagaattgtagaattgtctctcttctctcttcttttatttgtctctctctctctctgttttttgtttgtttgtttgttttgttttgttttgtttttttggtctttgggctttgttcttaatttctaaaaggcagcaaaatgacttctatcagctaatggtctacaacctcctaaattcaggttcaaccagagacagaaaagtgtctttccctccattagcgtgaagttggttactagacctgtcattttctggtttgtttcatgtgcacagtccctgtggacagcaaaatgcaatgccctttatctccagacctaaatcatttcctcaaccctatgtgataaagattgatgatggaggaagagataaatataggaaaaggtttcttcaggatactagttaggctaaaatatgagagaatgagaagaccaaaatatccattgtatagcaatgtggaaaggaggggaaatttctgtttctacagaaaaatatgtccattgggctaaataaggtctttctgtacgtgtgtgttggtggttcttccacctgccataagtcagaaatataaactcgctctaaaccttgggtctgagcttgactctatgtattttatcatagccagtggattttaaattctggataataaaatccacttgctaagtaaagactgaatttcatgccttcaattttaaaaacagttcgaaaaattgggtcagtatatttttatttcttttaaagaaaaaaaatccaaaggtaaagaaatatgacaacttagagaaataattgttcaaaagatgctgttttaataaaacagaatatgtgattttttgctagtattatttcatgtgtaaaaaatataattatctcttataatcataaaaagtattgttctaagctttactttaaagaaaagaatttagtatttacattattgaccatctatcacctttcaccagagaatctcataatgttcatttcttttgtgatagccatctatgtgtcaggcactaagctggaaagtttcatatttgcaatttgccatttatgataagccataagtgaaatattatctatattttataagtgaatgaactgaagctgaaagagattaatttgctcaagcccacacagctgttaagtggaagtcaggactctccgagaaaaaagcccttcatattccacaataacatctttcattttcaggaaagagaatatactcacacttggagcttatattctttgaacttacttacattaagaatcactgaaatgtatactcttttttattggtctctcagtatatagatacattttttgctgaataaatgaatgagatatgttatattctcatcattcacagattggaaccctccactgtgaagaatacatgctaaagcctacaagaaaaaataaccattaattagactctaatagtccttaaggagcttaaagtttagtgggagagataagacacacatacacactgcatatataaccagaacatgaggatatgtatgatattttcccagtcagaggcacaaagagctttaaaaattaaaaagggaataaacttacttttggctggagtaataaactttttggaaaaaaaacaagtagtatttgtggttagctttgaagaacctaatactacaatatgtaaaaatgtgagaggggactaatccaaattgaaaaataacccgtaaggttaggaatggtgagagatacagatggaggaaggagaaataaccttgtgagccatttacattataaacatagagaggagaagccagggaagtggatatttgaggctaagaatgatgttagaatcccagtgagagtccacatttaagatgtaaatcagagtttaagttatggtttaagaaacaacaagaacaattttatacatcgttaaaaatcatattatccttcgcaatatattttaattcaaatgtacctctttaagatggagaaggaggttttttttttctgacaaatttagagattatccttttttcagtttttaaatttgcatcatgtatgcttacagggtttctgcttttaaatctaactttgacaaacgttcttatttcttatacaattttttaaaactaattccactttttaaaaaaatccgtttttattttttcacaagttttgtgatattttactctgttgactaggattggggctatcattcctacctttttaatttcacagacatgtaaagttcttggtattttccttccaattgtacttcaatatatttttgaaataacttattttgctcaatatatgtattattgattcaattaacattttttattatttttgatcatatagaatcagaaaattgtaatgaatcccaggaaatcacccagtcaagaaaaagtatagagactaatacctaccacattttaaaatatttttattttaatttttgtgggtacctagtaggtgtatatatttatggggtacatgagatattttgatataggcatgtaatgcatactgttcacatcatgtgaaatagtatatccattccttcaagcatttatcctttgtgttacaaacaatccaattatactcttagttatttttaaatgtatgaataaattattattgactatagtcaccctgctgtgccatcaaatactaggtctttttctatttttttttttttttgtacccattaaccatccccacctcctcctcagtccctgcactacccttctcagtctttggtaaccatccttctcctctctgtcttcatgtgcctgccctctttaatgattttgaaatgatattttcaaaactccttggtagattaaacctatggttaatattcttaagatagataaattgtttcttttgcttacgctgtaatcacgtgctcatgttcccatttccaaatgatatcagctaaacatactcttctattgccatcgttcctattatgctaacttatgattagagtcagacgtttgagtgcctgtgtttcttttgaagtctataggatgacgatgacccaaaatcttattgctagagattctatcttgtcatttgtgatgaattattacttagaaatggtgcagatgaaacacattcaacactataactctggtaatactgtgctttgatgatctgataaggtgtcatccattttcaacctgaaattaaaaaaagaaaagtgagttaaaataagaacagctgaagatgtcaactgaattgtcttccaaaaacttactcctttccatttgaagtaaaacataagccttatcaaccacattagttccatgcatttattgcagaagaaaggagcaaaggaagcatgacatatagtcccatcctttgaaatgtgtcataactgaaatgagaacattagggcctgagcatagagcattatctattaaaggtgattttaattaaaggcattctctttttaacctaaaattgcttggttattaaagagtatagtggtccttgatgtttaactagtgtttgaaaacagttacattttatctgataagaatgtttgtaataactgaacagaaggtatttaaattgtgaataatgcctaacagccaatacctgtaagttcatggtttctatcattttaaggtaaaaatataaagacaagctaagtgaatatgttcacaatatgtttccatgtcccttctttgtatgactatttaaaaatatgaacaatgacttaaggcatcactagcccatgaataccaatgtgattatattaacagtagtaatccaaatatcagtgtcactttccaactcattcagaagctcattgtcccttggagaactaaagggacggtctctctcctcactctacaccacacttccacaccatggtattaaggaagattctatcagaagcttttatataaaaaatttaaaaatagccccattattatcatttgtgctttgcattttgtgcagggaccatcttccttgacaaatgccgttatatttattttactcatgcaaattagtggataaaaatagatatcttagggtttcctgtttcattaactatatcaggcatacttgtatgaattctgtttaatatgaaacctcatcctgtgatatatactggtatgctgattaagaactttattttaagcaaacattgttcaatatatgtcatatgggacagtagacatgggtatatgatagtgaacctgtcataatctctattttatcctattctacaacataaaagcaggaatactcaattcagattgtatttcaataattcttcatagacgaggtaatgtttctgttgtggaaataaaaatggctaatggcaagtcagttctagaatccagaagttccaggtaaacaattacaatgcagaggcactggagtgaaaagtaaagcatacaatataaagataactagaaataattcaataagctagactgatatgtgtttatttgtcaactcataagaagaagaatacaaacaagagtttgaaaaagaaaggctttaaatgcctatattagaaatctgaagtttcatgtggagttactgaaattaaatgacagagtcagctattacgtattagaaagatcagtttggcatcattgttgagaattaaaacagtccaacctcagactttaataccaaataagtaccagttttggaaatagcaatgacagtgaattgcagacattagacgacttactggatttgaagaataagaagtaagatgtaagaaaggttcagttttcttacttgtgaactgggaagatggtagaactattctctgttataagaaacaaaagagataattttatataaattaaatatattacaataaactttgggtttagatattactattatcactttttacattgggaaaactgagagctacagagattaagttatcctccaataatgccactggtgaaatacctagcagttataataagccattatgtatgacataatattattttcctccacactagtgctacacaaatataatatataaaagtcacacagagccaaaaaatctgtagataactttgtatgtggtaaactacatcctagtttcctgaaagagttatgtcctttgaaaagagagagaataaagtgatccctctccagtgctaatgtgtgcttttgtagccagataacaggttagactaacagaaacaaaatagatgcttggtctgtgggaccatgaatgtcaaggaaatgatactctgaatcattttgggaggaccataattctgtgcttaaagatctctgaaaatctgtttgacccatttcactctattgaaagcatgatatgctaacaagccagttggctgcagtcaagtgctccgctgaaggcttctgcaatatagaaatgatgaatctggcttacagagggaatttggtggttaaatgaatacctgctattgcagcaaaacctttgtatgtttcctaggcaactaaaatacttaagaaatggtggcagtttaagtagaaaactacttcacaactaaagaaaagataaaatttgtaaaggcgatgtgtggtcagaaaataataaaaaagaaaaagatagtgagtaatcgtccatgatgtatagttgggagcatttaaaaaataatacagggtttgggttactttttgtcttttttttttggtcttatattttaattattttatattttagttgaattaatagtctatgattactgagttgagcgtcctactaatctctctccattctaagcagcctgtggatttttaaatatcactaccatatgtcaattctctttggagtaactaagtgtgaaatatacctgtgaaaaactattttcaatgtgtgaagtgcatttttcaaactggtaaagatgataaaactattctgatcatagcataatcgactaatcacaattgaactcaaatatacatggcacagaatatctaggtatcaaactaggaaaaaaatggaaattgttgtgatatttatttgagctgggatgacaagggctgcagaaataatttttctatggttatgttcatatttcaatttacaaacgtttttcacaattactagtggattttgttccgtggacttcagaatactccactaatgcctcaattttataaaatgcctaaggtaaattggtaaacagtactttccttttgaataaaaactgtgggacacatgatggcactttttgtttcagtcatgtggtagtaaagacacattttgctgattagtgaagggtactatgatatgtgtttcgtttttagaggcctgctaaataaacctttctgatgcaaagaagctaaatatatcattcctaaaaattcaaaagatacaaatgcaattgaaaatcatgttcaaaaccatcttactctcatattttattcttaagatttgtattgacccataatgcattgtacatggtttgctctcatgggtcattgatttccaaagaacatccatgaaattttaagtttgcatagcaaagcgttttaggaaagacagcgttttcctttttgatattatgctttcaagaaatgcaacatctctatgtgtttctttttggttctctttgaacgttaattagaaatcaaattggcaaaatagctttatcaaaagaaagaaagaaattgttgagtggctcctgcctgtattctcagccactctgatgactgaggcaggaggatcgcttgaggccagcatttccagcttgctgtgagtaatgcttgtgccaccgcattctagcctgctagcctgggcaacagagtaagacctcatctctaaagataaaaaagaaaatataaacaacaatgaatagtcttagattttctaccaagattttgagtatataaatagaaataaaatacattaactaaaaaagaatcagacaaaatatattatctataacaacactcagatatttggtaatctctacacacatttgtgagaaatgtaccacatagttcaaactacattatgtttctctaatatttttgatcataaataagttagaaagacataaaggttttaaggcacaaccatcaaactaatgcagaaatttttacttatactttttaaggaaatattctttttgaactgttatactttttaacagaatacaaatgactagacataaaaatgtatttctttaaatacttacagtagaatttcatgctagtaatatagtatatttaaatgttggagtatttgcatgatgttgaaaaattcatatggaataagtaaaaataaattctgacctaaatgaacctcaggaattatccattttgtaagcctttcctctaagatctggaatgcaacaaggatgctaacttttaccattgttactcaacataatacaggaactcccagctagagcaatcagacaagaaaaagaaataaagttcatctaaattggaaaggaagaagtagaattatccttgtttgtagatgatatgatcttatatttggaaaaacctaatgactacacacacacacacacacaaaaaaaactattagaactaacaaacaaatcctttaaatttgcaggattgtgcacatgtaccctaaaacttaaagtataataatagtaaaattaaaaaaaatcagtagcatttctctatgccaacagtgactgatctgaaaaaagaaatttaaaaaggaatgccatttacaataccagaaataaaattaaatactttggaattaacttaaccaaagaagtgaaagatctctataatgaaaactataaaacatcaaggaaagaaattgaagaggacaccaaaaaatggagagctattccatgttcatgaactggaagaatcaatattattaaaatgtccgtactacccaaagtcatctacagattcaatacaatccctattaaaataccaatgacattcttcacagaaatagaaaataaaattctgcaatttatatggaaccacaaaagacacagaatagccaaaactattctatgcaaaaggtacaaaaccaggggattcacattacctgacttcaaattataatacacagctatactaaccaaaacagcatggcactggaataaaaacagacacatagaccaatggaacaaaatagagaacccagaaacaagtccatatacctatggtgaactcatttttgatataggttccaataacatactgaggggaaagacagtctcttcaataaatgattcttggaaaactgggtattcacatgcagaagaatgaaactagagataggggtctactatctctcaccctatacagaaatcaaaatggattaaagacttaaacttaagacctcaaactataaaactactacaattaaacattgtggaaaacttccagaacattgatctgggcaaaattttttgagcaataccctacaagcccagataacctaagcaaaaatggacagaagggatcacattaagttaaaagcttctgtgcagccgaggagaccattaacaaagtaaagagacaacccacagaactggaaactatattttcaacctgctcatcagacaagagataaataaccagaacatttaagaagcaggcatatgaaaaggtgttcaccatcattgatcatcagagaaatgcaaatcaaaactgcaataatacatcatctctctccatttaaaatgcttatatccaaaagacaggctgtaataacaaatgctggagaggatgtggagaaaagggaaccctcatatgctgttagcagggatgtaaattaatacgaccactatggagaacaatttggagggtcctcaaaaaactaaaaatagagctaccgtatgatccaacaatcctactcccacatatacacccaaaagaaatgaaatcagtgtatcaatgagatctctgcacttccatgtttgttgcagcactgttcacagtagccaaaattgaaaacaacctaagtgcccatcagtagatgaatggataaagaaaatgtggtacttccacaatggttgaaccagtttacagtcccaccaacagtataaaagtgttcctatttctccatatcctctccagcacctgttgttccctgactttttaatgatcgccattcttggcatatatacaccatggaatactatgcagccataaaaaatgatgagttcatgtcctttgtagggacatgggtgaagctggaaaccaccattctcagcaaactattgcaaggacaaaaaaaacaaacatcgcctgttctcactcataggtgggaattgaacaatgagaacacttggacacaggaaggggaacatcacacaccggggcctgttgtggggtggggggagaggggagggatagcattaggagatatacctaatataaatgacgagttaatgggtgcaacacaccaacatggcacatgtatacatatgtaacaaaactgcatattgtgctcgtgtaccctagaacttaaagtataataataataataataaaagaaaatgtggtacttatacataatggagtgctattcatccataaaaagaatgagatcctgtcatttgcaacaacatggatggaattggagatcattatgctaagtgaaataagccaggcacagaaagacaaacatcacatttctcacttatttgtgggatctaaaaacgaaaataattgaacttacagccatggatagtagaaggatggttaccagcggctggaaagggtaatagagggtgggtggaagggggggatggttaatgggtacaaataaaataaaaataatgaataagacctagtatttgatagcactacagggtgactatagtcaataacaatttaattgtacatttaaaagtcactaaaagactataattggattgtttataacacaaaggataaatgcttgaagggttacgtactctattttacatgatgcgactattacacattgcatatctgtatcaaaacatctcatgtacctcataagtatacacttcctatgtacccacaaaaaatacaattaaaaaataaaaacataacctaaagagtcatgtgctttgaggatttatataaccaaataaattttagaattatcttctctgactgcaaaattacatggctctgtatttaaatagcattgaagaataaataggttcgtttagatcatgataccctgtctatgagatagggggatgattttctgcctgtcttaattccagtaataattgctttcctccaatcaactggttatttttataaagcaagtaacgaattatgtttcctttttatacatttttactacttacaaatttagaatgaattttgaggcccctctagaaggcaagcagaatatcaaggcatgcatttaatatattaatattatttcttaaataaccatatttgttctataatttttcctttgctctagttttcttatgctgtacataactgtttctttattgaacaggatagtccacagtagctgcactgttcagatccaaagtttccaaggtaatgcagcaggaaacagaaaaaaaaacaggtagcatatcagcaattaataatacctgataagaaatgacttcattcattttggctcatcacacatcagtagtaactagtcttataacctttacctaattacaaagtattctgaaaaatgcagggaagcacattaaatatgagatgaacaacactttatcagccatagtcccttacacagaataggcaagtcagtaaaatatctttgataaaaatatcgtgtgaataagagtgtatgacattataacaaaaggcaaagatactatgttaatgaagaaatcctagagacttaaaagaaagctagttaatatgcaacagatttgaaacaaatgaaaggataaatgcaaattcaaaatagggcacgataagctaatctcaatatttagaaaaatttgacaaataattgctccacattgtgaacactatctcttattctgaagagaatacccaagattttcagagtcacttggtaaaaaatctcaaaggttttccagatattctatcaccacatatcataacttcaagtactcttctcctcaaagggaaagtaacaaagcagaattattcattggggattatggtgataaaatattcacaattcctattaaagcaataatgtgccagtttttaaattactgaactattctttttgttatttccaagggaatctgattagcaaagatagaacatactaacatggttttgctttgggattcatcgcatgtctgattaaagaatatttaaaaatacatttcagatatcttctcctcacttgctataaagaggctgaaatgacaattaggtagtctcatggttattaaattcagaggacatgaaggtaccttgtaacttgggaaattgaaccagaaatgcacataataacgtagacagtaaaaagaaataaaaggatcagacttatagttttaaaatagatccagttctgcatgcatagaattatcccccaaagcattctgtatataattttaagcatacaaatcaccttggtcaagcaacatgataatgcaagtacaagcctctacttagaaatttagttacttgccccagtaagaagtggtctgaaaatatctatgttgccatgtagaaaaagtaaattgtctatttttttcagattctttgaaccttgcttattgatccagccaatttacataaagaacctattttaatataagcaacccagttctataaacctgtagttaacaataattcaaagatgtttttatctagtttttctatgtttccatagttcaatacaattatatgaaataaatatcccatgctgctgtaacccaatgtttcactgcagttccaaattattgagcatagggtgaattttcaaatttgaaatttttaatgactgtttagtgagaggtcacaaattacatcagtactgttttcaagtagtcatatataccgccccccaccaaaattaactgattacagaagaagtatattttacttatgaattagaagaggttcatttttttctaatcaagtgggtcctttccaatcatagagaacatggagctagcaaatgtgtggaaaactgcatcacgcttcatattaccacctcccacttcttttaaaatgaagggagaggacactaaacgtaggcaggattaggttctccaattcaattccaattcatatattaatctgatgatctgtgggttcctgaggcatctgagtgtggctcctatgatcaggaaagagacagttattccgtgggcaagttctggcgggtggaaaagaacaagcacggaccagagtgcttgtctttttgcattagcctttccctgaaagagtatcaagggaagagccaactggactagttatgttgtttatcaagagcagccaaatatttatatgcacatttaacccctagataatgcactatcacttaaatcaaatacaattataattcttacattgcacctgcctgcaaattcaaacttctgtattttgacacaattgcctctacttgtttatgcattaaggcctatagcatcaactaattcaagagtcattttgatgaccagaaagggaaattttttaataactaataactatgttggtatttgcaaagaggaccctcaaaagggctttcctaaggattcctacttatacataacttatacataactactttatctatctcacagctaaagaggcatgcatagtatttgtactaaattaaggcctgaaaatgttgatataaacagatatttcgggggatgatctgaccaaacaccaaccaggtagatatgcctgtgattgatgtgaactcaacaacctaaaggaacatgatgataatgtaaataaatgaagtggatagggaataaaatatggtaaaatgaagagtgtagtttttggcttcaggagtcagcagctgctaagctccagctaattgttgacatgttgaaacatgggtttggtattgacaaatcttctgatttttacacaaactgagaaatatggcaaggcgtaaaggtggtatgtctcaagaaaggtaagaagaacagatattggaaagagaaagagtgaaaaaagagaaattgaggcaaagatcatcaaggtgcctatagctggggaaaaggctcaggttcctgcaataagagacacaattttctattttcctttgacttcacacagttattgaagggcattagcttaactaatgatccagtgtccagttctagctacttatttcaaacacttgtatgctgtttcacaaggtgatgattcaattaatgatgagtaaatatataagtgaggccaacaaagctcatatactgaaagttaagttgtattcaaatacaaaataatctgaatgttagattccaagaactgtccaagtatagagaacaaggaaagttacttgaaaacataaataggttttcagtagaggctaaattcagatcaattcatgcaatgaaattttttatttgactctataaagttgattacttttattggttttactcacagtctgaatagattaacctcacttttaacccattagatatattatgctttatgttgaatttttgtaaacttcatcaattttttttttttttttaagtataaagacaggccgggcacagtgactcaagctgtaatcctagcactttgggaggccaaggctggcggatcacttgaggtcaggagtttgagaccagtctggttggcatggtgaaaccctgtctctactaaaaatacaaaaattagctgggcatggtggtgggtgactataacccaagctactcaggaggttgaggcaggagaattgcttgaactcggaagccaagatcgcaccactgcactccaacctgggtgatagagcaagactacatctcaataataataattaataataataataataatgtataaaaacaaatattttgcatacttttggttctacctttaggcctaaaagctagtcacactttgtaatgagattttgtgcatataaacattaacaagaacgctagttaattgcaaactcatgaagcgactgaacttacaagttatccattttgtaacatactcactatgtactcaccatgagccaggcactgatggaggctctaggacgtaatggaatatgtaaaagtttagagtaaaaggaaaggcagcaatgcaaaggtaatagaaaatgtcatgggtatgaaaagtgttaatggcagacaaagtaaaatttaaggtaagaattcaaggcaaacaggaacaaggcggcactcttttactaacaagtggtatgagctacaatccagatatgtgtcattgactatccaaagtcctgaattacatgacaaaaatatctaagcaaaaacttccaggaacaaaaggaatactaatcagaaacacaaaggcatgtggcacttttacaacctactcaaaacctgtcaaataatgcaaacaacaaaacagagggcattgatatgaataatttatcatataatttcatattactactaagtatacgtggaaatctaaaggagaggaagggaggtcattgtaataaagcagttattaatgaatttcaaaatgaaaagaaaactgtattgtactaaagtctgttttaaaaattattctctttctccttctttctttctattttcagcacttgctctgactttgtgttggccccattttctcctaccattactggattccaaactcctttgtctgtgccctactccccactgtgcatgtggttgataaatagctgttagccattagcatcacatctttcaactaagaagtagttgggtcatttccatgacccaagagttaaagtagatcacataacaggaatgagaatcaaaatgcaatcagctgttttaccagcaacagtgagaggtacaaggcagtaggtatgtaattctgagacatacaccatatgctcccaaaatattccaagaaaatggtttctatactaaatttatatgctcagccaactttctaatcatgtaaatgatcaatttcctttatgctatatttccaaatgtgcacatttacttcatgtgtatatttgtcaggaagatgttctgagatgatctccaccaaaatggagtagtgtgacaagagggagagttgggttaagggaattgaatattcattacaggagaaaagagaagaagtttccaagataatgataactggaattctgaagaggactcaacagacagataaataacttgttcagtttggagcaggaggacaaagtgctctggtagctaataccagatatcattttaaatggtatcaaaaggtttgtgacaatattaatttgaaaagtaagatgtaaaaatagagcgaaacagtgaggaaaaagttgtacaagaaaataaacataatactaatatgcagttcaactcagttatatagccaacgatagtagcataaaccctcggtagcaactggttatgtcactatactatattggttgcatggaagacagcaagtatgtgtggatgagagactgtaaggtatttaaatatatatcattcatattgtcttcagtggacaatatctaacattcaaaattttacaataagagcataagcctataatttagaaaaatggagatatataataatagaaaaaagctgaaagtgttgaaaaatatgatcactgagaagcacaaatttggttggatagggaaactaatgcttttcattataactttaaattttaaatttacctattttattctgagaaaaatattaaaatcattttgaaaagaggcatattttctgccaattccatcaaacagaaatacttcaggcaaagatcacatgtttaactcctctgaacactcactcagaccaggggtgaggattattgatcacagagaaactcattatatgtctgcatctgtgatctcaggagagaagagatcttttatcaaagacagcattaggtaggaaatgggaccatcaaactgacttttcagactactttaaaaagggatgcatgtaggtagaattttttaatatttaagaaaaaattctagcttcttaattatgaaatattaagcatggtatatttttgaagatttctaaatatatttagatgagtaaaatattctgtctgcagaaatttcatagaaagacttcaattcaaaatgtattttcatttaatttttgatttgattaattcaatttcaatgtatttcaaaattctacataaatgtttcccaaggccaaacatgtagaagtttagtatagaaccgtttgattttcaggttgacatgaaacagtaagtattgtactatgtcagagaattcttacactaaaaatagaatagccccaagaaaggaaaatatttcacagcgttagtgtcttccgctgaaaattaaattaatgcagtcactcttcacctgaaaattttagtaaagcacagttaagtggcttgcttgtgaacatgcgttctaatacttcctttcactgattacattcactacatttttaatgagaagaaaaagataagtgaggcttttcaacataagaactgtgaaaataaataatgttctcaaatatgtgacttaacaacgtcctactgataagcaaaccatcaaataagtgatggttcaagtctcttgtttcagtctttgttccattgtgagctgtaagacctcattcaatgtactggatctttctctgtcccagtttcaacatctgtagaaaagggataataatagtgcctgcatcataatatggctatgacagtttgatgaaataatatatgtatagtattaggacaatgcctcgcatataattaagcacaagctcactacttgttctcattattgttctttttttgacactatgtttctatttaatatgacatgctatttatgctttcttaaaacttaaccgagagataggtattttttattcattaaaaaattctaatgtgctgtgtagctcacttaatgctattcttttggaaagtattgaagattagctttcaagacttactgtctgatccagaagccgtcagtctggtgaaatattcagtgtatagaaaaagagaatggggcgactaggcagcagtcagcaattattacttagaagaaccaaattaaatgggctgatagttagaagaggaattttttccttttagggtatttctttaaaaatcatctggtttcatttccactagcctcattcttatacatactagaaaacacttggctttcaaagttgtgtttaggtacttgctattacaattgtggctgttcgtatggatacactcagctgtctcacctactttctttgttctctcactactgtctccactctgtccccgccattaccaccacaccaccaggacaagaacactagatgcctggctatgagaattgaagcacacctgccatttcatgtttgatcttttgggaaaatagatgcaatgtgctaattgaatagaaaataaaggataatggcatcttgaactgttaaaactgctaagaattttagaaagtatttgccaaggtctaaactccttattttatcattaaataaatggaccctaagaggaaaaataatttgcataagttttattagctagtaaatggagaaacaagaactagtctatacatcttttgacttcaaatttagcacaatttttttaaccatggtgcatgcctaagttgagacacttggcactgtgtttttgttttgcttaattttatcaaacataattaaaaaaaacacatattccccagaacagatatgactgaagccattaaaatgggtaaaatagctctgtcctgtgtgttttgctgcttaatcatatcctctggctacttcatctttttaagctcaagaaaatcactaatttagttaggtaaaaatgttgatgaaaggtccttctatgaatcagtaaatttttgtatcatgatttgccatatgtctttccattagcattccaaaataggtctaattatgcccaggctgagttttgtaatattaacatcatcatatgtttaagaaaagattatgctagacttgatcataagtctttttagttccttcccataagtgagattaatatctagtaatcacagcctacctttaaaaggacagaaatttcctaaaattactcaattacaatgttctgtattctttctaatatttctgtatcctgcattaaaactctattactttaatgacattgctttcaaataaacacctctaatttatcgatttaaacaaaacccattgcattgaatgtattcctgagaagggtgagaggtattatttactatccatcatgtactatttcatttcagtaggtgaacttagaacaaaaatagaaggacaagtaaggtgtcatcactgtctctagcaaagaaaatccatttctaagtctttcattagatatctttagaagacattgtaggtcttctatctatgagttagataacttctttttgtattacatttactctctttttttctaagtaaattgtaaaattagtgaatatcagtaacatacactactgaaaacaacatataaagaggaaaactcatcatttttgtcttacatattttaaagacaacttaccaatatgtgtcaaaggcagcacatatagcccctaaggctgtctctgcttacactcaaattatgcttgtctatggttgaaaacacctgctatagccctagcttatttctaatactattagatataagttagataatacaacaaacataaaaatgatagtaattaataataacagtaatggctgttactcattgatcaccaacaatgtgctgatatattttgtctctaataagtgaaatatacatgtaaagcagattttcttaacccttttttatagctatgggagctaaaacacaaggaggtaaagtactttcctacaagttccaatcaagcattgtctgaatttagagtagatactgtctgtatcccattttgcctttcttgacataaaataacactttgaacactctaagagcttagaggagagaagaatcaaaggagtagtaaagaaaggcatctgtggcaagtgagaacagcttcttacatactctcttctccccgccttctcatttttcacttttattcatattgacttatctcctttaattctttttacttttacaatcattgcacttttattttgcttttggcttgttatttatttccccattgggcttccaggacgtgaaactttcaacattattttactcaagtatttgtgttccttgtatccccacaaagctgcaaaccaacccagtggcagtggttggctcaaacggtaacacagtaggtaaagaggtaggcaaggaagtgggcagaactcttccttttatgattattatatcttccatttaaagaaaggtcaagatgacttgagctcttaagagggtttcttaaggtaaacaccaaggatttcttcgttaccctttaggtaagaaagacagtggaaggctttggcacaattgaattttctccttaatttctctcttaacttgcaagttaaatacatttttgtcattactctaagtgattccatttttcaataaggaatagctactctacattgtaaacctgtatctatcaagaggacaggatatataaggcacaggtcctttttttttttttttatgtttgtctgtttcttttttcttttgtgaaaataaactatgtatacagaaaagtacacaagttataagtctaggtgaattacagcaaagcaaacccacccatgtattcaccacccaggtcatgaaataaagccaagaaacttccttcttcctaatcattatcctggtgttcttttcaaaaattaatagtctatactcatagtcttctcttcaaagagtgatttcaagtaaaatgttttcacaaagtcagttttgccaaggagaattatgagtttttttagtgcacgtatgtatgtggcatcaaaacatggagcaagtacgtggcaataaatatgaacaagataggttgtgtcttgataattgcttaagctgagttgtgagcaaatggaggttcattacatcactcatctactttcagatgtatttcacaattagaattcccatgattataattataaaaatagcaaaaataacaaatatgacaattttatgttgtgagtctacatacatcagtaaaagttctatttagtcttaagtataacaattcactgctttacatctctatattttgcttatctcaagatccactttgtctggtatagtgtgctcattccacagtttttggctgtcctgggaacaacaatctagtgcaactccagcaatgtgagttatagtgcaaatgtcaaaccagagcagcatcaccatctagaggtcaaaatgataactgcaaactttctcacctttatgagccttccgtattctgtatacatagcagtttatgtgaatgtacagaaaataatgtttgctattgttttctctccagttgggtttccagaaagagatcatggcataaagcaggaaccacctgtatttacagatggcatagggaagcatacatcgcagagccatatatcagcagcactacagcatgtttcaaccaaagatgagcctcccacatgtcagacaaaccacctacattgggaccacagcagtgacagtgttttttagcacattcctgataatgaaatctatgttgaactcaacatgaatggcttttcctttctcttggcagtcaacagcctacaccattctgcatttgactgtttagtttattctcccctctggaaaggcatgactatggaaacagagtagaggatattttggggatttatgaaactattaatataatttactctcattgctgtgctttctacaaatattttccatccaaatcggagaaattattgacatagcaatgtgggagataaaatgccctattatttattataattaatattatttgtagtattaactattgaactattatttcaatatcaaaagttatgaagtagaaaatagaaaaccattggttaaacctaatggtttgtttttatttatttattcagtaaatgttgactgagctcctcttatgttctaaaaactatgagagaatcccttgcctgctagaagtcgataatctggagtgtctcagaaaatacatttaaagtacgatagaaagtcagtgataaagtacattctacttgaggaaataggaaaatacttcaagtataaagaatcatcttgaagaataaataaaaactgtcaagctgaaaatatggacaggaatattctagacagaacagaaaaagtgtgtgctaagaagattttaaagggcatggtttgttgaagtgagaagctgatgtagctacttgggaagagaaatagttgggactgtggctggaaacatagtcaggggttacgttagcaatgtccttgtatgccttactaagtagtttgggcttaaatctataagcagagtggacaacttaacattttttaacctgcaagtggaaagactgtatgtggttttaaaaagcctgtctgaggagagtatcaaagaataattggagaactgggagccatgagaaagtcaggaggtaccacaatagtccaaagaagagatgatgagtccttcagctaatgtagtctcgcctgaggtaaaattaatattggttggtacactttgatgtaataaagaaaaaaagagagaattgttaagatgtctctgagattcctaattaatgagcaggtggtaatatcattcagcacagcgcttattggcttatttcgacaaagaacatctttgtaggagattgatatgtttactttctcttaccattgtacagcgttaagtggggatgtctaatgcacaattggaaatgtaattctgaaattttagtgagctacgaaaatatagatatcgtatggtaatagagataatagattagcttattatagcagaatatgctcagtgaaaattaatgtgaacccaggggatatgatggagaagaaagaccatgccccacttccctggcaattttgtaggcctgattgttctatatcttaattatttgttgatattcaatctgtgacatgtaagttgctggaggaagtctgattcttgaggttaaagatatagttggatagaatatttcaactctttgaaaatttcaaatatatttttctaagaaatgcataaagagaagcagcctggagtacagcagttaggagtacagatttttaaaatttgtataaatatatgggttacaagtgtaattttgttacgtgcatagattgtatagtggtgaagtcagggctgttagagtacagatgctgaagccagagtccttgattagcccatcaaatagatgctatagcttgggtgacatatttaactttgcagtgctttggctttgtcacctaaaacgtggaggtaatagactgggagtggtggctcatgcctgtaatcccagcactttgggaggccaagacaggcggatcacgaggtcaggagatcgagaccatcctggctaacgcggtgaaaccctatctctactaaaaatacaaaaaaaattatccgggcatggtggcgggcgcctgtagtcccagctactccggaggctgaggtaggagaatggcatgaacccgggagggggagcttgtagtgagccgagatcacgtcactgcactccagcctgggcaacagagcaagactccatctcaaaaaaaaaaaaaaaaaaaaaaaaaacccgaaaatgtggaggcaataataatagtacatattgattgggaagttatgcctgggaagcaaaaaaaattcctataatacttagaatagtgtccagaagcaattaaatatcgtaacagtatttgctaaataaatactgattactttctttaaaattttccatagcatctatctacatgtgtgaaatgaatggaatcaagcctgaccttttcattgcaaaaaaacccataaggggtcacattttattggtttatttggacaatggttatctattgaaatcctggaatcatgaatgaatccaaaaaaatgttgacgtggatgattttgcatttttccattctaattttaactgtaagatatcttgccttttcaaatggttaaatatgtgttgatttgtgtttaatccatagaaaaggtcatagagaaaacatttacagttggaaatatccagacaaatcattgcaccatgtccccaagtggagcttgaagaatttaacatcacatgtgacaattccagtagcagtgagaaatgtcacttttcagtttgtcctaaaataatggcgacagtgaaaataagaagggaagtgtgtaaagaaatcttgatgcacagagggcttatttactatttcttattataacttgtaagtgattttgatttacttaaagctgaaagtcatatctattatttacttttaagactttgatactcaaagagttgtccttggaccaatagccttgacctcacctgggaacttcttaaaaatgtggaacttcaggcctcattcaagaacctccaaatcataatctgcattttaacaagattcacaatttgttgtataaatattaaaatttgagaaaaaataaatcagaaaatctagagattagcaacagatagataatagagttgctggagaatcaaaactaaacaaagaacctcactttccagctgtacttcactgaatttctgatataaacttacattataaatagcagacttctattccaaaaatatttattaaaagcctgttctatactagtcattgttctgggttctaaagatacagtggtgaagagactaggcaaagttatttatttatttttttatttattttgagatgaagtctcactctgtcgcccaagctggagtgcagtggcacgatgtcggctcactgccacctccacctcccgggttcaagcgattcttctgcctcagcctcctaagtagctgggattacaggcacgtgacaccatgcctggctaatttttatatttttaatagagacggggtttcatcatgttggccaggctggtctcgatctcctgacctcgtgatctgccagcctcggcctcccaaagtgctgggattccaggcgtgagccaccacgccgggctgacaaagttattttactccagctgttatcactcgattgtgctctgagagaggtagagaaaattcgtgtgtaagagtaagaatttcaagaagtagacttctctagacattgaatttttagaaaaccttctacatattcttttgttgtatagctttgcccagattcagtcattgctcagttccttttgatatactggagccagactgcctgggtttaaaagctcttttcctcaattctctcatctgaaaaaaaaaaaaaaaaaaatttctctgtcagaggattgttgtgaagatcaatggggccgaaatacacaaagttcacagggcaatgcctgacatataataagctccatgtaagtgtgagaaattgttactgttatggtagtgaaataaacatttcactagtacgtttctcttttctgagtatgattgttgagcgattagctcaagctttggcttatgtacaaattttcttatgaaatcagccaccagtggatcctgaagcatctcattagttaagctgtggcagttgctgactagatgttgatggagaagaccccattctccagattctgtcctggactgaaaacatgaacatgaaaatgctgacatcttaaccatgatacatttccttcatttttgcataatcagagataactttttcttttgttctctgcatagaagaaatatgtgtgcccatctaatttgctctgagccttgctcatgtctccatgctctttctccttaatctctgcttcctcagtatagtttattggtatatgagcaggtatttaattcttgcttaccttggttccttatcatgagttttagtaaaagtggtgactcttattcttttaaatagtataatactattcaatacctaacaggaatggtaaaagttaatgaacgatcatataatagtaagtgttcctaatagagattttgacatagaattttgtttcttttccaagtagaaatgggtatcaattaattcagattctttactgattctctgtgcattttgaatgcttatttcgggtgtatagtagacacaactgtatacatgctacttgtggtcagggattggcctttcagcccctttttttcctgccccacacccaactgtccactctgctactcaaagcacagcattttgtaacttacccctgtacccttgtctacatcggtggttcacaaactgtggtctgagaacaaaaccctttctgaaaatctgtgacatcaaactatttcgataacaccagggggttatttgcatttttcactcttttctcttatgagtatacagtgaagatttcaagaagctccatgacatgagataccacaacagattgaaagcagatggaagaatctacctgtcttctgttaagccatacaatatagaaattttaatgtcaaacaatgccaatcttctcaatactttttgactttcaaaataaggggtcttaatgacaattttttgtttatttgtttgttttgtttttgagacagagtctcgctgtcgcccaggctggagtgcagtggctccatctcggctcactacaagctccgcctcccgtgttcacgccattctcctgcctcagcctcccgagtagctgggactacaggcgcccggcaccacgcccggctaattttttgtatttttagtagagacggggtttcatcgtgttagccaggatggcctcgatctcctgacctcgcgatctgcccgtcttggcctcccaaagtgctgggattacaggcgtgagccaccgcgcctggccttaatgacaaattttacaggaccctttaatgagattgcttttatcagttaacaaaatgtaaatgttttcaaagatcttcattttaatatttaatacagtaaatatcattagattaaaaaccgtgctaaataaagcttttggggggtcatcaataatttttatgaatctaaagggattcaaaaaaatattagaaaacttctggtctgtaatattttcttggctgcttgggacaagagaaaagctggtgcatgccatgtcgtgacttctttctcacactctctgacaactctatgtcctttccaatactttgcctttgcaaagtggaagagaaggagaatgatagagggaacaaaagaaaatgtgacatgttatgtggattaaagtcttttttctagacaatgacatgccctgcagaatggctagcaatggcatgacattgtctgatatagtaaaataaatggagcagcatataaaactaattgtgatgagttttgtgatgtacttaaaataccctttctaaatttttattaaagtccaataacattgtgttgcataggcaaagaaactgaagccaggattgataatccaacttgctctgagtgactggcctgatagtgtccaaatcaagagtaagaactcaaatttccagcctctagttttattatattactatgtatcacataaaattcagtatctgcgtttttcagtaggacaaattatgacaatagttatatagaactctatgcataatgcaatttctcttaataaaagcctaacgtgaactaatagatctgaaaaggaacattgagaaaaatgtaaatctgtagctgacattggccaaaaatttgtataaaagattcaaatgcagctttcaaaacaacatatacaattctccctgtaatttggcaaattattccaacagcctgtaacactcttgatttggagcttctatgggggttataattacatctcaacttttaaaaccatatcattatccattcagtgaatagaatgcattgataaaaatcacagtatcccctagtgtacactaaaattgttaagcagaataatttatgcaaattacttatagagttaatgtatgttaaataggtttaattacactgcagaacttagttcgctgcagcacacacaattatttttaattataaaacagatattttcgagatttatgttcaacccattacactgccagttaatactgcttttcttccttgctttcagaaataaagaaaagagattaataatttgtgccaaaatcttcttgttactgaaaagcttaggtacattttaatgttagcattttttgagatttaaaagtgacaaaatgcttttgggccttatttaaaatatttacttattaccaagagttgggaaggaaattaacagaagaaacaacttaaagatgtaataatatttacaactggggagtaaaactgggggaataaagaagagaagagatgtaactgttttaattataagctcttctttactacatggcttataatcatatatgtattactttgcttaaaaaaattaaatgcacacatacatacaccatgttcacccacaatctttgcacctacatcttcccattattttaatttatgtagaaaggatggctgaacaatgaatattataatgttaacaatagatctcatgatataaataaaactaagaatttccaaatttttgaaaaaaatccttttgcattggtaccgttgttccacattgtgacattaggtattagacttgtaatatatatacacacataggcaaggaaaaaacaacttagccagtcacatttcaatagtaatattaaaacaaagatgtgaattctatggcaaagtatgagtttacaaatgacctttgcatactacagtataccaaccagcaaccatggaagatacacatgtttactaaataattatacagaaaacaatatacaacataatacaatatgcattacttagtgaagctcaaaatatatgattttagtggacttattttaatgatattaattttctatcaaatgaacaagcaattctgttgggcacaaaatgcaattatgttacagtataatatttcagattaaaaactttatatatatatgtgtacttttcttaagatggtgtatactgagctaatagtagaatataataatcaaattaaacacaggatatctttttctaactctaaatttttcagacagtttgctattttgaatgtgatgctaagagacataaatctttcaaatttaattcattgacattgcagctatttaataaaaaagtttcataaatactagggtgccaaactaaagtaaatatactgtctaatatttgtaattagatgttaaaacaaagattgcttcattgatcaatgaaattataataccctataagatgtaaaattcagaataattaataaaacttacacattatttatttgctatctttattcccaaataggttcaccatgcattaaatttatgctaattagcatgattaaagatgcttagttctgtatttgaagaatttctggacaaaagtattatcttttgatgaagacaaaacactgttaattcattatgtagaatctcattatctcaccatgctatttttcatagatacataatatatgtacatatttgtggataaatatgataatatgataccttagataatcagatcagggttttgtcctctatcagatatgtagctttcttgcattttaaatattagtcttctgatgaggttgtctcatccaagtattgagcacagtagttagtgcttttgactatggagtacctggagatatatcattattgctattttatcaatttggtcaatattgctttagcttggaatatttctttagcttggaatagccatctgatttctgtttatataattctttttctttaatacagtaccaaaaagtccccagtgacctcatgggttttgatcacaaggcattttaatgtcagggaaaattattcacatcattgcatatacttagtgcctattccggcactttatgcatagtcgttgtttttaaattatttgaaaagcatctccagctgctctgcctatggagtagccattcttttgtttctttaattctctaacaaacttgttttcactttaaagaaacaaaaatatctaaactttcctaccagcacaaaaggatataataatgctaatattaaaccagtatgttttcagcatttactatgtgccaagttctgctctaagcactttgcatacgtattagctgatttattattcacaactccaccatgtaaatgctaatcttattccattttactggcactgaacagaggttaaatagtttgctgtttgacatgcatcaagtaaaagccaagtcctgaaatcaaggcattgaacactagaattcattctgaataatagtgccaattattatcaaggaacgaatccaagtgaaaatagttttttctagtaaagagtgctcaaaaatgtagttttgtgatggttaaatcaaatcaaacacagaaaaatctaatataaacacacccttaagcagtgttctcaaaaatacctggtgtacagtgcttcagtacataaaatgatctagggggtctaggagaaatagatgaggatttatgtttctgttatatttgctagttcttcttttcttattttttggagtgttttctgctttgttttaaagacataaacactaatataatttagtagtatatttacatcatttataagtgaaagtgaatagtacacaaatattggtggtgcctatattctttttaaaactgttcttatgggccgggcgtggtggctcacacttgtaatcccagcactttgggaggccgaggtgggtggatcacctgaggtcaggagtttgagaccatcctgaccaacatggtgaaacccccgtctctactaaaaaaacaaaaattagccgggcatggtggcaggcagctgtaatcccagctactcagaaggctgaggcaggagaaccccttgaacttgggagacagaggtttctgtaagctgaaatagtgccactgcactacaacgtggcgacagagtgagactctgtctcaaaaaaaaagaaaaaagaaaaaaaacatttttatgaatacatgagccataatgtttggaaaaccactactcacaatttaggaaaaaataagatttaaggtaaaaacgcattatgttcatctctgcaactgtagttatgtatcctttttctgagtcttcctttctgcataatgggaatattaagtgcctatatagttttatttaacaatgacagaataagtgaaatttgtgtaaattttaaaagtatacaaccctacagaacaattattcaaatatcactggacagcattttcaaatatcattttgagtatatagaacaaaccaatttgagagaaatatctattcagtgagtcttatgtatcccttcatggtaaagtcatcagattgacctttggcatgggcagcatggaacagacaattcctgatagataaataatctccttgaggcactgtcttcaccactttacttcttgttgctaatatttctgaagtgtatgaataggcttttaggaagccacactagcctgtggccaggcagttcagagcttggttgatacaaacaaaacaaatacctgaaaaaaaaaaaaggcaattttctcttttatttaaagctccctcaaaaccctgacaaccaaaaatggaaatcaaatgaactaaaaatttggaatgttatgttaatatattcgcttaatagatattaatattttaagtccatatcattcccagtgtacatctcagtgtactctctaatacgactttagattttaacttagtagacacaatcattaaatttctactgacaatatttacctagattttaacatctcaaattcgcatactagttaaaatgagtagtatatcatagtgtttctttcatactctatgttttaagtatatatttaaaggattgaaatatagcagcggccggccgcggtggctcacgcctgtaatcccagcgctttgggaggccgaggtgggcggatcacctgaggtcgggagttcaagatcaccctgaccaacatggtgaaaccccgtctctactaaaaatacaaaattagccggacatggtcgtgcatgcctgtaatcccagctactctggaggctgaggaaggagaatcgcttgaacccaggaggcggaggttgcattgagctgagatcgtgccgttgcactccagtctaggcaataagagtgagactccgtctcaaaaaaaaaaaaaaaagaaaagaaatatagcagtattttctaaagtgtcgtctatagaacagaagttctataagctctcaattgttaacaaaacattccatggtgcaatatgttttaaaaatataacagttcacattagcaaagtattgaacctgggaagtctgagtaccttgagtagttcccaaatttagttgaccaaaaatagcattttgagttttgcttgcttgctaatatcccaagaagacaaatttcacacaatgctctattaaataccaagatacatattttgcctcatacgtttcttaataacttaaattatatgaaaaaaactttgaagtaaatgtcaaaattttgtagaattttacatctagctcaaaataactgagctattttgccagaataaaatttgccaaagtagaaatatataatgatttacaattctaagaaatttattttctgaataatttatttaagagaaataatacatttataagccttgcatgaggaagtatacatctatttagcaaatacaatgtaaaaattgattttagcatattttcatcaaggacaatgggacacatgctgaagtcagaggaaagtaccatgagcacatgcaaaattatgatatgtactagacacacaaagcacgtacggcacacatccttctcatgtctttccttctctccattagaactgtcagatgcatttcccatgccacagtaaaaaatgacatgaagatggaagtgacaaaagaaatgaagatataacgtcaccctagcagtagcctcatgtttcatcagtgtcctcatataatccttctagtaatatgacagataaggtattttaaaacaagttcttaatacaaactgaatagaagataaaattgctaagtaaaatacaataaacattcttgtaaaagcatatttgagagtcaaagaacttaaggaaaatctctaggggcaaatactacgatgaggtaggaatcaaatgtgactgtcttgtgcacatttattaaaaaccggaaaccaagaggcttcattcataaaagtgatgaagaggacaagattggaatttgggaatttgaacctaaagttgattgattctcttagccttttaacagtcagaaattagaaaatcctaaatgtattttgctgaaatgtctatcaatatttgatatacatagagataaaagataaatagaagatgtatagcaacaaatgtttatcattaaatggattctgcaaaggtaaagctaagcaaattgcaaaagcattcataatggatgatcccagttgtattaaaatatgctggacaatgttatctattgtttagggatatttgtatatgtaggaagagcatgaaaattgcaattaccgattaaatggctagtacttgagagggtaggaggataatgtattttggaagtgcaatacagtggatttaaattttattgataatattccatatttaaactaggttttgagtgcatggaagttcactatattattctttatgtctttcttatgcttcagttatttaataagtaaaaaatttactcaattgatttttttatgggtgaattcctttggagattcctaatgacttatttaattttaatagttattggttgtgttttgtggtagttttccaaagcaacatggaaaaaattttaccaagccatattttctaataaattattccaacgccttttttttggacatgagtttaaagttaatgaatagggtttaaattatattttggtgtacggttgttaaaaactttaaattcattttaaagagcttgctctcattttgtgagggatagtcttgatttttaaacagtgtaagattattttgactctctaatcttatttgcagtctttaagagactctatattaaaaacttgtaactcttctgctgaaaatttttactcatcctctctatacctccaaatcctctcttctcccatgcagaggttggcaggagtggtaagaaatgttgtattcttgagaacagaatatattagaattaaaatagttcttattataatgatgtgaacaaagtattcaattaatattgatgactgaaaagtgctgttaggaagtggaataaacaaactctgaaatagtcaaatgccaggaaaaggaaaagcattagattttgtccttagtggttccattcttatcctaggaccattattgtaagtttttcacagaggatgtgttttttgtaagaacattaggactacctcaacaccattaatatgaccacaacttcacctctgaaatcctaattttaagggagaaataaattcaaatataaagttgtgatttagccgagtatatagagatgattattttaaagaagattattctattttgaattcaggtaaactagctggtaagttgtttgaaaatttgattttctggtaattttaagggacttgttaaaaggcaaattaccatatataccttgcctcacatacataccctctgtggcttatcaatttcatgagtatttcactcaaccaaaaactgttgaatataagttaatatttattttatgattaaaaaaccacctaaaggtattgcagcatttaggaatcagtattatgcttaaagaggggcagagaggtgagagttaatgaggatttctctagataaaatcctgcataaaaaagattttagcctattttgcagattgtacttacctttagtcatttacacaacagatttaaatattatagtgagtatatagagcaatagaaatataaccacttcatcattgaataatcaaatagtaatagatagtaagaaaggcttgtatccaacacctcaaaatgcttgaacaagcaatacattcaattacctatgctcttggaattataaataaacatgcttatgcatatatagctatttctccttctgatctatatttcattactttgaccttacatgtaagacaattgtgtgtttcatatgcaagacctcaactgctctgtctgcaaaggtgatgtaaaatttctacttgaatagcaataaatcatgttaattcagccttagtcaaacaaaatgtgttagagaggatggaagaagaataggaatgagaatggtcaaaacattcaatcgagtataagaatctgcccaattgaagtgatgtactaatattgagtcaagtacttctagcgatgaaacaaggacccagatcagcaggagtgtttgtataattaaaataatccattgatattaaaacaggataaagtaattttatgtattttgattttagtacagtgatttcttaaaaatccagtgaagaaaactcaatttagtttcaaaaatgaggtgaaaatgaactgcctgccaaaggttaatgagataaatatgatttgctttagaactacaagcagagtccagagattggtgaataagaagccactttattcagttctctttccaccacttgtggttctcaaaatgaagcttaatgaaataggatttacctatcaatgcctccacagttaattggcatacatagctaatactgactcaaaactcggtctgtttttagggcacattttcctaaggaggtttgctaacacatctatgcccatctccatttgtgacccatcccctttcactatcaaagtaccatcatttgggaaatgaatgtgtctattatgttctaggcctctacattttcctgcgttttcaaattttcattcctcaaaaagcttaggaaattaagaaacagagaaaaagtttacatttttttttctagtgcaaatgtgataaaagattttaggaaccctctctgtcattaaaaaaaaaaaaaagttagaattaaaatatgagaggtactaacctctgattgcccagtattatttcttggataaattatagcttttgatcctctgtttcccacagctaaaagctaagggttccagctatgattgactccaacgtggctatttagcagtcagtaatcacttcatgactccaatacaatatattttcttaatggtgagtaagaggtcccatttgaacaaatccattcccttttctacaaagaagatgtgtgtatgtgactcttaatcactatcaaagtgtaattgggcagtaaaagaaacagattggttagtgtcgaccatatgataggcaatgtgtggagccaggaaaagacagggttcagctattttaaacatgttcaatacttagtcaactcattatccacataaatggagggcgacagtaatttagataatccacgatagtagatgattaaaaaaaaatttacaactgagtttgcaagcatatttttcttcaacacatttgtcacaactctcttttaatgcttaatgcctcaaattttacaattctttaacactttataaagtgactttatgtatcatgacttctctttttggtatcttcctagtgaacctccttttgtgtatcttagctcaaatgccatctccctaaaactgacctttggctcctttcttcagtattatacccatctcttctctgctattatcatagctcactgtactttcttttttatatcatcaccattttatgactctaaggaattacgatgtctttccacctatcctgtaaactccataaggccaaacacctgtctctttgttcatagctgtatcccaccacgctcaatatttggtgagcacattctaagtgcacgatgaccattagctttatgatggaatgtagaaatcaatgcatggatgaatttaatcctaattattgttttgagaggttgtgcagaagcctttattatctttttatatacagtgtaatacagtatagactgttttggcagatggcccatttgaccactaaccaagatcctgatcttagaaaattacttatcttttggcacctctgtttcatcatctgtaaaatagaaataatgacaatatgttttgtatattgtaatgaggattaaatgacaaaatatatgtaaaaagcttagcagagagactcaaagtaaatgcttaattttttttgattttataaaataattgtatactattaataataagtaaaatgaaatctggaaagattaagtgagccaccctaaagtatattatatcaaataaatatcatgtaaaataaaggtaatatttagataacagaattgtttagaatgactatttacaagataaattgacttggtctttaaagtttcttcttatagttcccttgactatattttgacaacaaaaagagagtctttgctaattaatgcctgaaacatttaaaaactgataaggcctctatgctgcatctttcttaagatataatccagggtgctgagaagaaaaaaaaacatgtatactctgcacaccaatgaaatgggtctatattaattagtgaagtattgtctaatcaatagtgtcacatagacttttctagtctgtgaacttatattgtcctccaaggtaatttgaccaatccagctgccttgataggcattgctgtttctctttcaattatttaaaacaaaaaggatcccggctgggcacagtggctcatgcctgtaatcccagcactttgggggacgaggtgggccgaccacctgaggtcaggagttcgagacctacctggccaatatggtgaaaccctgtctctattaaaaatacaaaaaattagctggggatggtggcatgcacctgtaagatattcatgggtacttagaattatcatgtggacttctttgtgatgcaattattcagcctaccaaaggtgatttttaaaatttgtttttatttttaatgattatttttaaattaagcctaaattcaacagatattatgaaatgaaaatgacctttttatactttttttcatgtattcacacagtcaaaattaattttaacttaaagacctattcaaatgacactctaaaaaatactgagggacatggaaacaaatccacaggacatcaaatagagaggtttatgtatatgcatttttgtgtatgtgtctgtgcatatttcctatttagtaacttgtttatttaggtatgacagatgggaacataggccacaatgttaactggaataatttatctgcaggggcagtaattacagctagaaaatatgtatgaatgtgtgtttgtgtgcgtgtttgtgtgcatatgtcaatcaaggaaaatgatccaggcaggtctcattttaggaggtttatttgccaaagttaaggatgccccccaccccccaccccactggagacaggtctatgactttccccaaagatgattttgagggcttcaaatttaaaggggaaaggacaggatgttgagaaatacacagttatcatgtgagattgcagtaggggagaatattaatggcttcgtcctgctcagtgagtctgaatttttatataatataacatagacaataaggcagaggaaacaatcagatatgcatttgtttcaggtgtgcagagggatgactctgagttctgtcctatgtcccctgtacctgcaaagataattgataggttgatcaattacactgccatggtgaactttgacagataagcttgaaggtaaaaatcttggggcacacaaggagtttacttgtgggcaaaatgttagggaggtatatagcttttcatctttgtagccatcttatttagggatcaaaatagcaggcaggcttgcgtgaccaagttcccagctggacttttccttttagcttagtgagtttaaggtcccaatatttattttcctttcacacatatatcgaagttccgtaatagcgttttactcacattattagaaaaactttacaagatttttaaaatgaaataacgtaacaaatgttatatgcaaacaggggaggtaaactttttttcatttttcaatagcatatactaaaaggtacatttttaatacagagaagacaagttttatgctttatctgaccaagggaatattactcagaagaattcagaggctgcatccttgcttagagggaaggagttttgactgagtgttgatgtgcaccacgtaaggggcagtgttttaccgcttgcagcatatgcttgtcaaccctgttttaaatcattttggttgtttttgtccctctaaatgctgttttctaacattcattttacctaaaattaaacagcactcttagaaacttagataacaacatttcatattgagaaagtagatcattggcataggtgaatggatattttagagtttatagttagaagctctgaccaatcctaacattgccttaaaaaaagtaatcctacgtaagccaggaaggataactgggaaggagagaggaagagaagttgattaatgggtacaaatataaggtttgacataaaataagatttagtgcttgatagataaatagtgtgactatagttcacaagaatctattgtacattttgtttttttagacgaagtcttgctctgcttcccaggctggagtgcagtggcatgatctcgggtcactgcagccaccacctcctgggttcaagcgattctccctgcctcagcctcctgaatagcagggactccaggcacatgcaccacgctgggctaatttttgtatttttagtagagataggttttccctatgttggccaggctggtctcaaactcctgacctcagatgatcctcctgcctcggcctcccaaagtgcttggattacaggcgtgagccactgctcacagcctattgtacatttcaaaatagctagcaaataataattagaatgtttccagcataaagacaaatagctggccgggtgcagtgactcacgcctgtaatctcagcactttgggaggctgaggtgggtggtcacctgaggttgggaattcgagactagcctgaccaacatggagaaaccccgtctctactaaaaatgtaaaaattagccgggtgtagtggcagacacctgtaatcccagctacttgggaggctgaggcaggagaattgcttgaacccagggggcagaggttgcagtgagccgagattgtgccgttgcactccagcctgggcaataagagcaaaactccatctcaaaaaaaaaaaaaaaaaagacaaatagctaagatgatggacattccatctttacaaatcatacaaagtatgctagtgaattaaattatcacatatacctgaaactatgtacatctattatgcatcaacaaaaattttatttacaaagaaataatttgagaggaaaaatacatggaggaaaaacaaaatatgctcatagaggcaggactagttctggactagccccattgaataacagtggcagacaatgaagtgtaaagagaggaatgagaaaagaagagtagagaaagacaactgggtgtgtggtggagatctgggctgatgagagtgaaatttcagggagttaggaggggaggtgtgccttatagtaaggacagaaaagataatttttattttttttcccatggtctagcatgtggccacctgaaagataaaagtatttaaacatttggtttattgtaatgacatcataattatgcagctcataaaactataattctttattgcaagatttctaacaaattgataattagacagatggatagatctaagattactcagagctatgacccttgctgtaaggcctatgacaaatcacatgttctgtgaaattacattacctcttgctttcagacccacacctgtgcaaacttttccacccattcacttcagtaaatgtaacacaagtacaggaaaacaagatatcctctctcattaccagatcagtttacaggcatggggaaaagatgctgtcaaatattatctacaactcgaatctgaggtcactgaccttagaatggaaaaagataatgcctcatcatgaatgtttaaaaaatctacctatgcaaacatactttatattttctggaattctaatatcacttgcagtttagaataaaacataatcttatgaaactatagcacatgaatagttttttgatattaaattattaaattactgtatcatatattcttatataatttttcagtctttattttgtcctcctcatactttatgtgtcaattttcaattcctaaacattctgaacctcctagttgattgattcatttattaaggcatttaaaacatgaattgaagcctcaaaatgaaccaggtgtcatgttcattcctggacataacaaggtcaataagacatatattttgctttcaaggaacacaggttcttgttttggatgacattaagagctagggaatatgttttgcttctaattcttttcatagacttctaccaatttttacatggaaacatttacttaagcattttgagcttagaatcctattaatttcaaatactatcactgcttgtactgttttaaattgtgtttcaatataattgcttaaattccatatattttctgtgttgtcatatatgaaagaggttaaatgattgatattggttattagaggactgcaaatcaaaaccgcaatgaaataccatctcacatcagttagaatggcgatcattaaaaagtcaggaaacaacagatgctggagaggatgtggagaaataggaatgcttttacactgttggtgggagtgtaaattacttcaagcatgtggaagacatgtggcgattgttcaaggatccagaaccagaaataccatttgactcagcaatcccattactgggattatacccaaaggattacaaatcattctactataaagacatatgcacacgtatgtgttttgcaacactgttcacaatagcaaagacttggaaccaacacaaatgtccatcaatgatagactggaaaaagaaaatgtggcacatatacaccgtggaatactgtgtagccacaaaaaggatgagttcatgtcctttgcagggacatggatgaagctagaaaccatcattctcagcaaactaacataagaacagaaaaccaaacaccgcatgttctcactcataagtgggagtagaacaatgagaacaaatgggcaggtggagaggaacctcacacactggggcatgtggggggtggggggctaggggagggataggattaggagaaatatctaatgtagatgacaggttgatgggtgcagcaaaccacgatggcatgtgtatacctatgtaacaaacctgccatatatcccagaacttaaagtataataacaaaatttaaaaaaagaaaaaatgttcactataaatttatgaaaatatatttccatgtgtaaattgaggttgtctgaaatattatttaaaatttataattttgattattttgaattttgataattttgaatttgcccagtaaatattgaccacttgcaatgaatcagatgcaatggtgggtgattggaattcatcagcataccaaaaagataagtcttttttagccatagtcttcaccaagtttccattctatgatggggagaaaggatttaatgctcagaaagataaaattacattattatagtataataggagatttatatgattttagatttataatagcatctaaaatgaataacataaatatgagacaacagagaaagcaaggcatgagaaaattatttatttgattctgattttggtttgctttttgaaaaagtgtataactccaataacagacaaacagagaaccaaatcatgcgtgaactcccattcagaattgctacaaagtgaataaaatacctaggtatccaacttaccagggatgtgaaggaccaatgagaactacaaaccactgctcaatgaaataaaagagggcacaaacaaatggaagaacattccatgctcatggataggaagaatcaatatcgtgaaaatggccatactacccaaggtaatttatagattcaatgccatcctcatcaagctaccaaagactttcttcacagaattggaaaaaaactactttaaagtttgtatgaaaccaaaaaagagcctacattgccaagacaatcctaagcaaaaagaaacaaagctggaggcatcatgctacctgacttcaagctatactacaagactacagtaaccaaaacagcatggtgctggtaccaaaacagacatatagaccaatggaacagaacagaggcctcagaaataacaccacacatctacaaccatctgatgtatgacaaacctgacaaaaacaagaaatggagaaaggattctctattcaataaatggtgctgggaaaactggctagccatatgtagaaagatgaaactggatcccttccttacaccttatacaaaaattaattcaagatggattaaagacttaaatgtaagacctaaaaccataaaaaccctagaagaaaacctaggcaataccattcaggacataggcatgggcaaggacttcatgtctaaaacaccaaaagcaatggcaacaaaagccaaaatagacaaatgggatctaattaaactaaagagcttctgcacagcaaaaaaaaaaaaaaaaaaaaaaaaaaaaactaccatcagaatgaacaggcaacctacagaatgggagaaaaattttgcaatccacccatctgacaaagagctaatatccagaatctacgaagagctcaaacaaatttacaagaaaacgaagagctcaaacaaatttacaagaaaaaaacaaacaaccccatcaaaaagtgggcaaaggatatgaacagacacttctcaaaagaagacatttatgcagccaacagacacatgaaaataatgctcatcatcactggccatcagagaaatgcaaatgaaaaccacagtgagataacatcttactccagttagaatggcaatcactaaaaagtcaggaaacaacagatgctggagatgttgtggagaaatagaaacactttttcactgttggtgggactgtaaattagttcaatcatgtggaagacattgtggcgattcctcaaggacctagaacaagaaataccatttgacccagcaatcccgttactgggtatatacccaaaggattataaatcatgctactataaagacacatgcacatatatgtatattgcagcactattcacaacagcaaagacttggaaccaaccagaatgtccatcaatgacagactggattaagaaaatttggcacatatacaccatggaatataatgcagccataaaaaaggatgagttcatgtcctttgcagggacatggatgaagctggaaaccatcattctcagcaaactaacacaggaacagaaaaccaaacatcgcacgttctcactcataggtgggaagtgaataaggagatcacctggacacagggtgaggaacatcacacaacagggcctgtcagggggtcgggggctgggggagggatagcattaggagaaatacctaatgtaaatgaggaattgatgtgtgcaacaaaccaacatggcacatgtgtacctaggtatcaaaactgcacgttgtgcacatgtaccctagaacttaaagtataaaaaataaaaagtgtgtaacaaacaagaggtatggaggtcaggctatttaaatggagaagatactttatatttaaacagtcattttcagaaatccaacctttttagtttgttcattcaaaacatttatttaatctctggatggacatatgctggtaagtagataatatagaggaagaaaacacacaagcacattatttatcttaatggaatttacagtccaagggattgcttaacttactttgctttagtctctgaatggcttatattcattcaatagttatacaggtatatgctggaatttattacatataaaacaccacatggaatagaaggtgcggaaaattaagaacaataaaataatatactctaagtaagtgtatttatacatttgaggacaatactttgactctttatttttagattaattcaaataatttaccatgaaatatcgatcctgttgtgttttctagtgtataattagttgttatataaatttttctattgctacaaagattcagtaacagtcatcgttctttacaatgttgatacatttatcatatctgaattaagacatgttttatcctaaatgtatagaaatgtaaaaaggcaggcaatagtattgaagtttttagagctattagagtgcttatttacaaacatgttaaatttcttctatattctatttgattaaaaatgcttactataatcttgaataagcaaagtaaacaagtgaagaggatttgttacctataagtgacacaggccagtatcaagggcgcactcatgatgtggacaggagtcaatacgatctgatgatcttccagtgaaatgaaagtgaagtccatactaattagcttatgaatcagattgatactcaagtttctttgggccaaaaagactacctactgtcaagcaatcaagtgctatccctttaattgcaatttattccaagaaccacaatttattgatcctagcatacacttaagccacagcagtatcattatttgactttattttaacagcttcaaaaggttagaaagctagaaaccactgtgaaagataccattaaaaagttgagttgctaagattgcttaacactctatgctgagtaatattaacaatacatatggaactacataaaaggagaggggaaaaaagaattaatattacttaggaactcaatatcagctggtgctttctatatcaaatatcctttaataataacaaacaaatgaaaagaagaccaaattgctattttcattttacagataagcagcagtttagagaggttttgtaaatagcccagaactataatgttacaatgttaaaaccatctatcaactctaaagccacatgtttcatttcttacatgatttcttgcataatttttgcatactgaccattctacaatactgtggccatcttgacacatgcttaacaatattgaaagtgtgaagacataactcatccatatgaattttgcacccaatattatctttgaaacgcaaaacattaatgtctgatcactctaatttgtttgctatattatcttttatgagccacatttttttctttattcaatcattaaagttgtataatttcactttataattttcagctaattagacaatgtactcagcacaattcttggagcttcaaaggctatttttctttaggtaatattctgtgactatagtggcctagcgtttggcatttcttgtatgtactttctgagtaagccttagtaactgattaagtgttacaatttttcatgaatctgctgttaaccatggacaaatcaataccgaaagttggaggtcctagattttctccttgtattattcagaacaactctgcttttaatgctttcagtttttgtacttccatacaattttattcacagaatgaagaaaccaatacttttaaaaattaatgtaaaataatggatctagcccaatgtcctcatttttgcaggtgaagaagtgaagaatcaaggaagtaaaggacctgtctcaaagtcacacaactagtaagtaatatctgtgaactagaaatagataataagaaactgaattctatccattgcataataatagcttctcatttgagaaataatatttaaaacatgaaaccatgttcttatccctgcttaaatcacatatggtcagtgcactaatggtgtgccacctggatttagtcttgctatacactttggagaaatcttcaaagtgaattatggaatcttctgacagtattgctcatgagatgttggcatccatttgaggactttccatgtcctagattcttaatgtgaatcatcttatttaatcctcacaaaaatattgtaagaaaaatggttttatttctgttgtagaaagaaattaaggctctaggatggttggtagtttatccaaatatgtagggctatttaatatctgagctagtttttaattctgaatatttctgactttgaagatgttcacctttggcatcatacaattttgtacttaaaccaaaaacaaaaaacaaaaagagaccaatacaaatagtatataatctcacactggtgtgatatagccagctgtgtgatacagtgcatagttcaaggtgctaagagaaaactaaatcgtgacagatccacttgggttgaccctgtatatgctgtaaagattggtatgcttttgctattgactcccagctagcaattctttgaaaactggtcgctatgagaacattacatataatgatatttgtaaacatggggaaaaacattgacaacaaatgtacataaccgtatcacaggtagacattgagaacttgtccagataatgtggaatgagcatttagaagacagaggctactttaactcttgtagtatgaaataattattgaacaagtaattagcatttttttggatgagatgtatttatgtggagttatataaaatcattttctttagagaggagagtatgaacagaaacctgaaggtggaaataaatagggatatattgtcaatatggcatatgctaaatcaaagaatatagttatgaagaataaggtgttatttcagaaggttggagtgggatttgttgatggaagcttttgaagctcaattttcaaaattatatttttactttataaacaaggagatattgaaggtgttgttttgttattattgttgtttgttggttctaatctgtacattgctatcatcagagcaatgtggggagtgaaaaaataatgagaccaaggtttcctgttaatctcttaaagataacaggacttctccccacaccattagctgtaatcacccgggtttctatagcaactttgaggaggtcccaatatccattttcatcccaaatgcccttttcttcataagtattggtagaatgaataaattccctttctatcttgccgatccatcttgaaaatccctgtcaagtaagggagagaatagatatcatgatagctttttattatcctggaatctcatttcttccaagataagaagtctttcagagtgaaaatgctttttgtgctttgaagattcctgtttaccttaaatttgcacttcagatgaagggaaggaaaagtaagggatgcttacttttctcttgaagagcaaaacaaacaggaagaaggtgtgttatgctaaagcattttgattgtataacaaaagaacaacaatgaaaaagcctttatgcaaattaagactgatttagttcctaaaatgtcaactgcatggttgtaacacttatagaagaaagtggtctgaaaattttctgccctaatgttagatgaccaatatcaacttctctcctaatgaggattcctttttaatcttcaggactctcctcattttacaaaccttcttccaggacttacatgtatccactaataaagctaaacaataccacctggatactctgctgcttattgtctatgatcttgcaagtaatgacagctgaactctgaacaatttactttgttcttgctcagttgaatttatatccatgaatctttcttctgtgttggaatttttttttttgtctacattatatttatgaccccaggtcctctttagcaatgtactctatttaatttatattcatttatcctataagctatatatctgctaagcttatccattctatattgaatctctcctcactttcttagagaaaaatatgtattttttttctcctgttccaaacatgggctatctctctcaaaagcaatgcctttgccattagagttctttttgctaagtcaatacatattaacagttttgagcttctaagaaagcagcactttgacgtaggacctattcaagtaaattctatatataaggtttgacatttcctttagccaggtatttgcaataaaaagatgagtacagtttggggtgggaaagaaagataacactacacctttatctatagatgtgataaaagtcaaaataggccaaccttgtggggttttgggatgaacactgaatacccacagtatgtgctgggcacacaaaaaattatttgttgaaatgcattattggcttgtaactgacaggtcttttgtcagtttcatttgtctgcgtgtggaaggactatcagttgaaagttatattggtatggatagaaatcgagcattaaatttcaggcaactgtctcaggaatcagtcctctgcttgctagaatgttactcattagcagaaaaggtgaggctgtgcaggcactgagctatagcacttactatacatgactcctggtagccaattgtgctgagaactggcaatgaacatggtttctcagcactgtttcctaacataactttgatactgctagcaagacccagtggtattccatatataatctttttatgcattttcagttggtctttggactcaaaatagaatgaagctcatatgatatgaataaacttacttcatgactctttaatacctgatatggagaaatgagtgaaaaagtttgcgtttttcccaacaagataaatttaaaaaaaattttatattaggaaagtgttaagaaaatgcaattgctgaaaacgtattttaacataaaagatataatatgggaaacagcttggcaaggagatcaaaagcatggattctgaaaaaaatgttatacgggtaaaattgtgggttccaccatttgctatttgtataatcttgaagaagttttcaaatgtttctgagcctcagttcccgcacctgtaaaaatgtctacctcatagactggctctaagtgttaattaagttaatgcaggtaaagttcctgacacataagtataaataagatttagttttgagtattacaaaagagttttatgacttaagcattgttttaattacatataaaactgttggtttttttaaattcccaaattgcaaaggaaaaaaatgcatgagtgaatatacaaaatattgttttgtattaaagtttgttagagcacaacctccatatgttaaaatgttatgcatttctttaggacctattaaactatactatctctgttttgttcacataaatttcctattcagatgcatgaaaagtggagagatagatatgattctttgaaactatatctaaatccatttggtataaatcaggaagagcaaagtgtgctacgttgaatagcatatctgtatcttgtatctatatatacatgtatactcaccctttaacattttatttggaatttattataaaatgtgtacatatataataatgagggggaaaattctgtttcataaatggtgtttgcaaaagtgatttaaagtaatttaatacaatattttccacacatttaataaaccaaaattgggccactcgattttagaactataaagttgaaaaggaaagtttttgttgtcttttttgtttgtttttttagaaattaaataagcaaggttgtgtagatgccagtatttgctgaagttgctgcagtcgcaaactaactcaccttgtctagtttgtcagatggctccttgactacgaccttgaatggatattctccattcagaatttcctgggctatttatttcttcattgcacatctggaaccatttcatctctgtctatagagaatgactttagtccctaaatccaacttccaaagctccagttttccttcacagtctagttctagtagtattttccagatttcattactggtctaataccctagtccctgtgtccccttagtattttgttttagatatagctctttatagtttctgccgattgttatttgtcgacttttttgtctcccctcctcgattttttttattcattctttttattttcaaccttccaaccatctaggacagacataaatattacctagacctaatattcttggctactggagattttatcatgagtggaagttggattttgtcaaatcctttttctggatctattggtattattatgttattttctgatttattctatgcttgctaatcctggctcttttcatattattttttatttgtgactgaattctggcaaatgcaaaataggcaaaattatgtgaaccattttctggcccacaaaaaactcccacccataatcctcatgctcgtttccttccggtagtcactttaggagccacacaaaactggtattctccttctgcttactaattctcttccacccaaattctgagattcagcctttctgaatctcaggtaagtctttcacttatttagtattctttcacttattttagtattcacttttaaaaaaagacttaagtctttcacttattttagtattcacatttattaattagaagcataccatatcaataaagctgctagaaacatctgtatgaagtttttctgtgtgaacataagttttcagctccgtggggtaaataccaaggagcacaattgctggattaggtggcaaaaatctgtttagttttgtaagaaactgccaaactctcttccaaactggatgtgccatttgcactcccaccagcaatgaatgagtgttcctgttgttccacatccttgacagcatttagtgttttcagtattctggattttggccattctaataagtacgtactgatatctctatgttgttttaagttgcttttccctgatgacatggtgagcatcttttcacatgcttatttgccgtgtgtatatattctttggtgaaatgcctgttaatgtctttggcccattttttaatgaagttgtttgtttcttattgtttagtttttgtttttctttgtatattttagataacattcctttgtcagatatctcttttacaaatattttcttacagtcactggcttgtcttttcattctcttgacagtgtcttttttcagctggaattttttattttaacgaattccagtttatcatttatttatttcatggatcatgcctttgttgttctatctaatgtcatcatcaaacccaagatcatctacattttcttctatgatatcttgtaagagtttcatagttttggcttttacacttgggtctgtgatatgttttgagttaacttttgttaagggtgcaagatttgtgagtagattcattttttcatttatttttgcatagtaatgtctatttgtaccaggcaccatttgttggaaaggtgatcttttatccattgctttgcaattgtttctttgtgaaagatcagttgactatgtttatgtgagtctgtttctaggtgctctttctgttccattgatctttttatctgttattttgccagtaccacacagtcttgagtactgtggctttatattaagtcttgaggtcaggtagtgtcagtcctggactttgttcttctccttctatattggcttggctattctgggtttttgcttctacatgttagcttaacaatcagtttgtcaatatccaaaatataactggctggggttttgattgggattgcattacatatttagattaatttgggaagaactgttatgttgacattgagtcttcttgttcttgaacatggaatatttctccatttacttagatttttaatttctttcatcagagtttcatagtgtgtatcatgtatatcacatacatattttgttagatttatgccaaagtatttcattttcttgggcactaatgtaaataatattgtatttttagtttcaaattccacttgttaattgctggtggttaagacagtgattgacttatcactgtcaatcaaaggaaaagtgacttttctttgttgaccttgtgtgctgaatccttgctataacggctgattagttccatgagatttttgttgttgttgttgttctggattttctgcataggtgatcttgtcatccgcaagcaaagacggttttatttcttccttctcaaacaaagtaaattgatttccttttctcgtaatattatctatgatttccagtatattgtttgaaatgaatattgagagggaatattgttgctttattcctgatcttagaaagaaagcctcgagcttctcaccaatgtgatgttttcagtatgttatattttttggtggtggggggtgggatagatattttttaccaagttgaggaagctcccttctattcctcgtttactgagagattttatcatgagtggaagttggattttgtcaaatcctttttctggatctattggtattattatgttattttctgatttattctatcaatgtgataaagaaaagtcaccttttaacatttgatataacatataggtatatttgcctattatcttataaccttttttcagagtcttctttgttaactaagttgaagaattattttcaggccttcccctatctttagtatattgtgtatacttactttatacacaatacttagcttcagcacctggtcattgatatcataatattttatatactaaccatattctttccactatatatacttgcctgtttagaaatttagtatttcattttttatgttaagaagaaaaatgaggaaaacttgggtcaactttaatgttatttctgtaacattttgcagaatgagggaaattttcttcaacaacagaaagtataaatgttcttgtatttaatttattagttcaaatattgagaaggtagcaagtctcagtcaagtgcatagatgcaggagctaattccacaacaatcctagagacctaggtagacaaaacctaaaatgtacaggagaagaaataagacttttctaacagcactgtgcttctttagttttagtaatatctttgcaagaatcaaataaactcttcgtagatatcctggtgtatgccatggaaatagcagaccttaattaactgggctgagtttaaaattccttgctaagattttacctttttaaatggaagtaaatattgtctttcttctagcctttccatattctcaaacccctcaaaaatgaaattagaaaacagcagattccacttcttcagggcagccaattaaatggctgagggtatctgtttctgtgtcgttttcagaaacaattgtatcattaaatcgctgaaattgtagtgtcagcaggaaatagagaaaatagctgccaaaggaagaaaataatatgaacggtacagctactttgatgtcttcctgccctcctttccagtgtctagtgctgaacaagctataaacaaaacgcgagggaccaaaggctcctgtggttgttcctgggtgacttcaacccccctttcagggagatctgcttactgaattttctgctcccacctgacgccttaggcaaactgcactaatcggagtctcagaacacaactcttacttccatgcctctgtttctctccacttactgttcactcactgaatatcctcacttcgtattttacagaaatcaatcacttatttattcagcaaatacctattgaagtcctaccttgtgtcaggcgtgattcaagctgttaagatacatccatgatcaaagcagattaaaaaatatctttctttgaggagtttacttgaaggcggtagcaacaaacattacgttatatacataataaatattacaattgtatgttaaaaggtgatcagtagagcttggaaagggaaatcaaaagttagggggctgcatcttttaatcaggtgcttagagattcgggacaaagcgttttgcttaaactgtcctgagaggctcatgacacagtggttaaaaagacagactctttcaccggactgcaagagttcagaatgcagctctgttgtttattaattgtgtgaccttgaaaaacttactttattttttcaggtctcggttttctcattcataaagtgaggttagtattagtacctactgagttttattttacatataggatttagaacatggggtgtaggtagtacacgttatatgctgcatgtagtatgtcatactatgtgaattccctcaatattattttctaaaaagagtgtacacttcaatttagagacatatgggttcgaaagtcaaagatgtttttttctctgctcactaatctgaacctcagttgtatgatcagggaagtgaagataattcctactgctgaaagctgttttgaggattagaagaaagttcatttatatatgggcaggagatccttgctgaatgtcaagcctctttgctctcctcttcgaaaccctgttgaaattcttcatagtcttcttatattatctcagctggtgaaacattttaagactcctgacatctctcatggtatttatggtatattaacttctgcaatattatagtttctttctcctaagacattctggatgattagaagccattgttgatttaatagcaaattttcaagggaaaagaagcaacactttcacatgaaatgcatccatcagtatatgatgtgccctgattttaaaacaatttaaatgtaaaaaataaatgcattatagaatcaaggaaatgtgttagtttctgtttgcatgtcttattgctgctagtgtgtgattaactactcagaaaaactgtgattcgatatatccttctccttgcttaatcccctaccctgaacattgagataactcagtaaatatttcctagatgatttaatgaatgaccacataccttattgaacaaaataacttatttaaatttatacaaaaatgccaactgaaagtgatcatgagtttttatctaagaggtattttttcatctaaaattgcataaaaataagtaaggacacagtaaatttttagatatcaatctgcatgacaaaatttcaaacagtttgtttctaataggttgggagtctttttggtggcaagttttaaaaactcaatttggactaacaagcaaaaatggggaatttcctctaagcccacaggattctagaagcatagtgtataacacaagagcaggaaagcagatgcaactctgactgctccactttcagcaccaaattctttatgaaccatctcttactatttaactaaccacttcaagactagttaaaacacaaaaaaactgtgaatcagggaattcagacagggaatggggaaatggtttgcctctgctccacagtgtctgggctttcagatggaaggcttaattgctggcttctcttcagtctgcactgacagcctccttcaagctagacaagcttctattaatagtcttctcaatgcccttttagcttcctcgtactgcaggggtccaaagccatggccagatggttttgctgctccaaaccatgctgtttttattgcagtagcactcctctttcaaaccagtatctgcgttaggcagtatttggtgagaagcaagatcactatgatgatacaaactatggcatttattatagggcttagatcttatggaattgtgagagttgatggagtagtttgcagaaggcatctgcatctggtgttgagagtgacattgctgtaagtcagctgaaccattaggaaggaagaatgattgtgaagtagaggagaacaaggacaaaactgaaatccacaaggatgaactgggacccataaagataaactggaattcttgtatgtttctcaccaccaccaatattgatggtatagatgacctgcaagagaagttggctaactttaccagtgagccacacatgcacttgatgcaaatttgagaagtatgagaaggagaatcaaaggagcttaaggggttacatggctttttgctgccctctgcctatattaagtcagcagtaggccagggatgcatgcaagctgctcctgagcctaacaccctacatccacctttggagagtaaacattactaccacttctctacttacaaaatcgtgtgcaaatatctcttgtggccaaatcttacttcaaaccatttagggaatgaatttatggaaaatgtagttccagtttagttaaggtgatgcaataaaatatagcacaggcagtatgcatcaagaaactttaaaatattgataccctttgattataagcttttgaagttttagaaaccaaatatggaaaaaggaacaaaaaatgtgttgggggaagattgtaataaacatagaagattcctacattatcttataataacccacagtcaggagtgcaaatctgcccaggaattggtctccgtgagaatttgcaacttgcctttattctctgctctttgttactgctactctttgtatatctgttttattatttttcctctaacagcagacatggttcctctgtacactcaatccagatgttggaatacaccatcattagctattgggatttacaaagtacaaccacacagagcagagtaaggtcaatctcatagtcccagttaaaatgtcttagaaaagtatttaagtttcctgtgacagagggcaagttcttgttatacaaattgacagttacctcctcagaaacatagatgaaataaaaaaagcacaattttcagaaaaaaaagtacaggaatatagttctatagatgtctactagagtccaacttttattcctaatccagtgattttacatttcaaatatctataaaagatttttctgtattatttaaaatataaagaaatgtagaaaatgtgaatcttcagtagcaacttaagtaattttttatacatgacagactatgccatgcgcatcaaaatggttatgcaattttaaatggtagaaacatgtatacaatatcacattaaatagaaaaagcatacaaaatggcatatgtagcatgaactcaatattgtgaaagaatatcactgtagtaagtcagtaaagttgtgtgcatgttgtaagattataggtgtcattatttcacacgttctatttttccaacctttatataagaaaagtatacttgtatctttttaaaaacaggtatttgtataaaatggcttaaccacaagacattaagcatgcgatgtactgattaagttgtttctaatcaaaagccaagagagacagacagaccatttgattacctatcagaagtgcaagtagaaaaaatattcatgaacagacttcatgattttacatgctatccaatgacatgacaaataagcagctgaaaacatacaataactttttaaattttattttaaaatagtattactactcttaaatcccttagaacatgcacattaaaaaatatattttaattcccagttcgctttcttgaaataagtcatgtattgcccaaatggcaaagagggcaatgacaaataaaacaaaaggtaacacaggcaaacaaaaagcaaccagtgtgtttgcgatttattgtcaaatgatataaattgcacaatgataagttaagaccttatcattgaatattttggaatattaaaaagaatatatgggaaagataaaaccacacttcataggcaactctcatattcaacagaaaaacaactataatttccaatgtattaagctggtgttccaaattcattatttggaaaatagtagtgagattagtaaaataaagatcagttttatcatcaaaaagcaagattctgacactgaagagctgatacagtatatattttgcacagtgtagccatatctggagaaggtagaaacaatctcaggccatgttaacaaaggtgcgaaagaactgggctagtcagagatcttccatcgaaatgacattttgtcctatcagagttggaagtgagcaagatgccataaaaccaaaaggaattactttctgattctaaagttccaatgagttggacttctgtcttcatgtttcctctatttctaccattaattaagaaattattcttttgctgcatagagatgaattcattcccatctgaaggcctgaacttatgtaacgtataatcaaatattttctcttggtgcataacatttttaatgtttacctccagcaagtcattcaaagtctcgggaaaactctttaaaatagctatgttgaatcgatttctggagataaagtgactttgtttctccatgtgtttgtttaagttgctaacaagttcctatgggcaaagagaagtttgtaggggtgtgcaatgcacattttaaaaaatgatttctatactctcaaatcttgaaaaaccataaaaagctgctcttactttttaaggcaagagcaccccagaaacccccctaccagttttacagtctcctgtgcaaatgcattttcaagtaccgggtgtaattcaatacacatgatcatgaaaaataagaaaataaaaaacttaatatgtgtctctgagctactaagaaaataagaaaaataagaaaataaaaaacttaatctgtgtctctgagctactaagagtgtattacagtatatttaaatcactgataaaaagaatggttctcaaccttccttaggatttctaaatttttttctgatctgtatagggccaactgagtcaaaagtttttttgtttgtttagtgttgttttgctttaaagatggaagctcatctacaggggcaggaagcttacaacatgaaatatataagtattatctctttattttatatcccaacctacagacaggataatttttataataaaaactccagaaattgttactgcaatgtacagctgcaaggacccaaatcttgttctttcaaataggtatcaaagaatagacctgggttcttcaggagccctggaactaccagacagccctgacaggagaccttctcaaaaagtttggcattggtttgagttctagaaattcttgtcctgatgtaaatgactggaaaatgagtattcacttttttgtactttcttcctcaggaggtttggaaagtggaaaaaaaatagtttcaaatagcacttcttgtaaatctgaggttttgccactgaaatgcatttcttttccttcaaacttgtctaagaaatgttttaatatatatttaatttatgcaagagctctagattttgttatgtttctccaggaaacggtttccaaacccaatgatataatatagaatattctagagattggtgaaaaattggtagttatttttattaaatctttctggtacacacacacgtgagaccttacaataattcctttaattagcaattattgggaagtgatagataatagtatgtggaaacacatacattttatgatcaatttatctcaaatacttatgttagcccaacaaatgataaatgatctggtcgtttctattagataaatcaactgccatgagagtaagtattttatttagggttcgtattagctctaaataaaattgattgttttctttttcatttcctgctgaactgcaagatttacagaatagtatgctatcatatatatatatatatatatatatatacacacacatatatgtgcacaaatgcacacacatatatatctgtaatatatttatatatgtaatgtacatgatatatgtgcatgtttaatgtcttcagtgcctcttaattgtctagtagagaatcagttaatttatcaaacaaattaaacaaccacaaaaaaattacaagatcgtttgaacatagattgtcagatgtgcagatgtttcctatcaaagtgttcactgaagtttttgttctcatagttctattgtattccaaataaattttaggttcaaagaatgcacattgccttaaagagcttgtcttattgatatctcatgatcataaatagaaaattgtcaaagtacattttaaaaggtaaaaaaacaaacaaaccggtagagagcccctttttctatttagaaatattataatatacaaaaacacaaaaatgtttatataaaatggatgaaagaggcattttctgagagtaggttttatagatgcttttcttcatgcttcacattttcaaaaatgtaaaagcaataatttttgatattttcaaatattattttcataattaatattcaataaaaccaaaatgtgaagcaatttgaaagtaaaaaatgggtgtaaaaacaatttatctataatggaccagagatttaacaacaacaacaacaaacaaataaatattcaactttttggctttggctcattagcatatttcataatatctaactaatttctattatttttctatcaaaattctgtactataaggtactttaaactttgtttagttaataaatcaatgtattcacacaaagaatatcaaagtaatggcttaaaaatataatacacatagccttctgtgtatagtcagattactaaaatgaccacgtcagtttagaggaactcttttttggacattagcattttacctgaattatgtgacagccttttattaaagaacacaaaaattgcccagtctagctgctagcttttcttattaaaactaaaatttttttgaaaattgtccaatcaaatatggtagattgttttttagttttgtttggtttttagcttagcagaagtgaatatatttatataaaaaagaaaatatatatctaccttacaattaatcagtggatcaaaatctcggtttggacaaacatatctttttagatacttgctcagatatatttctcaatgtgaaaacaaaatgatctgaaagcagtttctgtttgttacataaaaaaattattacagtggggtgtaaattttgtattcacttttgtcagttaaactaatgaaaaattatccttattcttttacaaaattgttactatacatctgtactctatccaaaatcaatttttaacccaggcaaaattcttcctttagtcattattttgaaaaatcaggcatcaattaactaattattgaatatgatatgtatcttacaggttaaacaaatttaatcagcctgcagtttggttgttttgaaaggtgtagctattgtttggtatgttcaaacaattaaacatttttaatgcctcatgacttctcttttatttccttataataaagcttttaaagtatgaaaaaatcagcaaacttaaaaataaatcagagatattgtttagcagtttgcaattcctcattattactttctctttccttgtaattaagagagtaaacctaacttagtgttaattgtttataaagacagtagggttaaaattgcatgtaatattaaaaatagtttgtagtagtgtgtatttgctcagaattcatcttccccaaaaaacaaaaagagatatggccagaatggggatttaagtgctgcctcagtagaacattaaaacgtttttaaaattgcctactgtataactaggccttgtatctcaacatgtggccagcataacaatagtagcagcatttcctgtgtgcttgtcaggaattcagagtcttaggcccacctcacacttactgaaacagaatctgccttttaacaagacccccaaactatttgttggaacttaaggtttgataaacactcttctagaatacttgtctccattttacactgagtagtagattggggaggaggtgaaacctagagccacctggacctgagtaccaactttaacatatactagggaaatatcatgttgtttaacaataacaacttaaaaaatgtattatggccctcatttaaataaagtataggaaagtacattatatattgattaagatggtatgtgtgttggtaaaatttgaaattttgatttgctttgttgacttatacatttgattgttaaattagttccaaaactttgagaacatgtagagatttctgatagcaaatcttacagtaagtgaggtatcattattgatagagtatttcaaaagcttggaatagaggttatgttttcaaaatctaataatggttatacaaaaagactgagtgtttctttgaaggcggggtgatcaataggaataccctagatcacagcagattctatcagaaaatgcgctgcatttggtgaaatatagggatcttggaacgcatatgaagccattgaaggagtgccatctgacttcacagtcggatcagctcaatcaactctggaatcagtggagagacagatgtctcaggcaactactatgcatatccttttaataacattgatactaacaatattatccatctacttgttggccatataacttgtctttgaatttcattcttgctatgaagtcataccgacttgccatcaattatttctgcatcaataatgaataaaattttctaaaccctgtgtgttaaaaatcttcattcaagctactaccaaggagatattataaggtattattaatatctgcattgatactatttgtttaaaggttggtctaagagaaggggtgggctatcaaagcatctaataattggaatttattcttataaggggttgcatattgatcaagtccattgtgaaagctatagtccctctctttagagaagagccaatcaatcctcagtgttctcatactttataattacaggagagtgagaggagagacattataatttacaaagggtttgctttatttaaagaaagacatgaatcaatatagcaaccaattttaaatgtttccaggttctgctaacttaattcaatggaaggcaattatccaatttatttttaatttctcttaaaaattctcacaagttaattctcagaattttttttccttagagaacaagtgctcttctattctgtccctcaatagcttgtcttaaaatcattttctgagtagctgttctgatcacttgtaaacttggaggttatctcttctttttgatacaatgtggaataaataatacacttattaatatattatatcccaatatttaaaatctccagacaggaaagtatgcataaatcgtctttcagcagacaaagtttaagattagaactaaatagcaactgcatattaaacagatgacatttattatcaatattaaattgccaaattcagtcattcagtggactctcctttctctccattgatgcccctccatctttgcccagatgtagaaagagttgcagttactttgggaggccgaggcaggaggatctcttgagcccaggagtttgagaccagtctgagaaacacagtgagaccttgtctctaataaatacataaataaataaacaaaattagccaggcatagtggattgcacctgcagtccaagctacttggatggctgagatgggagaattgttagagcccaggaggctgagattgctgtgaggcaaaatcacaccactgcattccaatggagtgagaccccatctgaaaaagaggaagggaatgggaggggaggggaggggaggagaggggaggggaggggaggggagagaagggaaggggaggggaggggaggggagagaagggaaggggaggggaggggagggaagaagaaagaaagaaaaagaaaagaaagagagaaagaaaaagagaaagaaaatagaaagaattgatgtatatttaggttttaactgaatagttaaaatgttcatttttcctctttaaatgtattttgaaatagattgtttagaagtagaagcaatagtttcttcaatagcttgttaggtaaaattatgaatcaaataattttgttgtaatgctaattttaatagaatctgtatcttccccatagttacttttattcctgaacattcccatacattagaattggttttattcagaacacttccctaggtaacacagatcaacatcttccttcctgttcccagatgaggagtccctccctgatgacatgttggcacttggatttcttcacctttcccaggtccaaatgtgtttattttagtcctttaaaatgtactatttcttgctgtctctctgctaagtgaactctcagatacaaaaccaattggtaccaatgtgcaaattggttgatgtgataattgccatctcccctctttttgaatatatttttgctttttaatttatttctaaatattttaacccaaagaaaattaccacaaatggaagtgacaagtataatagcaaacttatatattaaggtttgagggagaaaattgatttggcatttctttattaaagttcagttgtagatgcaaatatataagctaggctcgagtatcctaaaatcactgtatattataggtttgacatattgtcccaagacaacagaaaaatccttagttcctgtgtgaaatagtcagatttggggctagcatgtaacctcctgactcagcctgcaattgtgtcttcctaacatagcttattgtgtactagctttagcttgcatttgttgttttgtggtttccttcacttttatttttttatgcagttaagatgtgccaacactgcaccattttatcatgtataatcttttttatgggtctgtcatgcattaaactgactgcaagatgttcatattcatggttgtgaagagtacatgctggtctttcacaagctgatcaaatatttaatgggggtttggtttgagcttgttagaaacactaatgtaataaccctcatgcggatggttcagagcataaattttcctcactccgtcttttgatttgaatttattttgaaatcctgggacatactcttcaccatactaccatttctgccattatatttaagatttcagttacattaatatgcatctctaactaataaatcttccttcctggcttttttgacacattcatttcaaagttaaaatgcttaagagagtaatgcgaattcctcttccgaaaaaaactgaaacatttacccatgatattcagtaatgtttttgcaatgatcatttgaatttcataggagtcagccattctaatcagctgtttcttaattctatatattaatctacttgggtggcagtttcaaacataaatgtgacctacataaatatcatcccaccattgtttcttttaaatttttaataaacaaataaaagagttgattttgttttaatacttaaagattatttatgttgctatccattccacccccgcttttaaaaccccttcaaaatcgtttcattgctctgatttgaaatgaaatctatactcagacaatcaaccacattccactttgtcttgttatttttccaacctaatcttgtttatcttatcttccaaaccatattaagcttctctgtttctttggtcccctcagtttcttctttataattctgttttctgtttgttgcacctactactcattttgcatttacaattctttcctcaacccttcatttgaccaatcaatgcccttctcactcttcatattgcagcttcaatattatttcctcagagatgttttctctgactgcagtgctaactctgcagtttctgttaggagtgtatcagacactctcttacagcagttctcattgttttttttcccctttggagtagttattatcattataaatgattgcttaaataattattagtgttgctgaaatcattattaatgtaaagtatgtcgcattactaaagctgcatgagaatggaggctatcttgttttccacccagtgtgtaaattttagccaatactctacacacatttcatgaaagaatcaatgggctaggcgtagtggctcacatctgtaatctcagcactttaggaggccaaggtcggattgcttgagcccaggagttcgagaccagcctcggcaacatggaaaaaccctgtttctacaaaaaccacaaaaatttactgggcattgttgcacacatttgtaatcccagctactcgggaggctaagatgggaggatcacttgagcccagaaggcagaggttgcagtgagccaagatcatgccactgtactccagcctggtgacagagtgagaccctgtctcaaagcaaacaaacaaacaaaaatcaatgaatgaatggaaggagcctcaaatcaatggtctcagtagtagtttctaagaactgataaagagaaaacaatagcattagttgaattttaatgatgtcattaaaatatgagacctctcatattgcagggttatattttgggttataggattgaattctttgggtaataataacctaaatttttatactgatgaaagagatgttgcaatatcagaagatacattcgtttttgcaaaaggtgcctaccaagcacatgacaaagcagttgactaaaaaataatgatgctttattctacctttttaggaggaaacctggccaagatttgctaaattatcaatccatatattaataaaggttagtgtgattaaaacagggaaaatattcaagcttatgtagtcagctttttttcccctcagctgtaggcattgctgacttaagcaagtctgagacattatttatcaatattaagtgcagaactgctcaattgctaggttcttcataatgcaatgtacatgtgtaactggaatcattatttataattgaaattgatgtttagacatcccttgttaaatagttgcatagagatgtaaattattctttaaaaagtcaagagtttagaacagaaagctgaaatctataacatgtaaagattttagaatttcaattggcaagctacttactgatccactaaaatgtcagataatgcattttaggcattttattagaatttccatgagaaatgacatttggtgtttagaaataattcactgaaaaatatattttttaggttggcactgtttgaactgagtaggttgatgataatatgaattaacttatggtaggaagtgaaaacatgttactaccaagcattttagctaaacccctagcctgacatcctatgttgtaacagagtttttgtacatatttagctgtctctcgtgatctctctttaagtactctttattgctataaattagtctttattaatatcaataagaatgtaaaagcataggttttacaaacactagatgagtagttatacttctaactgcattcatcatcattcattttcaatcctgtatatccattccgttatttaaaaaaatgtggtgaaaatgaattttatgttaaggtgtgactctctttaacaaaaactaattgaaagaaagagatgatatctttacatcacttccttgtttccccttacaaaaaatatgatccagagatttttaaaattagtttggtaattgagcttgtaaaatgaggttctagagagcacccacagaagctgtcatccatatagtagataatgccttgcacatattttgaatttcagatgtacttattagttgagtgaatctcagatatgaaatctaatgcaataactgactgtaaaccacagtatgaaatgagcactaagtcatctgcagaggagaagactgttaagtgcagttgtttgcaagcttgaagagacagaatcagaaagtaattacagtttcagagactgattaataatgcattacagctaaggtagtcactgtcccctgcccatccttttgaatcatcatataataagtagcttatgctggtggtgtcttgccaatagacacagtgtgcgttgccacatttatttctatttttctataatgaatgatttcttaagagttggtcacatgattccataaaagatggaaggggagaaagaggggaagaaggagagggaaaagcagcagcagcaacaacatgtttttgtttcctggctgatagctctcagaagtcttctggtagttcttagccctattttcagacttatgagtagaatcaccatactaggcagatgttgctcaatgcctgacaaggaaacattctctgctactacataataccttaactaccaaatttaatctgatttgagccagcagtgttcccattaaagacaaatatggctggatgtggtggcaaccacccctagccccaactactctggaaacttaagtgggaggatcacctgagctagggggcagaggatgcagtgagccaagatcgtgccactgcactccagcctgggtgatagagtgagaccctgtctcaaaaaattaaataaataaataaatataaacgaactcccttctgtggactccaatgtagctagcagtaatcctataacccagttccaggtggtgagaagtgagggaacatacacagaatacgggtcctgggaaagcaattactttgctgactaagaggcacgggtaaggcctgacgggaacctgaggccctttaatatgtcctctgttttacttcctgttaccctgattccacacctggaggtgaagtaactatattatggtcataaggattaaagttaagaatcaaagatacacaagaggacacttgatctagcctagacccctggtaattttctgagcagatgctgatgcccatcttctgacttcttgttatgtgagaaaaattatctattttattattgtaccactggggttgacttaaccaaaggcagtcacgtaaaatcttcatggatgtaaacagaaggaatgcaggaagagcaagcctccatattgcaatagtcatgacttataagtagatatctattctgtcaaaatattagccaaagtttgtaagtttgatttcatttactaggggaaaaaacgtagcaacagaacaagtagtagacagacatatgtaaaatgactaaatagttaaattttagataaaaaaacaggacatgcaaaaataggttttagtagttattcaaatgtcatatctattgtgaaaattagagaagtgaagctggaatttaggataccttaactatcaagtattaaaaatcatcattatacatatgtatcacatgtgagccaaaggtaaattttctagtgtaagtagaatagtcagacgttatacatggccagcttatagaccacattggggccaaatgatttcgacaatgaaagtaatttttttatttgtgtttgctttaaaaaatctgtttattaattttaaatttatatgaataggttgcaacatttaaaaattaagattgcttataaaaaacaatagatttttaaaaatcttctctcaaaaacattaaaagatttagcaacatggggtccaccttccagtaaagtttagttgcagttgaagatcaactgcatattcttttaaacttgctgtgttatcttattactttatactctcttcttctgactctagtttccaggcattatactttcctttttttgctccatataagtattcaaaactgccaaatttgtttgacaaaagaaaattttacctaaatgtgctaatgaaagtttggcctatgaacaaaagtaaaattgaaatattttagtaacataatctgcatggtttcacattatcattaaaaaggagaaacttattcaaatctactttcaaatgatagcataaaaatctaattaactaattaaattagataggtaatacaggcaaaaaacactagcccccaattatatttttgttatggtttacctgtacatgacaaaatgctttatataggctaggtttttgcattagtgtttctatattgctcaaaatgttaggctcaatagccagtgtcacaagggaaataaacccactgtgtacggaattacattttctaaacaatgtattagcaaactaatagggatctctgtacagaaaatagaattgcttgctttgtgaatgcatgcatgttttgttttttgttttgtttttaattttttttaatatttagagactccttaaaaagcaattgggatcaggtttaaaatctatagttaaaacactcagcctacagtgtaaattgttagcttcttattcacttgggaaattactttgctgttgttgaatctgtatttaccaagccaagattgaaagcattctggctgcaatgctaaaatcttaatctaaaaaatcttttttagattagaataatctcttactaatatctgatagcagttgctgttagtactatatgtggaaaaatgtatggatatgtcagaaaaggtacattaaaaatcttctaatttaacattttgagaattgtgttgattcactataaagctggctttgaacataaaaccatagtgaattttctggaaaaagaccaaatgaaatcattcacaattcaaaaatgcaaatatagaccaagtatattcctttggcttttctttttgttttctgttatttatccaatattatttaatctattataatgtgaatcataatacataacccactcatgcaaggactattctgagttggggtttttctctcatttgcccttcaagtattaggttgttgggaaagtaattgcggtgtcttctgttactataactaaggttgcattttccaaatgtcaaaggacctttacatttatagtagaggacaatatgctaaattattaaattattgggaatagtatacttttcttatattttgtataatagtgcacagtcgtctttatcatatatgtgtgtgtgtctatatatatgtatatctatgtatatatacatagatatacatatatacatatgtatgtgtatatatgtatatatatatatatagacacatacacataaattaccttagcatcatatatatatatattacaacaccattataaatttaaaacccaaaatactatgttcagctcactttgtgtcttaaactatctcttattttcttatgaattccacagtggctaatctggatccaaaagcgattccaagttttatgataaacctagagaaaatcattatgaaattgatgcagcatgaaactttcatgagaaagactcatttcttaaaatatactactataaatggcataagccaccaactaacaaatgagccactctctggggatcaaccagcttgagtgcaaaattggtagaggctgccaaaggaaggttaattcttctcaatagttccatggggcctattgctgtgccctgcggaactgtaaagggctaatggagcaaggtatgttttactttaacccacacaaattatttgtcgtatcttaggagacatattaaggatgaattaatgttaaacatttatgatagtaaaattgagacactctaaaacatgcatagaaatacaatgcaaacacattgtttaaaagttccagaaatttggttttgagttactgtcatattgcatataataaatttaaaagtaacccccaattaataatctaattgtttaattgtttcatatatgaaacctatagtttcatatagacattccaatttcagaagaggtaagtatactgatagatgtaataaagttaagacatttatgatattaggtcctgaagtttacaaaataaactacatttattctgctgatgatttagatatatctcatattttataggtaggcataccttacagctggcttcccaaatcatgcaatctgtgattgaccttattttaaaaacaaacattttagagatgaaactgaaagctcaaatgataaaagtgacacaagcataataatcaagccattcatgctagatctctcatataaaaaatgaatcataattatatattttctaatcatgaaaatgaactacatgtgcatacattttaatgtcaacttgctatttctctttcttttctctatatatgtttgtaaatcttttctatccactacctctcacatcattcccagatgcacttaaatggcaaggaagtagagttaggaggtacaaatctatattatcttgtcccacagccctgaagaaacttatgaccaagcactcaaataccagagaaaacctgcaattctgaaaggatgagtgtgatacttggctgtataataatgtcaaaagagaaaacttggaatttgaagacataacttctaatcctgcctcaaccattcattcaaaatagtctatcaatagtggctagtggatagtgttgatcactgttgtactcttgcaagtttccccccttggcttgtgtcatgatgtatactcatgattatttatttatctgtatcatctattatctctatctaatctataacctatttataatttctcactgacacaatgaaaactactatcaaatatgtatttcagccttgagctctctcccaaacttcaggaatgcatttccaattgcctcacagtcccttctaatatgatgtgccaacataaactcaaattttctatgacaaatctaaactcatcgtccactgcctactcaggagttcctgattcttatttgtttacttgttcctgctatatttcttttcatcaagattcaaaatcccaaagtcatcttctcacttcttaaatctcatccttcacctgtaaaaaagtgacaaatcctttgattctgtttctaaaatatttggaaatttcaccctttttattccaaccttgtcctggttggaggctttttctcctgtcctatcataataattttcaatctgttcttcacacttccagaatatcctttcccatacaaatgcattttgtatgtatctaccatattaatatttctacagaataactgactgtttctttcctgcttcgtaacattctgaatatcttctctacctgaagattaaaattcacatttattaggctaatgaaaaaattattttaaactatctctcacttataagcttctgttaccactcctgtatcatcacgtccatttattaaatctccacagcttaaagaccactacctccatgaagttgaacagaaagcactagggtgataaatgatctgtctagtctgaaccgtgagacttttccttacctctttccctatacctctctatggcacctatcgtaatggcccatgcatcatttatacatctctctctgcatagtaagggaaaggtattatggaaggcctctaacaggcggtgttagtttagctaaattttgaatggtgactgaattcaacacacagtgaaattcagtaaaaacacatcggaagcagatgcaaatgcatccaagtggctggtcctgggaactggcagtagacttaatggctatacatgtagatttaggtggagtttatgccagattccaacctgggagccacacatagatggctttacatcccttgctgagaaatagctactttatcttcaagttgattaagagctatatgcaggattttaaattttgaaatcctatgataattgatagttttgtcttgggaaaactattctagtagcactgtgaagtgaaaatgaacaaaataaggagtattagggactttttaaaaatttgtgtgtgtgtgtgtgtgtgtaatctgtacctgtctctgaccatgtctgctgtctttgtacatattgtttatttttaggtttgtatactctctcttttcttcaaatatataattatgagctacagcaacctatatgaatagtgcataagagaaagagtccaagttaacactgtcaagctgtgtgtaattatcaggaattatcgggatggtttcctggactgaattgtcaaatggtggaagttatgctcttatgtaggctcctttcagcatttcttttcaaatttctgttccaatctggtcttcagaaaggttttgcctatggagattgctaacagtaaagcctgcggagagaggaagaatggagaggacatatatccaatcattattgataatcaaggttgtgtctggttatcttcaaccactatgttttcatagtgtcaggaccattgacagactaaaggatgggtttgttttactctgtatgtaattatagttaccaagaatgtgttcgttcttcacaaaaagtaatctagatgacaagaaattttatatttcataaaattacatttcaaactttcacatttgctcctgaactttagcacaaatacaacaaaatttctctttccaaggtcagtgaaatggtacctttggatttccttagattgttttttgggtgacttgctactttagcatcatttttattgtcttactctcttttctgtttatatgtttgtcatgcttttatatataaagcacttatgttttagagatagataatatatgctattcagttacacaaacatagatgataagaatgttaccattcatttattttcatatcaggtaaaggatgcaggcaaatcttttctttaagcaagagtttataaattttaaaacttcttatgataggtttttataaaataccttattagagttttcctattgaaaatccgtttctaatccaacaaaactaaaaggcgtctatatattctacttcatgttagtagtaatcaatacttccatattcctacagtactaaaatactatttaattgtgtatgtgcttactttatcaaaaacaaaatcaatattttaagaaatcaatgttctttacaaaatagcctcaaatggatgaggaagagtggatagccccaatatgcagaaataatttactttacctttttattccaatgttggcactggagtatgtaatgaaaaatcagttataacataaaatctcataataggcattcaaagattctctcatcaaatgacagtaccaaatcatgtctgactactgactatattccatctcactggactctggttgtttttatttttttaagtagccacaactctcaaaggtgaataataacaatgaggtgagatgagaccttattggtcactgtgtgagaaacacaagcaattaactggcagaaccagatgtgtctgtgaatgttggaggccagggaagagagagagaaaaaaaaagtggtaaataaagctctatgacatctctcccaatgggcagtcctgacaattcgatctcacaccaagctcacctgaaaaagcattttatgtcatcagaattaccgcgtgtggttaacagtgaggatggaaagcacattatggctaacctagttatctttgtattgtaaattgatcttataattcctagagttgagtctgattatacaaggaataatacaatgccactactatcaataacctgaaaaaatatgctaacttttctgttttaaaggtagctttatgtgctttaattttcatttggttctcacaacagcttggtgcccaacacatagtaggtacacaataaatagttgctaaataaatgtgtaaatgcaggatagaatgagcatacaaatatcccaatgaagcagagagtgcaattatatttatcttgattttgtagatgagagaactgaatttcaaaataagatgaggattctttgaagattatttggcaaaatgagtagcgaagccaaaactaatacttatgtcttagattctcagaagagattgcatttttgtttagattttcacattttttagtcattctggtacatataattataagcttccttagttcttttcttgatcagtataaaggttaactttaagtttagaaaaaggcattgtgaagactaaatttttctcctatgggttagcaatattaagaaagacaaagttaagacagtataagtaaaaccagcaccttcctaggttttttccctagtactagagaaaaaggaagggaagactgctgattgcataccacatgtaaagcataagtaaaataaaaagtaaaaaaaaaatcggtatataaatattcccaatttgaatatgcaaagttggatcttgcatccacatttataggaaactggccaaatgaagtttgcaatcaaattggttcccatttaccacacatgcttcttctgtggcaaagaaagtttgaatgcataggtacagcaggttactggaacaagcagcttgttctcaaagttcttttggactcagctgtcctctgcccagagtaacaacatattaatgaaaaaaatcatctttgcagccttttgcgtttaacaactattcagacttgtcaaaatttcactacagctgtctgttattagaagacagtgttacacgtaagtgtgtctattcaggaatgcatacatataccaaaggcttatcaacaaaaggagacaatagagtttcagccaaaagctttaatgtccattgggattcgtgtaaacactttccccaagaacctgggaaagatccaaatttccattattcctttccctttaaaattacatttttttttctaactctcagtgaatatgtttcttccctttcttttgtcacagaaacattacattcctcatcaacctctttcctaaaccttccatttatctgcatgaggtttatattgaacttgactagattttgtgcttctttattaaaataggcatgactaataatgataacgttgaattttttttcttttgataagcctctgtacttctgaaatcatgttttccatttttgtatcagttggcagggggcaagagaaggtatattttgccttgatatttcttttgctatgtacattaatgaacaatctttttcttttactggcttttctcttaaatgctacatacatttctcctcataccatttttagaatcttcagtttgtccctgaaacaaatgagaagagttggacatggattttattgctttacactattcttacatgattttaagtctccataaaggcttcttgttcgtgtgtccaaaaagagagtaattggttaataaaacaccattttaccaattgtgaggaagagttcccagctttgattgtatgatacctcaggggatctccagttatctcaaaaagtaataaactctgaacatattatttcattaaaagttttatgacatgctgcacattttggaacaaaagaaaagtgacagaatcagtgataccaagtgataaggtgctaacacaaatgttgtccaaaaatgttgtcaaatactgcgtagcctgcaaaattgtgcccttcttaaagtttcttcgtttaaaaatagttctaatttttttgtttaaattgacgtcaaatttatcgtagcagacacatatgtatatatctatatttataaaatataaagagaggatagtgttgattgtgaaaaagatgaagaaactgttgtcagaaagaaattagttggcgccaggtgtggtggttcatgcctttaatcccagcactttggtaggctgaggtgggcagatcatttgaggtcaggagtttgaaaccagcctgaccaacatggtgaaaccccttctctactaaaaatacaaaaaaaaaaaaaagaaatagctggatgtggtggtgcatgcctgtagtccgagctactcaggaggctgaggcaggagaatcgattgaacccgggaaggggaggttgaagtgagtcgagattgtgccattacacttcagcctaggcaacagagtgagactctgtcttcaaaaaacacaacacaacaaaacaaaaaaacaaaaggaagaaagaaatcagttgggtttcaaaggaatagtatttatgaaattaataagccattttttaagtgaagaagaaaataagaaaaggagaaagaaagtaagtggaaaaattaaaaggacatattttttcatccttagttctcttcaattgtttagaagtttgaaggatcaatatggagatgaaatccgtcatctctgagtacatttgaaaaggatgctgagttgcttaggatttgttaaaactagtacccatatatactcttgataggagagtgaggtgataaaatacactgagaaaaatttggctttatatatcaaaataaagtatatatcttagacccaacaattccacttttaggattttgccccataatatattcacacaagtatgtaataattttaatcataaggatatttattgcaacatttttataatagtaaacagttggaagcagtctaaccgcccagtgacagacaaaaccggttaacacaattctgatatttctgtgcagtgaaatataatgcagctataaaaagaatgatagaaacgaactgcttgaggaggtgaaaaacctctgcaaggaaaactgcataccagtaatcaaagaaattggaaagattacaaatgaaaagacatcccatgataatgaatcagacaatgtaatattgttaacatgactatacctcccaaaataatgcaaatattcaatgcaaactgtatcaaaatactaatggtattattcacagaaatagaataaaatctttaaatttttatgaaaccacaaaagaccccaaatagccaaagcaatcttgaacacaaagaacaaagctggcgacatcacactatttaacttcaaaatatactacaaagctacagtaaacaagacagcatggtgttggtgtaaaaacagacacatagactaatggaatggaaaatataaccaagaattaaatttatgtatttatagccaaatatttttagcaaagatactgagaatatatattaggaaaatgacattctctttaataaatgatgctgggaacattggacatccatatgcagaataatgaagccagatgctatctctcactatatacaaaagtcaactcaaaatagattaaggtcttaaatgcaagaggtgaaattacaaaactactataagaaaacaggaaaaacacttcaggacattgatgtaggcaaagattttatggctaacacctgaaaagtacaggcaatataaacaaaaatagacaaataaaactatattaaactaaaaactctgcacagcaagggaaaaaaaatcaagaaagtgaagagacaacctgttgaatgagaaaaaatatttgcaaactattcatcctgtaaggaactaagatccagaatacaaggaactcaaacaattcaacaacaaaaatcaaataatcccaataaaaacagggcaaatgatatgaatagatatttttcaaaataagacatacaaatggcacaaaattaaatgaaaaaagcgtttagcatcaccaaacattaaaaaaatgccaacccaaaccacaatgatatatcattctaccccagttagaatggctattatcaaaggacaaaaaataagagatgctggcaaggatgtatcttttacatccagtatttaagggaactgttatacactgttggtgagaatgtaaattagtacatccattatggaaaacagtatggatatttctcaaacaataactaaaaatagaactaccatatgatgcagcaatcccactactgaaggaaaagaaagccatatattaaagagatatcttcacctccatgtatattgtagctctatttacaatagtaaagctatgaaatcaacctaagtacccatcaatgaatgaatggataaagaaaacatgatggaatactattcagccataagaaagaacacagtcctgtcatttatagcaacatggatggaaatgtgggtcattatgttaagtgaaataagccaggcacagaaagacagatgtcatatgttcttactcatatgtgagagctaaaaatgtttatttcatggaggtagcatgatagttacatcccgggaaggatttgtgtgtgtggagatgtttggtggtggatgaaaacaggttatttaattggtaaaaacatacatttcgatagaaggaataagtgctcatgtttataataaagtagggtaactatagttaacaacaatgcattatatgtttcaaattagatagaataaagaactggaaatgtttccaacaaatataaatgataaatgttcaaagtgacagatatcctaaatatccagacttgattattacatattctatgcatctaacaaaatatcacatgtaccccataaacactttcaaatagtatgaatcaatacaaaatgaattgcttgtgtttctaccgtagggttttattatttttgtataaacatagtttgataagagaaaaatgaataatagcagatttataattaggatgccaatgagataatactagaactcacagaaacagtacagctgagttcatttagaatacacacattgtatcacaaattagctcaatgaggagctgttgatacttgaagcaagtgaattcaagacaacatagaattttgagactctggttggatataaagagcaacacatatacttatggaaaactgggcaattaaaggctcttaattttaattattactaacttttattgagaaactgcttggggaacttaaactcgattgattaggttaaactctcattattaccttagtttctatatattgtatcgcatatttgaaaaactttgctctgtgtggtgacaggaaaaataatgagaactatttagaaagtttactagccatttttcccattagaattttattattgttattattattatactttaagttttggggtacatgtgcagaacatgcaggtttgttacataggtatacacatgccatggtggtttgcaacaccaatcaacccgcaatctacattaggtgtttctcctaatgctatccctcccctagccccccccaccccacgacaggccccagcatgtgatgttcccctccctgtgtccatgtgttctcattgttcaactcccacttatgagtgggaacatgcggtgtttggttttctgtttttgtgttcgtttgctgaaaatgatggtttccagcttcatccatgtccctgcaaaggacatgaactcgtccttttttgtggatgcataggattccctggtgtatatgtgccacattttctttatccagtctatcattgatgggcatttgggttgattccaagtctttgctactaggaacagcactgcaataaacatatatgtgtatatgtctttatagtagaataatttataatcctttgggtatatacccagtagtgggattgctgggtcaaatggtatttctagttctagatccttgaggaatcgccacactctcttccacaatggttgtactaatttaaactcccaccaacagtgtaaaagtgttcctatttctccacatcctctccggcatctgttgtttcctgactttttaattattgccattgtaactgaagtgagaaggtatctcattgtagttttgatttgtatttctctaatgaccagtgatgatgagcttcttttcttatgtttgttggctgcataaatgtcttcttttcagaagtgtgtgttcatatccttcacccactttttgatggggttgtttgttttctttcttttaaatttgtttaagctctttgtagattctggatattagccctttgtcagatggatagactgccaaaattttctcccattctgtaggttgcctgttcactctgatgatagtttcttttgctgtgcagaagctctttagtttaatcagatcccatttgtcaattttggcttttttttttttttttttttgccattgcttttggtgttttagtcatgaagtctttgcccatgcctatgtcctgaatggtattgcctaggttttcttctagggtttttatggttttaggtcttacgtttaagtctttaatccatcttgagttaattttgctataaggtgtaagcaagggatccagtttcagttttttctgcatatgcctattcagttttcccaacaccatttattaaatagggaatcctttccccattgcttgtttttgtcaggtttgtcaaagatcagatggttgtagatgtgtggtgttatttctgaagtctctgttctgttccatgggtgtatatatctgttttggtactagtaccatgctgttttgatgtagccttgtagtatagtttgaagtcaggtagtgtgatgcctccagctttgttctctttgcttaggattgtctcggcaatgcaggatcttttttggttccatatgaactttaaagtagtttttttccaattctgtgaagaaagtcaatggtagcttgacggaaatagcattgaatctataaattactttgggcagtatggccattttcatgaattgattcttcctatctataagaatggaatgtttttccaattgtttgtgtcctctcttatttgcttgagcagtggcttataggtctccttgaagaggtttttcacataccttgtaagttagattcctaggtatttttttctctttgtaaaaattgtgaatgggagttcactcatgatttgaatctctgtctattatttgtatatagggatccttgtgatttttgcacattggttttgtatcctgagactttgctgaagttgcttatcagcttaaggagatatagggctgagacgatggggtttcctaaatatacaatcatgtcatctgcaaacagagacaatttgacttcctctcttcccatttgaatactgtttatttctttctcctgcctgattcaccggccagaacttccaatactatgttgaataggagtggagagagagggcatccttgtcttgtgccggttttcaaaggaaatgcttctggtttttccccattctgtatgatattgactgtgggtttgtcataaatagctcttactattttgagatacattccgtcagtacctagcgtattgagagtttttgcatgaagggctgttgaattttgttggaagccttttctgcatttattgagataatcatgtgttttttgtcattggttctgtttatgtgatggattacatatattgatttgcatatgttgaaccagccttgcatcccagggatgaagccaccttgattgtggtggatgagcgttttgatgtgctgctggaatcactttgccagtattttattaaggatttttgcatcaatgttcatcagggatattagcctgaaattatctttttttgttgtgtctcttccgggtttcagcatcaggatgatgctggcctcataaaataagttagggaggattccatctttttttgttgcttggaatagtttcagaaagaaaggtaccagctcctctttgaacctctggtagaatttggctgtgaatccatctggtcctggacattttttggttggtagactattaataactgcctcaatttcagaactttgtattggtctattcagagattggacttcttcttggtttagtcttgggagggtgtatgtgtccatgaatttatccatttcttctagattttctagtttatttgcctacagatgattatagtattctctgatggtagtttgtattactgtaggatcagtggtgatatcccctttattattttttattgcatctatttgatccttctctcttttcttctttattagtctgtctagtggtctatctattttgttgatcttttataaaaaacagctcctggattaatttattttttgaaggtttttttttgtgtttctatctccttcagttctgctctgatcttagttatttcttgtcttctgctagcttttgaatttgtttgctcttgcttcactcgttcttttaattgtgatgttagggtatcgaatttagatgttttctgctttctcctgtgggtatttagtgctataaatttcccctaaacactgctttaaatgtgtcccagagattctggtacatcgtgactttgttctcattggtttcaaataacatctttatttctgtcttaatttcattgtttactcagtagtcattcaggagcacattgttcagcttatatgtagttgtgcagttttgagtgagtttattaatcctgagttctaacttgattgcactgtggtctgagagactgtttgttatgattgctattgttttgcattccctgaggagtgttttacttccacttatgtggttaattttagaataagtgtgatgtggtgctgagaagaatgtatattctgttgatttggggtggagagttctattgatgtctattaggtccacttggttcagagctgagtttaagtcttgaatatccttgttaattttctgtcttgatctgtctaatattgacagtggggtgttacagtttcccactattattgtgtgggcgtctaagtctctttgcaggtatctaagaaatggtttcgtgaatctgggtgctcctgtattgggtgcatatatatttgggacagttagctcttcttgttgcattgatccctttaccattatgtaatgcccttctttgtctcttttgatctttgttgttttaaagtctgttttatcagagactacgattgtaacccgtgctatttttgctttctatttgcttggtaaatatttctccatccctctattttgagcatatgtgtgtctttgcacgtgagatgggtctcccgaatacagcacaccaatgggagttgactctttatccagtttgccagtctgtgtctttaaattggggcatagcccatttacatttacggttaatattgttatgtgtgaatttgatcctgtctttatgattctagctggttattttgcccattagttgatgtagtttcttcatagtgtcgatggtctttacaatttggtatgtttttgcagtggctggtaccagttgttcccttccatgtttagtgcttccttcaggagctcttgtaaggcaagcctggtggtgacaaaatctctcagcatttgcttgcctataaaggattttatttctccttcacttatgaagctttgtttggctggataagaaattctgggttgaaaattctttaagaatgttgaatattggcccccactctcttctggcttgtagggtttctgccaagagatccgctgttagtttgatgggcttccctttgtgggtaacccaagctttccctctggctgcccttaacattttttccttcatttcaaccttggtgaatctgacgattatgtgtcttggggttgctcttctcaaggagtatctttgtggtgttctctgtatttcctgaatttgaatgttggcctgtcttgctacgttggtgaagttttcctggataataccctgaagagtgttttccaacttgtttactttctcctcatcactttcaggtacaccaatcaaatgtagatttggtcttttcacatagtcccatatttcctggagtctttgttcatttcttttcattcctttttctctgatcttgtcttctcgctttatttcattaagttgatcttcaatctctgatatcctttttttccccttgatcagtttggctattgatacttgtgtatgcttcacaaagttcttgtgctgtgtttttcagctctatcagtttatttatgttcttctctatactggttattctagttagcaatttgtctaaccttttgtcaaagttcttagcttccttgcgaagggttagaacatgcctctttagctcggaggagtttgttattacccaccttctgaggcttacttctgtcaattcatcaaattcattctccgtccagttttgttcccttgctggtgaggagctgtaatctcttgtaggagaagaagagttctggtttttggagttttcagcctttttgtgctggtttctccccatctttgtggatttatctacctttggtctttgatgttggtgaccttcggatggggtctctgagtggacgtcccttttgttgatgttgatgctcttcctttctgtttgttagttttcctcctaacagtcacccccctctgctgtaggtctgctggagtttgctggaggtccactccagtccctctttgcctgggtatcaccagcagagactgcagaacagcaaagattgcttcctgttccttcctctggaagcttcatcccagaggggcaattgccagacgccagccagagctttcctgtatgaggtgtctgtcagcccctactgggagatgtcttccagtcaggatacatgggggtcaatgatccacttgaggaggcagtctgacccttatcagagctcgaacactgtgctgggagagccatggctctcttcagagctatcaggcaggaatgtttaagtctgctgaagctgcacccacagccgccccttcccccaggtgctcggtctcagggagatgggggtcttatctataagtccctcacctgggctgctgcctttttttcagagataccctgcctagagaggaggaatctagagaggcagtctggctgcagcagccttgctgagctgcagtaggctcagcccatttcaaacttcctggtggctttgtttacactgtgagggtaaaaccacttactcaagcctcagcaatggcagacgccccttccctcaccaagcttgagtgtcccaggtcaacctcagacttctgtgctggcagtgagaatttcaagccaggatcttagcttgctgggctccgggtggtggaggggggacccacagagccagaccacttgtgtctctggcttcagccccctttccaggggagggaatggttctgtcttgctggcattccaggtgccactggggtatgaaaactaaactcctgcagctagctcagtgtctgcccaaatggctgcccagttttctgcttgaaacccagggccctggtggcataggcaccagagggaatctcctgttctgcgggttgtgaagaccggagctgtccctattcggccatcttgccagcaaatcttcccattagaattttaactataaactatactacgtgaattttacttttttgttgttgttgttttcttactacttatgtttatcaaacaattaatcagctgttgatacagactatcaggatggaatggtaacatttagaattgtaaacttttaaaatgggaattattttagagatttttaacaatgtataggatttattagtgcaatgaatataagattggcctttcagagatatattataaaatgaatacatagtgagtcagattagtacaccaagttttctatatgagagcaatgacactgggctggcaatatttgattgtgagttactttatgcattaatatatttaatgggaaaaagcatcagtgatagagataaattatagcaatgtaaagatacaaactatttccacgagtatttgccttaccattcatatgcaaatatttagtttgcttgactgtattatcagttctaaatgtatctgcttccagctataaaaaccagctgttatgacctgtagtgactccaggcctaccaatcttctgatgaattgcctaatggggttgatggtctacagggtgagagagcactgccttggccaatgtaaggtctgcttagcaattataatgtaaaatttaccttcaggaagtgagtattcttcccttataaggaccttgacctgacaaaaacctcctacacacatttctagaaagatctgcacattcaaggtctccatttacatctaaggattataaattctacagatgttaacatctttttcataatcatgcagctagtttatagggtagctgaaattaacatctcagtcccttgccttccagggaagttctttgtcatattcattctggcattgaaagcacacacattacagatttctgacaattataactcataagttagaaaaatagacaatagtccaaaatattctgcagttaataagttctcaatgattatccattgttgatgatgataatagtagttctacccaatattgagtgtgaaattactatgtaaaaatagattttaaaatgtgaatattaaaaaatataaatgtatattacatttacaaatgtaaaatagtaatcccagaaaagttagtgaccaacacttaattgaacatttactacattatcagacactctacaatggcaatgcatgtattcattaattagcttaataatgtagtgacagtgaggtagcttctatttcagcttagtttacggatgaagaaactaagcattgagaaagtttctaggtactttctaatcaatgaactagatgggcaaaatataattaaaaatatctcagtgccttcaagaaacagctggtctctattttcagtgcttaaatatacaaagccttataaagcaagttagaaattaaatgtcatggaactagtagagaatgcctttcagtgacaataataattattattatatttgttagatatggtatgtctttcagactgtgctaaatatatacatacctgtgtatatattatatatgtatatatgtaaattttcatttctttgaaagaaggcatcacaatcatgggaaatgggtctaccttgtattttgtctatatcttcacattttatttattgtgtgataacaaaaactaaatatttttgtctgagaatgatggcaattaagtgaaaagtattaaacaaatgagtgtgcatcagcagaatgaaaagatgcattttaaaattcagtctgcaagaattctctttgaacttaactctaacatattcttttatcgttattggaaattgaatgcatggcttggcaaggatcatatcgtactataattggaaccaatggaactctaatttggcaaataggttcctttgttgagtaatggatcttttacaatatattattattggaacctgtaatgcattcctaattttaacttttcaggcgaggcaacctgatttctattttagggaacaagcagttacattccctgccagggtaaaaacctattaagaactattgcagaaaataaagaagattgttgtttgatttagtagtgatgaaaaagaaaattcatgatatatgtttttattattttatgtttttctctttaatgcaagcgcctccaaattaaaggataaccttggactgccaatttctatgttttgcatatattttgttactcttgggaaccatctttttctgtctgatattttggatcattacaggtagaaatgcccatattccttagacgtgttgctttagaaatgccataggaaatagccaccatagtagcagagctttttaatatgaagggtgccttggaaatgccttatttctatgtctgaaatgtttgcaagtggttggactagagctgacataatccgaagtaaacattcaagcagatacttactgtaccaaaattcctgtcattttccagtagctgtaattaaagagctagagttgaaactcatagttttacttttagtacagagccaagaattagtcacattactccatatgaatatgatttgtaaattgagtgattattgattcatttctgtattcacacattattttatcctagagtgtacaccagcaacttgcatatttttagggaaaaaaaaaaaaacacaactcattacagagatgtgccatctctaaactctaagcatcactgttactcaggctcaccctgggaattcactttccctactggaagaaatacttgctggaagaaaaacccaggccaaacagagtatgtttgcctaacctctgctttttcttagaatcatgaggcaagtgaaagaagatagtctaagtctatgcctcccacacttggtgtgcaaagggatatacaaaattgaaggacaaaatggtacagtttcttgtaatttatttttatttatatgattcaaatacttaaaaaaataatgttatagatggtgccacaaattaaattaaaaataaaattcagttttctcatgcagttgcagcacacaacatggcacatgtatacatatgtaacaaacctgcacatggtgcacatgtaccctagaaattaaagtataataaaaatatatatatattttatatatatatatatataaaatttctgatgcagactttctccatttgtgctctatgttccctggaaactcagatttaccatactgtgttattaggggcttatcaatcaaaaagtatgagtagcactgtttgaagtggatgggcattgtcaaactcttcttttctaatgaagaatgggaaatattgtaaccttaattacagaaataaaatcaataaatctagtgaattcaggagaacctgaagtggtcaacaaaaccttaagaaaaaagaaacaatctaagagaggtcaatcgtcattatatttatttttgctacctcagaagcaatgacagtgaaaaccatgcctggaatttcactacagtaaactgaggattgtgcagaggctgagctacttatatctcactcccagatacctgaggtgtcccttcctgtgccaatgacattgttattgaaacactgatggttcaatctaggtcttgcagctcactgcacagacagccaatgactgaggcaaggagtagagtattgacaagaaagaaggctttaatcgggtgctgcagccaaggatatgggagatcagtctcaactccagatccataactgactcgagttaggggtttatatagcagagaagaaatttaaccatgtgttagaaaatacaaattaggttggggtaaggaaacaaaatgagatgtctaagtgagtgatctggtgagtctcagttcttggatgctttttgagaggcatggctgggtgaggggggtcctttcctgaagaaggaactcagataaaacgaatataagtttcaggctttgataccagaagggtcaatttctatttttatccaaaagaactacttatgtgactattgggttggtttcaatattacttaatgcagtaaatagaaatttaaagaatccagacgttatttttacacagaacaagaatgcaattgaatagaaaatactttatctaatattaaattagctgattgtgtatactttgaatcatctttatgggcataatcttgtgctttctcccatctgtggttcatgtttagtggtgataaatagttgtgtacttgtgtaattatgttgccatgtggttctgtctgtcctttagaatcactgtctgtaaggaaccttacactgagaaaatgaagattattctcttggtcaatgtggacagttagtctgagatctgaggaagccgttaattgctctcccttccatcttcaaagtagcaaaggtacagaaagccccacacacaattcaaatttgacttcttctgccacatctcttctgctccagccagggaaagttctctgctttcaaggctcatgtgaatagattggacccacccgggtaagggtaacgtaggatgatgtcaatatcataaagttcatactttaattacatctgaagaattccttttgccatgtaaagtagcatatttacaagacccaggaaatagaatatggatatattgaaggaccattctgcctaccatactaaggaaacagagagtgatgtaaacaaataagatatttaataaaagtatgtgaatgctgtgtaatcacagagaagggagtaatcggagaacctaagagaaagcaggtcttactcaaactggtggagctgggactgatttagttttgttgtttttggcttatcacaaatacttgaacaactacttctctaacaatgatggtagttgatattcttggtaatttctccatgtgctaaaagcaatcacctcaggttttaataaatttgaaaatcacctatagtttgggtgaaactgaagcttaggtgttatggctcttgctcttttagcaatgaaactaattttatgtctttaattggtgttaaccgaaatcttaaaatatccagaattgtttgatggtctttgtttttaggaaaaaggagcacatagcacaaaacattaaagggtgtgtgtgtgctaaagtaaagcaaaaatagacattaaggcaatccatgtatacaatatcctttagagattttcaacaatgattaaagaccaaaactgtttttgtaaagatgttcaacgattaagttttcctcttttatcagtatgtcgtattaaatcaccataactgtattgagaaaaatccatctgactagaagaacttactatggtaaattgatattatatttattcttaaggaaaacaaatggatgtcaaaccatacaataaacaaacgtggcgttccaaaacctattttccattattgctactccatttagtatcagtaaataaacatttaatttgtcatttaggttacagatatcaaagatagttggtaaagtgaagagaaaatagcactggcctgaagtgaaaggacagaaattacaatccacctaatttctgatacattctagctacataatttacctcttagaaattctgagcctatttgcttatctctgtaaagtagaggttagattaaacagtctctgaggtcttttccaactataaatatttagaattttctaatgagataagaaaatgtccagagaaatgtatgcataaaatcaaaacaaatggatacatcagtcattttttaggagtttgactgttttcagttaaaaatgcaaatgttttctgggaaaaaaataaggcttttgagttgacttgatttacagtcattgtccaaattgtggaaagcaccacataaaataattgtttttaatggtttttatgctttagcttgtaaccacccaataatgtgactcttttccccatctttttgccttttccaaattagatattttatcttaatggaatttttttcttcctgtattttcaatagatgaacatctcattgtactcagaaccactgaacattatcaactcatttgaggtttagcctggctggtatctctcttactctttatcaataaacttgggaaattgggggaaaaaggtttttgggcagtgtttactgaaacaaccaatataaaaatgagatattgccaatttccaatcaagacaccaattcagccaaatgtttcatatattttgcaataatgtcgatagaactttgtagattcctggacacttgtcatgctcaatgtttattacagaatatgccataagtaatggaaaatcagtgaaaatctgtcacacatttaaattgtgggtttgcagaaggcatattactgagcaaccacagtaagaaatgcagaaaacattttgcccacaatatttattccttgctgttcttaagaacatttcaacaaatcagtagtaagacctatctaactccatgtctcaccttggtgtctttgcaaaagtcatcagcagtcactctggagacaagtggctgttctttccaccaatgaaggctagaattacatctcaaaacatccccaaggagtataacttaacagtgaattttcccaaactttggaaaatggatgtataatttaagcttttgccatcatggggagaaaggggattcataaagttactgcccactttataatggagtacttccttttatcttactgttagactgtataaactcccaaggagtatcctaaacttaatgatggagcaagtgtgaataaagtttttctaacatgatttaatatcctacgtgttttacttttttagcctttttgtttgtttgtttgtttctgaagaatctacagtaaataatatcaaatgctggatctcctcctctaaaacattgttaattctgtataacttgaaacaatgtccatttctaatgtgtgtgtctgtttttaaattgatatacagagaaaaaactgcatattagtctaaggaaaaagaatcattatttacaagataatgaagtacagatttttccaattttttttctatacctctttcaggaaaaccccaatattttttcttgaactttctagttgtgtacttaattttgatgtggaagcagtaaataaagaattcaaggccagagatttcaagaatgaaattctgtattagccattatctgcatgatcctggttatactactgaaattataatatttaaagtgacatcaataaaacttccttcacagtgttcctattctttgctttatatgtccagtttatgagaaattattcattcaacaaatattgaatgaacattttactgtaaacgatcatctggaatacaaaagtgggtagtattggccattatttgtagtgacttattcttttatgtaacttactaactaatgtaacattaatttatatacacacattataacactcattaagtgttcctcattcagtaacattaaatggaagaaactgtattttatgtgttgggggcttaataaaatagtggaaaaaaaaacagaaaaatcctacagtcattcatcaggagagtgccggaaagttaaataaattaattagtgtatgatttcaggtggttaaaaaaaagaacaaaaaagggatgtttttgacatatttcatttgatttcactagattttgttgggtagcaaccaaccctaagattgcccaaaaataacagttggttcctctcttatgttacatgttttctgtgggctattttgggtcagtcttctgaacttagcttgtgtcttcttcactctgatatctaggctgtacagatcatatgatctttgtagacaatttttgagacttttgcttttattccaagagaaatgagaaggtattggaaggttttgagcagaataacatgatccattgtatatatttttataagggtgatgtcaggaagaacagctgaaggctaacactataaggtggtttggactaggatagtggcattaagaaaggggagagacaagtagtctgatttcagagacattgaaggcggagctgaaggatgtgctgacagattataggtgaagtgtgagagaaaaatagattcaacatgtctcctcagtatcttttacttgggcaattgaaaatgtgctgtcttttatgaggatagctttcaggattaattataataaaattacgatgaatgatttacatttttcctgggttaggattaacgccttagaacttttcataatatagggaccaaaattacttaaaataatggagagcttactctaaggctacttagtgcatggaaatttagaaggtccagtaacttcagcaaaaatgtaaacccattaaccagatctttactgtagaaaacagccatcactgccactcagataattccccggtgcacttatcagtactataaatgagtggctccaaggtgcattaattcagtggctctttcaaattttctttacgtctccattagtttcctctggcttctgcaacaaatttccacaaacctaataccttaaaacagcacaaaattatttttgtacagtcctggagtccagaagtctgaaataagtttcactgtgtgaagtgaaggtatcttcagggctgctttcccttctgagactgtagaggagaatttggttccttttctgttcccagaatctagacctgcgtttcttggcttagggcctcttcctccattttcaaagccagcagtgtagcatcttcaagtctctctctctgcttctatcacattaaattctcctctctatggtaaaatctacctttgctccactgtttattaaaaacacttgtgattatatgtagggtccacccaaataatctccgctcatcttcccatctcaatatcttcccttaatcatctctgaaaagtttcttttgccctataaggcaacattcaaacattcaaggattaggatgtcaaggattaggatgttgaccatgttttgagaccatcattccatctactacatattctttctactttgcctctgcatctggttgactttgtcctcagctgccactcctggtgactgcatgatggctgctctttttaggaaacccagggagactctagtgttcagtggaagagaaaaggccccatctgtctgtgagtctctatttatcactgaagaaacctttctcagaagccccttaggaagtttttcttcatatctcaagaggaatctcactatatgctcattcttaaagaaattaccagtaaggagcaaaaaaaaaaaaaaaagtgtagattctctaaacaatggaatttgtttttaaaaaaaggaaggtcagactgttagatgggtcaatattagctaaacaacaaacagttctctagctttagcctagcatttctagatcaagagggtttattttatattcaacagtatctgtaggattttgcatgtgtacttcctttgttgaaatatttttatttaattatgatgctaattaacaataattcctcccaaataacaatgacacttcatgaccttgacacttatttattatactttattatctggagaatgcttctgttgtctttttgtctcctaaacataatgcatgtcagctataaatgcatttttaaataacacatctcctttgctctccttaattaaaaccaaaaataaaaataatgtaaggaaaattaacctattgcaggagtcaataatataattccttaatttcttactctatgcatatattataatgtatgtcattggaatctgtaatttttaaacatatggaggaaagtaaaagagaagctttccagaattaagctgcactgtgatacaactacagctttctcatgtagtaccataatcctgaaagcaaatgtctgacattctttttcttcagtcggaacctgatttatgggtttacatgtgcatcaatgcctcctttagatcgttgcagtatgaaaaagagtaaaagaagcagcttaagattgtctttgtcaacagttctgggaaataataatcagcctgtcatacaaagggaacaggatagaagagtactgagggaagaaatacattgactactattgaataaatgaacagtattttgggtaccttctgatatgcagtttgtggatagcagcaaccacccactcacaatcaccatttaatgtagttatttttacacacctttggggaagctcctggataatgatttgagtattaaaatttcagtaatgtattatggtcatcctgtcagattttctttgttattttaattcatgataagcatttaggaaaaatccaaattgaccaaaatgccaacttttaaatttcactgaaacaaatgaatatatgaaaatttaactataaccctttttaccctaccgctcctcagcagctgcacataagggatctgtttttctctgaacactgcttaagattctatctgtacctctctttccatacattttattctattctttattacaatttcttgtatacatatcctatgtaccttactatattttaaacctcatatgcataacaagtactttaaaatacatgttgaataaatgtttagtgccaaattatatggcaagatttcctatttagccctttgtttacaatgtcctagagtgctgtgttgaataaagaaccttccgatattagaagtcattttctttttctttttctcttctttttcctaattaaagaccagttggaatattagcacaaatggcggggcggtaggggaagcaacctaccaggttattttcactcatctttcagatttcaagacaaatttctcgtcatagtgattgtaggtgtttgggggacctcctttgcctcagtattgtctttgatgttaggcagtcacatcaacctaagcagggttttcctctgtgctcccctgcacatctccaacacctcagctggagcttgctctgtagtttacactcagtagatgttcactgaaaaacacataagaaacaaaagtgtaaaagttgctgccttgctttcttaaattgggggaaatgacacatagatcctgttaataaatacataaaataatacatagtatatgaataagtccataaataagaaggttgtgaataaatctacccaaactttgtataacctacctcatttctagagcctttcaactttatagcatagactcttatactcatcccatcctggaaggcttttcattaaatttgaaactggcctttggttttccagagaatataaaagagaaacaaaaagaaataaaaaaaaaaaaaactctccatcttaatttggagtaagttagggagctttgtcttggttattctacatcttatactcccaactgagtgccttattgatgccgattatatagtcagtttttttaagtacagatgatagcaaggttagactcctctctaatttatgctatattttcatataatccaattttagcatctctgaaataaacccttcaaaaagcagaaaaaaagtttttaattttccaattctaatctgggctcttgccatgtctatattttagaatttgtaaagtaaatgaggcagagataaagctttcatgccagagatgcttttaaataccaaaagcatgtcattactgcggtgcttcatttttcttctaattctttaattagataggataagaactgcatgtcttaagcaaattctcctgctgttctttcctggcctctagaggatcctgcatttgcgtgcatcatattttatttgtagtggacttttagatattgcagatttttgttctttcatgctatacttgacctataagtgagttctacttctgcatttctgaaaacaaaagctaagttgtattgtttctttacttgggtcattaagttaataaactgatgtttatcatcttatatttgagaatgggcaatggtataattgtttttaaattaatgatccagctggtgatcaaagaattaggtacaacaaatggaatttttaaaaaaatctatgatcgttttaactggataatatgaacaaattttgcttttcttggtggttatggaagctttaagttaattttttaaagtttttccattcttaagaggattaagacaaaattaaccaccatccccaccctcacccaccccccacccccaattttttctgcagttgattctgtgtttccaagtcttccaacaaaggtttgtggtcaaaatttttaaagtattttagaaaaaatttttgaattcttaattgattcatattcatctcccaatcttaagactaggattgctctagtcattattgaatttgaggctttgcaagttattcaaacttcttaaaacataaatcatgcaacatatgtataggagaaataaaaattaggggttggagtcagaatgtctcttaggagagaaaaccccctctgtctggcaaaacactatgttggtcattttggctgaagaatcgctctggaacgattggacaataatttctttcctgcctaaggaatgcttctaaattgggatagttgctagttaatgtattaaagaagaaaggaaaggagatcaaaggtgggagagagagtgcatagcaatatggcagaacctgaagcctaaacagaaaggataagcaagaaaatcctgcccagtagaagagagaacagactccacctggaactatgaggcttcctggttgagcttgtgttattgcatttctcatggcaccacctgacaccttgctactctcccaggggagaggcctggttttaggatacatgcagtagcaatggcggcatcattatgtagatacttttcatggcactcagattcatagggtgcatggggtcatttaaccagaaacagtctccatgcggggactgaatgcaggaagaatatgacatgctataagacatttcatttttgctatgagtgtacaggtttttgctatgtagaggcatcctgttgcatacgctagtggttttaagccggtttggccctactcacccagctacaggtcccaggcctctgtctgcctagatcttgagaaatctttatctaaaagtatcacagttagcacaaacactccacatgctaattgtgacgctacccttgtcaatttttacctttggtccaaaagtggaattttaatagtctaaactatagaaaccatcttttttgtataattaatgagctccttggcttcaccagtaagttagtcgcctgagtaaaacatcttttttattggcaatgttttctatcttctctttcttatttgctgagctgtttcctactagctctaactttacttttgcattttcaagttcgctaaccttacattctagtttctctaccatgcttaagacatcagtttttgtgtatgggttgataccaacattaacaacaaacatgtaggctgtgcacggtgggttatgcctgtaatctcagcactttgggaggctgaggcgggtggatcatgaggtcaggagttcaagaccagcctggccaacatagtgaaaccccgtctctagtaaaaatacaaaaaaattagtcgggcttggtcttgggcgcctgtaataccagctacttgggatgctgtagcaaggagaattgcttgaacatgggaggcagaggctgcagtgagccaagatcctgccactgcactccagcccgggagagagtgcaatactctgtctcaaaagcaagcaaacaaacaaaaaaacatttatagtagtttgagtatataaataccattggcttcaatagtgtttaatcttatgcaccctttcctgcagatttaaggctaagaaccttttgcatcagagatttaatttttttttaatttttaatttttttaaatgtatttattttctaatgaggtctcactctgtcacacaggctggagtgccatgacacaattatggctcactgcaatctctgccttctgggctcaagcaatcctcctgcctcaacttcctgagtaactgtcgctgcaggcacatatcactatgcctggctaatttttgaatttttttgtagagacggggttttgctatgttgcacaggctgggacatcagatattttttaaagcaatattgctattatttttgtctttgtgctttaatagctagttactgatttccttatttggtacatgcatacaaaaggacaagtctagaattgaaaggcataattgttatgtatggatttaaaaatacataaatatatatttaacacaaacatacatgcatatacatacacatatatacccttattaatgctaactattaggccctttctcagtgtatagaaacaaatataactaaaaagttaatcttctacataatcctattgagtctggtacctattatggcttactttattgctaagaaaaatgagaccccggccgggcacagtagctcacgcctgtatcccagcactttgggaggccgaggcgggcggatcgcgaggtcaggagatcgaaaccatcctggctaacacggtgaaaccggtctctactaaaaatacaaaaagttagccaggcatggtggcaggcgcctgtaatcccagctactcgggaggctgaggcaggagaatggcgtgaacctgggaggcggagcttgcagtgagcctagatggcaccaccgccctccagcctgggcgacagagcgagactctgtttcaaaaaaaaaaaaaaaaaaaaaaagatgagaccccaaaataatatgaaacatgtccagtgtcatgtaactggttagtgatggcactggggttcaacccaagcagccttgcttcaaaggctgtgtgtgctttttaaaaatcatgtaatgtttctataagaataattaactttagacacatgttaaaatattacttatgggtgttttgccacaaagaatgaaattgcacttgggaatatgcaacattttgatgttctgaaccccgacaaaatgctttttaaagttcataacataaaagaaaaataaataaaaaatgcagtcgttttgtagatattctttctgcacttttattttctcacgtgaaaacaagtagtctctttgctaagttttacaaaaagtgtattcttacagtatcgtatgcaagtgataaaagcaggtatattggaggactgggttattttacattttaacttaggaccctaagtttcaagagattcttagagttaataactgataaaaatatttattacagttattagaccaattaaaagtaaatttttagttccagtaagcagttaaaattaaatattcataactttcataaaatgttcaaaatagcagttaaaattaaacattcataccatttggaatagtgtccaaaatgaagtgctgatatagaagactcattcagattatgttatagactatgtgtgaatgtgctatgcagaattctaagatgaatctcaattccttacattccctgtctccttaagtgaccttatcagggggaatccttaaaaggattccaaagagaagagactagaagcagcagatgctctctctctctctctcctcctggccttgcagaatcaaggtttcatgagttgtacaactgcaaggaaatgaatcctggtgacaaccaaatgagcttggaagaccctgagcctcataagagactaagcctagccaacacttggttgaagccttttgagaacctgaacaaagaaaccaactaagccatgcctatatttctgacccacaagaactatgagataataacatagtattattttaagctgctaagtttgtagtaattttctacagcaatagaaaactattaagtgatctcttacagaaaaaagatagaatgtttcccaaataaaagcattttccaactttgataattttatatcatatgcacatacatggtttttctactatgcttgagacatcagtttttgtttataggttgatcctaacattaaaaacaaacttttatagtagtttgagtatatgaatactattggcttcaatagtgtttaatcttatgcacctttcctgaatatttaaggctaagaaccatttgcatcagagatttttatttttttgttaattttttaatgtttttattttgagatggggtctctgtcacacaggctggagtgccaaatatgtgcacatgtacatgcaagactaggacacctaactccacagaatttgtaggaaaaatccaatctcaacaataaattgtaagtaattctaataatcacagaatgtcagagataagccgagcagagagtgcatctagtctaaattatttctttttcaattaagaaataagagcagaaaaaagactaagagcttgccagggtctcacaaaccatgagagaaggaactggaataggagtccatcctgtgccctagaaccagacccaatttcctcatggtgcaacatataggacttgtgaattctagtcacactgaccctaaccagtttcagaatggcagataactaaaagatctgcacacataaaattctgtagtgttgcaaagcataaggattgaaaggactttacttcagaaaatacacaaacctaaagatattaggtcaatcagatgaaagtttttatcctatatggcagttcttgatgatgaactgtaaattttgataccaaagagacagttagaatttcacctatatcaatggagacctgatctctgtttactgatgaatagattactggacttgaatgagtctggatgattataccatagtgaaactaattcgcagaagaaatgcacaagaccaatagacataataaaagatgctcagacttaccaataactaaataagtgcaaataacaataacaaagagacaatttaatctttagttaacttactcaacaaatatttattgaattcttatcgtgttgaggacctcgtcttatttctagggataaatagcaaaaacattgtctttgcctttatggacttcacattctaatggtgaagatatatgttaaacaatagatcatagaaataaacctaacactgaattcatatttcttatggatgaaaggaccaggagctataagcacatacatcaggacatgtgtcctagttttgggaaattcagaggaagctttaccagaaaaataattttaaatgtaaaatataaattaattggttgagtagttgtgtttgtgtgtgtgtgtgtgtgtgtgtacatatgcaggcaggttttgaggaattatggtagaagagaaagtcttaaatttcaagctggagaataatagaacttgaaaaattggaaaatggaggttttcttaacagaaatgaaaatcatgcaaaagaacagatattaatgaaaaaatgaatttgattatgaacaaattgagtttgaaggtgctatgtgatagacagatagaaatgagagaatagagttttggtgagggacttcaaggaaggtttctttgaggtacacgtgtatcagggtatgctttgcctgggaaacagaatgggattcttgctacttctgatcttaacttctcttacagctggcatatttatggctgtctttgaagctgatggttctaaatcctaactacaatcagaatcaccatgcaacttaaaaaaaatcagtgtgaaagctgtacttctttaatattctatgtaagttgggggatgtgagtattttttaaagctgctcagttgattctaatgtacagccagggttgagagccacagccttcagatatttcatagctaacattagggtaatttatctgctacataatcttaatatcatttaaattggaaatttcttagagcagcagtttagaatataatagaataataaaataagtaccctgggaaatcatctaactcaacctcgacattttatagattagaagactgaaggcttatcttgtctaagtgacttatctggagtgaaaaagtatccttgtttcttttcagacaaacctattttagtcatagtccacatacaaagttctgtattgaacaattaacattcattctcaaaaagcatttccatatccgttatgagtcagacactgtgctatgtcaattaagttactgcctaatcctataaggttattgttatcattcccattttagagagcaaaggatattaagtaaattctctatatcatggagctattaggtggcagagtctggattcaaacccagttctaccagagtagaaagtcatgatctttccatgactgctttcattgtttcatctagcatttcttcataagcctaaaattatctattggaaaattagctgattcctacaggctttcatcaaaggcttactttgcaccttttttttttttattattttaactacttaggcccccaatatttttggaattttataatcatgaaagataagctcaggaatttcagatgataaaatagttctaaaatagtttgtattacatgataaatgcaatagaatgctaatccttgttctagaaaatttcaagatgttcacttaaaaaacctttcgagtcatttttaaaattgtagtcctgaccttcagtacgtgttaaacaggttttttcaaaatttaatgaggatgagttttcatatgatagtcattttacttcagagtattacaaaggattcaacaattttagtataaaatagcagaacttgttacatatgtatggtctattactagctcagtctaaattttgcacatctatggagtctaaaattcaattgggattacatccaactttttgtttaagtagcaaagtaaaaaaattaaaatgcctagtcttaaatgaaccatagtttgagactccattctcttctcagccactttctggcttcacaagagcaactgtagcttttggatattaggtgagatttggacatttccataaagcaaagcatgaatagaatgctggctgcctttcacctcatctcatccattaactgtgaaaggtgagagccagccttatttttctaaatatcatgatttcaatatgtagcaaatgatacaactgaaaaataatttttggtatctacattatgcttagagttaacatctaaactaaccaccatttcccactcaaatatttatttaagtccctggaaaactttaatcattattgttgacttgtttttactcattttcagatgtttcttttcatttgttatttactcattagaatattcacttagtgtaaggagagattgctgttcttggagatacgaagacttcaaggagtttacagatttgcttgggaaaattagagtatcataaatgaagcaaaactgctagatgaatgtgctggtttacatatagaatttgtttctttctagaccagtggttctcaaatgtgattcctgaaccactggcattagcacacctgggaactttttaaaaattcaaatttggcctggtgcatgtggctcacacttgtaatcttagcaccttgggaggcctaggagagaggacagcttgagcccaggagttcaagaccagcctggacaacaaagtggaacctcatctctacagaaaataaaaaaaaaaaaattgccatgtgttgtggtgcatgcctgtagtcctagctactcaggaggctgagatgggggaacacttgaatctaggaggttggggcagcagcaagctatatgatctgattgtgccacagcactccagcctatgtgacagagtaagagcctgtctcaaaaaaatatgcaaatttgaggttttatcctagacttactgaatcagagactctgggagtggagcccagtaacaggatcttcgtgtgtttcttacacacaatagactttgagaatcacaaacatttatttatattgtttaattattctgaactcatctttattactctaatcattctgaatttggtggagatggtctatgcttttaggcatcttagaatatatgtctcacatgtgtgtgtgtgtgtgtgtgtgtgtgtgtggtgtttatgtatttaaatatttttctcctacttcatctacttctcatcctgtcaactgtgtttctgagaatctagaaaaatttcaacctcaggtaattgattactagtaaatttaactacattactctttattgttaaaactccttaggtaattttggaaggaaacttctactggagacaatggtaaacaaaaacaatcaaaaaaaatctaggcttttcaagctagatctcctgatttatttgaatctttcagcagttatgtatatataatggtttattgtactaaacatatatttaacaataaaaattatattaagtacagaatgtagtatcattctcatagtattaccatagcatcataagggactgagatccaggattttaaaaactgaagatttaggatgaactatatgtcagtacgaggactgtgaatagggtggaattcttactagttaaaagataagaatttatataaatgaggataacaaatatttctagaaaagggcactggtattaatgatgaaagtatcaattcaggactactcatggcagattacccacacttagtgactacgccacttagatcccttatagtgttctgaaagcttgacattttaactgtcgctcagaggaaaggcttttttttttttttctgttttgcactgtatgctcataagctagcatagtgtctagcatatagtacctaggtacctaataaatagttttgaacacataatgaaggttgagtagacacgtgaaagtagcttgagtaagatataaatgaccaacctccagcaaaggagtttaaatagtattccgaaagttttatcagtgaaatgataaaagtgatactgtgaacatgcagatctagtaggaagaaagattacagtaggtaaagaagaaagaccaagaaatcattcagggatgaatgactattacagttgaccaagtcttatgagctagtagcaggtctagggcctaaagggtcatgcatttctgttctgtttcctaaatcaccaaactgttatgtctaacgtaattaaaaagcatgtctgttttaatgaaggtgatatctgattttttcctcattttctacattcaatattttttcagttaagctctgctatatgtggatgatcatatgcccttgaactacacttgttaatatgttcttactactgacaagagtggagggatgaattggagaacagtaagaattatgattgattatccaaagagaagtgaggattgaggcagagttccgttaaaaacttttaccatacatggggccaggcgcggtggctcaggcctgtgagcccagcactttgggaggccaaggcgggcagatcacgaggccaggagatcgagatcatcctggctaacacggtgaagccccgtctctactaaaaatacaaaaaattagcctggcgtggtggtgtgtgcctgtagtcccagctactcgggaggctgaggcaggagaatggcttgaaccaaggagacggagcttgcagtgagccgagatcgcgctactgcactccagcctgggcaacagagcgagactccatctgaaaaacaaaacaaaacaaaacaaaaaaaaaaccttttaccacacatgaagataagatgtaagtttatatatattcaaacttacggattggcataaaaatcattatcttcgaatcagtagtaaagtttaatgtgatttgaaaatttatggtgttgtgtttatattctaagtgaggaaaatgtaaaacctagatcaggagatagaactttttggagcagcaacacacacacacataggcacacacatgagttctttctttcctgttctgcagtggaatcttacttagaatcttattactatgtgcaaattagatgaagccagaagttgtctgattttggagggaggcaatgcagcaaatctgagcctctccctctactgacctcaagctcacctccaggacctcctgaaccactttgtttgtacagcagtctcccagaaagctgtggaagcctgtattttcttattaaggacaggcatagactatcatatgtctaccctatactaatgaaacaaaatctggaagatgaaaagtatgttataattattttctcaaacattattttttaataactttcttcatatttgttcctagaggccacaagttgatcaaagcacccttttgttttgttttgttttttgagacagagtctcgctctgtcgcccaggctggagtgcagtggcgctatctcggctcttcgctccacctcccaagttcacgccattctcctgcctcagcctcccgagtagctgggactacaggcgtccgccaccacacccggccaattttttgtatttttagtagagacagggttttctccctcgttagccacgatggtctcgatctcccgacctcatgatccgcccgcctcaccctcccaaagtgctgagattacaggcatgagccaccgagcccggcctcaaagcactcttttaaagtatccctaatgcactcagcctgtgggccagttgccagaatctcctcagaatctccttggggaaggatttagttttcatgtaactccactatgtaggtgattctttgacacttgaggtaagatctacatagagtacagaaatatcacaaaagagcatatattaattgaatcatgaggatttctttactgtagggatagaactcagatagcagtagttatacaagaatcaggaaagttaaccctcgaatacaatcatgacattagccagtatttattgaattttctatatcagacactcagctaatcagtttatatgcttatcttaaacttagatcatatgttaggctctatgattattcccatctacaaatgaggaaacttgtacatagagaagcaaagaaatttatttaagttacacaactaaactagtggtgccgagagtcagggctggccctggatcattgtcgtttttgttcttctaaaattccaaattttgatggaagattattttggaaaaataagtaaggaaaatggatttgggataaaggcaccagatggtatatattgttcagtttgtttataactcaactcagggtttgttgttttttttttatgtttatgttttatgtttatgtttatgttgtatgtttatgtttatgttttatgtttatgttgtttttttactaaaccaaaagatcaagtttataagacttaaagatgatactgcatgagacattaacctccagatcagctataactaggctataaacatgatgaatcaggggtctttgccacctggtggaggggtagccctctgctacttcctttctctcactctccttctatgcctggcctttggacatgccatgagggaggtatccagggcaaaataattggattattctttaccatatcccactgatatgttctcgcattacatttagattctgattgtaccaaactttgtatagtttgtgtactcaaagaagagcagagaaagtcatggtgatctggccaacaactctaatttgggttggcttttctcacctctaaaagtattagacctataattttttaacaataagagtactttactttctctactacctggccttctgttctgacatgattagtcctattattgccagccataagaataatttactttctaggcatatgccaggtgcaatatatgtatcttttaatcaattaggtaggtgtatgatatacaagagtgaattttataggctttaaaactcatatctttatctactatgactttcgatattagattatagaagtacctagaggctaatgcaatgaatttgtctaaagacttgttgctcaaattaattttatacaataattttaatggctttgtcttgatttaccaagatactatacatactgagatccagtcatttctcaaatggctgaaattagttgtcattttcaactgagttctcttttaatgagcaaattggctacttttctcttgcattgtccttgggggcaaataataggggcatcaaagaaaggaaggaatgtgcaggattgtgtagctgtgtcatgcatttgttaatgagctgaacatgtgacatttcccaaataaaactaaatatgcaaatgaaagcaatggctggattaaggcctgttcatatgtttaacctgagatcctctacaaaaattattttttgaaatgactgttttgtaatattcattttctatggttactatctgtccagatggcattgttgtaaaaactttctcagaagattaggtgtctccagcaatcctgtgctaaacattagtacagggtcactaaggtccaactgaaagggacaagatacctgaaaatttgtcaaatgcttataaatgtatttaacactgtagcctgaaagaggaaatgagtcactcattcagaattatcccaagttacactggctctcaaaccccttgtgccatattgattttgagtttctcttctttcatttcatgtccctcagggatttttctccacttggggcatcacaaatgtatttctgaggcatgcttcacttttggctccaccatttcctgcctctatgctgcatctctctgatttgttaacgtgaccatttagttaaatgcttctaagaattctctcctgcaattctgggacaggtgaacttaacctagtttctagcaatttctacctctatttgaccttgaaagagagggaatggatactggccccttttttggtagtctatcccaataatggaatcgaacttcccttcatttccccaaaatgatactaaatataacactatctatgatcaacacctgattataataccagttatggagtactaaatgtgtgtaggtagtatgatttaatcttcaaataaatttataagtacatcaattctctctctctctttttctctctctcatccctctcaatttatttacttattgaccaaggctgaaattaagtttcaaagaagttaaactatctaaaggtttagatcttgaaaatagcacatctcagatgctggacctctctaccccatatggtatctttttataaataagaaaagaacaagtttcctttacttaagaaacttctttcagaaaaattatcagaatttaaagtttttttgtaaaaagaaaaaagatacttcgctgccacctacaggaaggttttgctgtaatttgggaatctataatcactgtaatacagtgtccttttagatgtgctatccttgtgaagacaagagtttgcacaaacatacatagcagccctattgaaatgtgaaaactagtgccctgatttccaagcccttttacttaactgtaccataaactcagaaatatgtatgcaatacctagttacatgatatatgtaaattttctaggtagaactgttcaatgctttgtggctccatccctagtcactacaatacacccataccatctattccaccgtcattattcctgagggcacatttccattgctgctgtctagatcctgaatgtcctaaggacaaaagggattttagaaggagaggtgtcagaaaataaatggagttacagaaaaatgtaaatgtagcttctaagttattttaaaatatttaaatggaatagcttttctttatttcaaaactcaccacacaataggaggaatgaaaaagaaaattaagttccattattccttaagctactagacatttgtaactatgagcaatatctaaagacaaagtttgtgaaaggtggtgaatgcaagcccaatattcaggacatttggtgtctttttaaaattgtctgcattttggccaaagccatacttgtcttctaatttaaatatcaatttagatcatactagcgcaaaccaaattctccttttttaactcgaagaatttatatgcactaatggttgcaggaaactatttggagaatgtcgtttttgaggcactatatttagagacagcctcctgttgtcatagcacttctggttagtgtccaactgccaaaggattcagtcacttgttagctataacccttgtcctcagaaggaattcctagcaagtcaatctgttttcatttctccccaatgtcacatacaaaagttattaataaacagttcaaattggatttctgtctgaaatgatccagttttcatatggcttacctgccgtctaattttgttccatgttttccctgtaatgggagcattaaatatcagagttggacagaactttggaggttaactggtgggcagagctttcatttacacctgaagaaacagaaacccacagccattaaatgaatttctcaagaatgaaattctgttaggaggatacaaacagaagtagtatgtccatcttgtgacacaaagcatgaggattttaaaaactacattacatagctattgttacactgagttagctaaaaacttttgttttcaaaaagaagcacagtgtattgttaaataaatatttgtagctccaaaaatgctctattatctcaataaagtacatcaagatataagcaaggccattgtgttttaacctttatggtatgctactacctgataaccatagtctacactgtgacatttaatactgattatacaaacttgactacacaccagaaatcagaagtatttttctgacagcttagtgcaccattcccttcttagtggttctttgaataaagaagtcattctctatttctatcaatttctgtactgtggattgcatatgtccttggagaaattctgatatacacttaggaatcaccctaagatatttttaacaaaataaatgcatttctactgcctcagaatttttggcttggacttcagtcaggttaaacattagttggtacttgactacttttttctttctttaaatttttatctaactctaatataccatatctaatgtagttggccactgaaaaagaccctatttctattatggtattaaaacaattttcttataggcttggaaaaatatattcttcacaatattccttcatttatttactcaattaatatttacaatctaatatgtaccccatggtgtggcaatatgaaatcagagatctataaactgaggagccaaagagggacacagatgctagaactatatttggtctaaaagggcatttccaagctctcatgtgtatcataaatccttagtgatattcccttgtgggattatgtattgtcacattacaggtacatcatctgcaaaaggtaagttcttctctgaatatcagaactggaaattagaggaaaacagctgcatacacattgtgccaatcatcagagcatttctgggaaaagccaatttttcctgtgggtttgctcatcaaatctttctatgtttgacagtgacatcaggcatttttcatctctactgaattgagacagaatactgatggacaacatttcaattgctcaccccacagaagaaagacatttattaaaagttaagataaaagtcttcaaaaattcacacatgtgtggtattctctcagttctcttaaccatatattagaattttaaaaaggcaaacatttctgtttatagaaaaatgtcaagttgaatacagcttaatttactgactccctaaacaggttctcaaatgaaaatagtggataaactattacttatgtgagttcaaacactagggggatttgtgaaatggaaagagaaaattgtcatattaaattatgttttacaaatttcacaggcatgaaacatagtgctgtctcttaacaaaatatataggttttttatcagctattaagggaatgaaaattacatgaagaaaataggatacaagaactatgtgtttaacagtgagttatcctgttttcaaaaaacaaagcaatccatgcctggttatatatccaagaaaaatgaacacatatgtccaccccaaaatttgtacgtaaatgttcacagatgcactctttacagtagtcaaaaagtagaaataactcaaatatccatcaacacataaatgtaaaaataaaatattttgtctataaaatggaatattattggcaataaaaagcgaagtgctgatacatgttacaagatgaatgtatcttgaaaacattatgttaagcgaaagaagccagtcacaaaggagaccacatattatatgatttcgtttatgtgaaatatccaaaataggccagtagatatagagagatacatagagaaagcacgtttatgattggctactgctgggaagggattagggggaaatgatgagtgactgttaaagagtatggggtttctttctaagggatgaaaatgttctataatttcaaaactctgtgaatataacaaaattcatattttaaatggatgaatgatatggtacaaaaatttcatcttcatgaagttgttactgaacaatgcttagaaaatagactggaagagaattcacatacagacaaataaaatttaaaaaaaaatcaaagaagaattccaatgatataagaaacaattgagggccaggtgcagtgtctcacacctgtaatcccagaaatttgggaggccgaggtgggtggatcacctgaggtcaggagttcgagaccagcctggccaacatggtgaaacctcatctctactaaaaacacaaaaattagccgggtgtggtggcagacgccgataatgccagctactcaggaggctgaggcaggaggattgcttgaacctgggaggcggaggttgcagtgagccgagattattccaccgcactctggtctgggcgacagagcaagattccgtctcaaaaaaaaaaagaaaagaaaagaaaagaaacaattgaatttatcagtattggttagtgatgcttattaatttataagaaaacacttgagataattaagaatattttttcattgcaatttttgtgaagttcaatgttctttgaaccattagattcttagaagtcataaagagactctgagttactctttaaattttaattactcaaaaataagcagtagatttgatgtatctgctggtgttaaatagtatttgtaacacctaaaaatgcaaatgtacatagattgtcttctgttccaaaaacatatcaattatttataaaataacattttaaggaatttaaaatagtaaatattaaaatattttaaatgcaagtatgggaaaatatggctcactttttatctctacacttagtattatctattaaaatgttaggtccaggccaggcaccatggttcaggtctgtaatttcagtactttgggaggccgaaacaaaagatcacttgaggccagaagttcaagaccaacctgggcaacatagcaagaccctatctctacatttttttcttttctattagctgcacatggtggggcactcttctagtcctgggaggctgaggaaggagaatcacttgagctcaggagttcaagactgcagtgagctatgattgcaccactgcactccagactacaaaagaaacataaaaaaataagtaaaataaaatattatgacaaagaatttacataatgttaggaaaaactgtacaatgtatatttcagatcatttcttataggatcagaaaatagtctatattctagttgtatatttgaaagaaataatgcattcaagtcaagatatactccacatgcatccaataccacaattttttatgctgaagaaaacttccatttaaatttaattgtcattattgagcctgaagtgttttccaaggagttgaagatcaaaaaatctggtatggaagtcaggtttttattttgatttttgtatggcagttctgcatttaacatcttattcaaattaggctttctcaatatctggcacagccctctctgacagataaaaattgctttgtaaaattataggaagcaaaaatatatacaacaagtctcattagtttgctttcaaactctttgaaattcaacttgaaattatattttcttaacttgagactattgcccttaactagagatgcattgccttataacatcctattttacaaatatgttgtaatatgaatgctatatcagcataataaacttttattttcaaaaaaactattgctaccattcttaaaaaacatttatgatataataatcttttttaataatttgattaaggaagatgaattaaagattttaaaaatatatgtatgtaattatatttccataagtttatgtatacttgttgacacttcttactgtttaaaacttacacatgcacatatatacatgcatacaaacaaaaatactactgaacaggactcaacttttaatctcattatcagctaattatgtagcgccattgtaacatgtatttcctcctctcaagaagcttacatttagtattttattctgtatttccctatttgaatcttataatttctgtcatattatacatacttgggtttagatgtcaaatttaacgtttactaaggaaaaaaattaataaaagtattaaagcagtttttaatttttttgaagtttactttttagaattatgttttacagaacataatttttcttttttcagaagatttttatagaattgtagatatttttgtaaaacacaaattatgagaacattttattctcggtgacttaaaaagttccagtaagttatgttgtaatttttaaagttacagttaataaaggactatatcttgaactttctacaagacagcactctggaaggtacccaccttcaccaatgttaaaaacacattgcttgcctttaagcagcttacagtcttactaggcagagaaaaaagtgtaagcaacagtagagcaccctctcttttcttagaaatcaaagggttttctttcctcaggtggttgtataatgatgaaagcaaccctcagaacagggcaaatatgtatatttgttgacacttcttactgtttaaaacttacacatgcacatatatacatgcatacatacaaacaaacaaaaatattactcaataggaaccacatgtttatctcattatcagctaagtatgtagcaccattgtagcatatacacatacacaagcccttgcttgtcctcttacgtggatcaaatagattaattcatagttagggcaattagaaattgcattagacttcttacaagagttgttattttaaacaatgcattttttttcctggagtgtttaatctggtatgttcaaggtatggggctggcagcagtaagcttgtggagtgaaaatcttttggatggaggagcaaaaggtttgagcatgtgaacttttagtttcctcttaaagcagtggttctcagctagagattttgtcccaggggatatttggcagtggctggagatatttttgattgtgacactggagggcgctactgacattcgatggctagaggccagggatactgccaggcattctacaacgcacaggacaacaaataatgccaatgttgctgagactgaaaatccctgccctagatgggcgaatatatttagccaaccctcttcaccccttttgtaaaggccagtttaagtttgtttctatcacttagcgttgaaaaggtagcataaaacagacggtagccgttgagagagttgttcaacattgtggttaaatagggattctgggatgagaggatatagtactagaaaggggatttaaaaacaggaaggagacaatgtgagtaacagatgaggtgttttgtacaaatggaactcagcaaaagccctgaactggagaaatacaaacttatgatgaaatagaaagatcaatctatctgtgttaggtggaaaggaagagtgtcagaaggatcaaaagttacttggtaacagattgttagccttgaatgccaaactaaggagcactttagagtttttgaggtcaaaggaatcgtattctctgaaactatatatttaaatccctaagaaaactattagtataatacatagttacaaatttagaacatttaaaaataacaaataaaaaatgctgcccctctgttataaccactattattattattatcgttattattattattattattattatttatagcaacagagtcttgctctgctgcccaggctggtgtgcagtggcatgatcgtagcttactgcagcctgcaactcctgggttcaagcgattctccagcatcagcctcctgagtagctaagactaaacaagcacactaccacactcagccaattatttaaaaaaaaaaaaaaaaaaagatggagatgggggtttgctatgttgcttaggttggtcttgaactcctagcctccaacaattctgccacagcatcccaaagtactgggattatagggatgagctaccacacctggctgttaatcactatttttttagcatatttttttagcataaattttgacaaaattttctctacaagtaaatcttttacataaacaagatcattagatatgtgtgatttttatttcacttttactgtattcacctaataataagtttctcagagcatagaaactattccaaaattttaatggccagatagtttattaaatgtatacagcattttcttattgttggtcttcctgttgttatcaattaaaaaaataagactttaatgaacatttttgtgcataacatttatatttactattatgaagagagtctgatcaaatgcataagcatttaagactcctggtaagacatgccaaaatgttttaagaaacattgtaccaatttatattccagtccaaaaataaactctagttattcttaaaatgtaaggtaattcttaaccaagaaatgccttgggcaagaattttctttctttctcatatcttgctagtaggtgtcaatcatttgctatcagtgactgaaaaacttaaccattaaaaaaattatgaattcatctttttattcataaaccacgactctaataatacattaacgtacatttttttcattgcttaaaccatagttgcttcctatataaatttgttcttaacacttagtgtcaagacgctagtgttcctgagatactaagtgcctataatttgtatatctattttttatttacatcattcaacctacttccaaaagtgttggtgtaactccatctgctccatccctgactacttttttgttttttcctttttttttttttttttgagacggagtctcactctgtcgcccgggctggagtgcagtagtgtgatgtcggctcactgcaacctctgccccccgagttcaggcgactctcctgcctcagcctcccgagtaactgcattacaggggaccgctaccactcccagttaattttttttgtgtttttagtagagacggggtttcaccatgttagccaggctggtctcgaactcctgacctggtgattcgcccgcctcggcctcccaaagtgctgggattacagatgtgagccaccatgcccaaccccctgactacttttaaaggcagaaattattccctggtttcttcatgaagttttctgacaatagtttgacaacttccagaatgttcttaatgggctttacacgctaaattttttaacctaggtgggttgcaacagtaacttatctaggttatagattttttttttctaaaattagcctgcaatgcagtgctattctcgcttttcctgaaactatagtttcctctcaagctcaattcaaattgtagtccttgctaagtattctctttacattctctcctatccactttccataccccatgccgcacaaatacacttgatgttatcagtgcaattttacagtaaaaataataccattagttaataacattaaccggatttctttcaagatatattctgcataaattataagtgacatatttgaatcaaaattagtctcattcagcttccagtgacatccaggtctttagagctaccatgttccttagcctcatccattctcttattgctttctcttccttcttacatattagaactacatttacatctggcatatcttatgaagggctacatttaaaaatttgtattaaataataatacacatactaagatacttgcaattttttttttcattttcaagggctattttaattcttaacactccttacattgcttggtttataattttgcttagcaactgtaatgcattttaaggcacacttaactagtgcttttaaaaattgtgttctaacttgggtctgtgtgtgtgtatgtgtgtgtctgtccacatgtgtaagcacatgtgtgcatgtgtgatggtgtgggtctccatagggccatgaaaaaggtattgcgtgaagttttagttatatttatattttttctagttaatataagtttagtaatatattcaaagttttacatgatcacttgcattgaaaataaatttggagaaatgcaagcatttcttattctattcagtgatgaaagctttatatttttgcgggacataaactagattactgtaatgctgatttcacttataatgcaacttctaatgacagaattttaataagctcatcttgatcaaagtatcagttaggttttgatatataacaaacactcccagaccttactggcttaaaacaagtgtcagcaaactgttgcctatggatcaggtccggatgctgcctatttgtttccttatttatttttgctgcctgtttttgtaaatgacattttattggaacacagccttgctcatttatttacttgttgtctgtggctgcctttgtgctacaatgacagagttgagtagttgtgatagagaccacatggcccacagagcttaaaatgtttactatctggccctttacagagtaagtttttgcatccctggcttaaaacaacaagcatttgttagctcataattctgtcagcagttaggattcaactcagcagagcagttattctataatggcttttcctggactcactcatgtggctacggtcagctggcgggtgggccaagtttgtttgtcatagagggcctcatttttatgtctgatggttgttactggctgttagctgatgtggtcaggaagactgagtcatatgttttgtacaggctagcccagacttattcaaatagatgctgttgtaggacttccaaaagcagcaagggagagtaagctccaggaggcaggaagttttcaagcctctgattgtatcatatttgctattttctcattgactaaagggagtcacggtgtcatactgtattagtctgttttcgtgctgctgacaaagacataccccagactgagtaatttataaagaaaaataggcctcatggactcagttccccatgactgggaaggcctcacagtcatggtggaaggtgaaggccatgtcaaacatggtgtcaggcaagagagaatgaaagctatgtgaaaggggaaaccccttataaaaccatcagatctcatgagacttattcactaccatgagaacagtatgggggaactgcccccatgattcaattatctccccctgggtccctcccacaacacgtggggattatgggagctataattcaagatgagacttgggtgggaacacagcaaaaccatatcattccgcccctggtccctcccaaatctcgtgtcctcagatttcaaaattaatcatggcttcccaagagatcccgaaagtcttaactaatttcggcattaactcaacagtccaaagtctcatctgaaacaaggcaagtccctttggcctatgaggctgtaaaatcaaaagcaagttagctacttcctagatacaatgggggtacaggcattgggtaaatacagctgttccaaatgggagagaatggccaaaacaaagggactaaaggccccatgcaagtccaaaatccagcagggcagtcaaatcttaaagctccaaaatgatctcctttgactccatgtctcacatccaagtaatgctgatgcaagaggtgggttcccatggtcttgggcagctccaaccctgtggctgtgcagggtacagcccctctcctggctgcctttgtggactgccattgagtgtctgtgacctttccaggaacatggtgcaagctgtcaatggatctacaattctggggtctggatgatggcagccctcttcttacagctccactaggcagcgccccagtggggactctatgtgggggcttcaaccccacatttcccttccacactgtcctagcagaggttctccatgaggactccactcctgaagcaaacttctgcctggacttccaggtgttcccatatatcctctgaaaactaggcggaagttcccaaacctcaattcttgacttctgtgcactcgcaggctcagcaccctgtggaagctgccaagccttggggcttgcaccctctgaagccatgccctgagctgtaccttggcccattttcgccatggatggagcctttgagatgcagaacaccaagtccctaggcagcaaacagcaggagggtccctggcctggcctacgaaaccatttttcctcctatgcctccaggcctgtgataagaggggctgctgcaaaggtctctgacatgccctagggacgttttcaccattgtcttggtgattaacattgggctccttgttatttatgcaaattctgcaaatttctgcagcacgcttgaatttctccccagaaaatggattttgcttgtctattgcattgtcaggctgcaaattttccaaactcttattttttgcttcctcttgaacactttgttgcctagaaatttcttccgccagataccttaaatcatctctctcaagttcaaaattccacagatctctagggcagggacaaaatgtcaccagtctttttgcctagcaagagtgacctttactccagttcccaacaagttcctcatctccatctgagaccaccttagcctggacctcatttttgatatcactatcaggattttggtcaaagccatccaacaagtctctaggaaattccaaacttcgccacattttcctgtcttctgagccctccaagtctctaggaagttccaaactttcccacatactcctgtcttcttctgagccttccaaactgtttcaacctctgcctgttactcagttccaaagtcagttccacattttcaggtaactttacagcaacaccctattctactggtaccaatttactgtattggtttgttgctatgctgctgataaagacatacctgagactgagtaatttataaagaaaaataggtttcatggactcacagttccacatggctggggaggcctcacaataatggtggaaggtgaaaggcacaccttacatggtggcaggcaagagatcatgagagccaagtgaaaggggaaaccccttttaaaaccatcagatctcttgagatgtattcactaccacgagaacagtatgtgggaaactgccccctttattcaattatctcccctcaggtccctcccacaacatgtgggaattatgggagctacaattcaagatgagatttggtgaggagacagccaaaccatatcacacatcaagcatcagtgtgcaaagggtctgtgcaaatgtgtggatacagggaggcatgaaaaaactgtggactctcactgtgaaaatctatcacctttggcttcctaattttaccaataagaaaaataagtcccagagaggtaaagtgacttattcatgctcatatagctggtcagcatctaagcctgtatttgatccagaatcttctgctttgcagtaccaatgtctctgtttttgctatttgtcaatacacttgagcttatcatcagtgaacaattatgtatcctacatggatggtataggatagtagttaacaacatgaacttggatttcagacctcagttttattcatggcttcactatttcttaggtgattttgaacaaatggctcaaatcttctgaacatatttctcccctgtcacataccgatgacagagtctacctcataaacatgcctgatgagtaaatgagatgcactctgtaaggtattgtgatagtatcaaactaaaatatatgctcaaaaatggtaaatagcattagtgtaattatcctattttatagtttgtagtccctttttcaaaatattgtttattctttaacattttcaccatttcttgaaaagcacaaattaatttttttttaatttttcttttaatttcacctttttagaccactgatttttaaataatttcagtcttaatccttacagcttcatttgtcaattaaatggtttaatatgcatgtaataggtgacctggtcatattaagtagcatcttcggcctttgattatcttctctctttgattgtggggcaatcaaatattctaggggagacattatttgttggacatattaattccctgaatctatatatttctcctcaaaacaatctaagagtggctgccaaatttactgtattctagaaggtgaagcttgtttctttattcccagcagactagtataccttaaggcttcccatctactttgatacctggtatagaaaaaattcagttttcttgctcctatatatttactattgccttatgccattatcactttttataagagagctgagttcaaggaatgattccattcgtttcttactctgttaaaccatgttattagcataattattttagattaactgatttggatttttaaacactagaaattatactgcatcattgttttctctgaagactatataaatatactagtacagtctttcttagaagcttagattggatcaaattaaatgccaactctctctatacatatgtatatatacacacacacaacattctttgactttgttctcattattttactgagcatttatattgttttacttttacaaagttataatgtatctttctttgtctgtatctatgtctgattttaatgtcctaatttcaattgaactccaccagggtagctcaatttcaaatgttcataacattagcaatgccagtcattgagatattacacttaactcatatattatttcaaatgacatagagcatttcttttttttccatttgaaaaagcatgtgtcacgtgaattctaagattcatttgatagcaggtgtctagtttctatgatcctctaggtttttgttttgttttgttttctccaagttgttttgatcttttggatccagtctttaaaagttagtttcatttaaataacaaaggcttgtagtttattcagaaaagtgactctctctctatatatatatatatacacacatatatataatatatatacacatatataatatatatacacatatataatatatatacacacatatatacatatatacacatatatatacatatatatacacacatatatatatacacacacacatgtatatatgccctaaataatataattcccttgactatacaagaattagaaagagcagcaagaaaatcacgcttaaatttttagtttctattctaaactgctggcaagggacaaacaaggctattagtagggacttgtaatcatgtgcagaacaatgttgccctaaaaggaaatttacaagtgtaagtacaatctcccttttgttaattatgttaatgggaacttgcatgctctttctctgtcaaaaaaacttgaggaatgtagaatattctcatgtcatcaggataagtatcaccctgtagtgacattcactaccacactactgcatgactacagatttagacattcttaaggagctcaattcttgaggacatggaaatatgggatctaaggatttaggatcacaagataaaatcaagttttctattcagaaatgctgaggtttgagggagaaatacatcttagttggaatgcgtaaaatgttgacttggaagacccttttgagattacctatgggaaactctgtatctgttgacaaaaaaaactgagacctggagtacacaaaagtcttctgtaaaacttgagtgtgagttactgataaaaggatataattaggacaagactgtgaaatttaacattatatctctgtgttttcttgggccgggtaaggttctgaaactgcccaaggggttctgtgtatttggtactgacccacattctggacatgacttccctggggatgatatagggtctaagaaacagtctagtcacatttacggtttccacatttaacacataataccacagggaacatggttaaatgttgatttcagataaacaattttttttagtataaatatatcctaagattgttttagtgtagtagggagcttcaaaatgaggcctgcagatacaaccaccacaaaggactagccggaggcagagagtggtgtggactgtctcagaacctgagatgaactcagctccactgtgaaagggagtgtggttgaaacgggcctgatgcttgtgcatatccactctggtggggtcagtatgacagagggagttcatgcaggaggccatcttcaaaagtgtgacgtcacacagtagattctctgcctgggactttggaaatcaagacctgagtgtgtgcaaaacggagctaacaggaaccaggcagatcatcagggcctatgctacaaaagctgagcttctggactgttttataattcaataaacaggagtatttgttgaggaactaaagttgatacccactttttattaactaggccaaaatgatgacagtttaaaggaaaattatagaaaaactgtgtgaattaatcgattgaaaaaaaaatcatcaccactgacactttttccacttggttcatattgcgtcaggaactgtcttgggctgatcctaaaggtgtaaaacagcagcgactcctatttggaggatttcttaagtctagagggtcaagaataggagtagaggcctttggggcctttgtataagcaatgtcattatccctggcttccatatgaaggggaagtcagcaatcaaatgatgaccacatattggtgaggaagaaaaagaacgtcaatcactacacataagaaacagataccggccgggcgcggtggctcacgcctgtaatcccagcactttgggaggccgaggcgggctgatcacgaggtcaggagatagagaccatcctgactaacacggtgaaaccccttctctactaaaaatacaaaaaaaattagccgggcgtggtggcaggcacctgtattcccagctactccggaggctgaggcagaagaatagtgtgaacccgggaggtggagcttgcagtgagctgagatggcgccactgcactccagcctgggcgacagagtgagactccgtctcaaaaacaaaaaaaacaaaaaacaaaacaaaacaaaagaaacaaacaacaacaacaacagaaacagatacctttaaaattataaacaaataagttcaacaatactgttttaaagttgaatttatcatattttatttgcacaaatccattctccaccatacagtaaatggttgtattgaattataaattaagtataaaaaataaaaacgatagtgtattcagttgtttcccctactctgaatttttaaccacttgtttttccttaggatttgaaagaaagagagagaaagagagagagatacaaaacgatacctgactgaaacctgaaaccacactctagtgcctatatgtatactccatacaaatttggtatttctataggcaataccaaaaaagatgtaggtacagataaagatacagcagtgagtattcagatgattgttggcttgccactattgtggataaaattattacttttcattgatttttacaagaattgctaaatgaaagtgtacatgtaaaaatacctcaattgcttacataaatttaatcaagtttcattatgatctaaacacattattagtagtcagcactccgagatattatggcaagatagcctcttataagcctatgttcctctgttctcttatgttataatattctaccttcatcccttctcatggtgcaacctggtgagaccacattaatgcaacatttttcaccctcccaaaagccctcagctcccatgaccatgcacggggaagtagagggctgcctaagcagaaatgtgtcaaacctgagttctgaatcactacctcaattaatgtttgaattctacccagtctttctgtactctcttaacccaactacaactagtttagacgagaaaggatatctgttgggataatacatccaatctttggaagaccaggagtggaattggctgaaggatggctagaattaaggaaaattgaaatctaccgactgactcactttctctccaccaccttcctgcccccttctccccacaagcttcctgcccctgccacctaccttctccttcccttcctttattttgtttttgcacataacacacacccgctttcttctctctatgaatgcttgtttcattattttctgccacagaaagggtgttattttgttttattttagtttttctaatatgatgaatgcatatgaccattagcatcttaacattttagttggccttgtattatttagcccatttaccttattctgagtttttaaattttcagaggaggattcagcttggcctacgttggtctatgcccatgcatagaccagttgaggtggttagtgggttgagcgcctgactggtccaggtggggtcagatgtctctcctctcagatattacagctattctaacagagaggaagcaaaggatgaaatgtatatggcaccatataaatcattttgatttaggaagtcagcccaaattgtaccctttgtaatattctgtgatattcttatcattactcttttatttctgtgcttgcctaatcaattggatatgatgcatactgtttacctcctggctatgaatttttctctctgatggtgattttgactctttgcctagcaattttgctcagaaggatgcccctggtttgccatagcccctgggagcctttctctaccagtacctcctctccagttagaggtcaagtacataattacataaagatttgagtggagcaagcaaagtaatgttatgctgtggagcagatataggcaaattgtttaggaccagatataggcaaccttttctccttgtatcacaggcagttaattgagaagcaaaaacgtgtctaaaaccagtatatgttaagttcttcagtcattaatttatcttcttatcttattaacatttactgagcattatgccagccactcaactcagtgaagaaaaattaacattttttgtctgtacttagggagccttcagtcttgaggaggaaacagattctaaccaaaattcaatcagatatatgtgctccatggcctgaaatgtattgatatatagagtatataatgggatatttatcataatttgaacattatgaagaaagaatggtagaggaagtgatggaactaagatgtgaagaaccaacaggagttaagtaaatagagtatttataagaagtgggtgggatagggctagaattccttgcaggggaaacaccatgtgcaaagatgatgtggcaggaggaaacctgccattttcaaaagacacatgatgaatactgagcctagagaagcaggtagaacagataaaattttatcctacacgttagtggcaaaggcagtcacttaagactttaatgggacggagacttggtcagttatctgataactgattagttgaatttctcaaatcattgacacaaagtgtaaggcaaggatagctcaaaggaaataataaaaaaccacttgacaaaattacagttaagtgccacataatgacgtttcactcagtgatggaccacatataccccaatggtcccataagattataatggagctaaaattttccatcactttttatatagtatactgtatttttattatgttagagtgtactcctacttattaaaaaaaaaaaaagctgtaattcaagcaggtccctcaggagttattccagagaaaggcattgttatcaaagtgacagctgcatgtgtgttattacccccgaagaccttccagtgggacaagatgtggagatggaagacaaagatattgatgatactgaccctgtagaggtctaggccagcagcccccaacctttttggcaccagggactggttttgtggaatacaatttttccacaaactgagggcaatgggagagggtgggttggtttcaggatgaaactgttccaccacagatcatcaggcattaaattcttataaagagcacacacctagactcctcacatatgcagtttacagtagtgtttgcactcctgtgataatctaatgctgctgctgaactgacaggaggtggagctcaggcagtagtgctcgctcacctgctgctcacctccttctgtgcaacctggttcctaacacgccaaggacaggtactagagcagtaccagtccgggcctgggggttatgaatccctggtctaggctacgatgtgtgtttgtgtcttagtttttcaaaacagttttaaaagtaaataatagtaataatgactaaaaaattcttaaactgtatagaataaggatatttaaaaagaaatttttgtacagctgcacaatgtgtttatgttttaagcttagtgctaatctaaaaactaaaaagtttaaaaaacttaaaagtttataaagtcaaaaagttatagtaagctaagtttattattgaagaaataaaaatatttttgtatacattttctgtagcctaagcatacagtgtttataaaatctatagtagtgtaatgtcctaggcctttatattcgcgcacctctcacctagatcaacttccagtcctatagcctccattcatgctaagtgccttatgcaggtgtatcacttttatcttttatactgtatttatattgtaccttttctgtgtttaaatatgtttagatgcacaaacacttactattgtgttataattgcttatggcattcagtattaacatgctatacaggtttgtagcctcggagcaataggtaggctatactgtatagcctaggtgtgtagtaggctgtaccgtctaggtttgtgtaaaagcactctatgatgttcacatagagaataaattgcctaataatgcatttctcagaatgtatccccctccttaagcaacacttgaccctattttaaatcacctcatgtgaaagagcaactctttgaggttagcagagccagatgtaaaacactctgtactatacttggcaaattaaacattcttgctaattgttgttgttattgtcctcttccttttctttgcatcatatctacaaagccatgttttctaaacatatattgaagctaccaggatttcaaaaagcaagagattttatacagcacataagaagcaagtgaaaaaattgtaatatatatttggatttcttaaaagtcatcagagaacagagatttgatccttttgtctacaagacactgcaattattgctgcttatcatgagtctcctgggagacaggcacccgccagagtaaatacagatgataagcatagcttatagaaattctgtccacatttgagtctttgtgacccctgagcaggacagaaaatcatgtcagggtatgtgtttagaaggatatcctctaatctcattctttccttcccacatctggcagtcaaaaggatccccttccttttgggaatcttttactctatttgtaatgtgaggactgcaaagataattaaaagtcttcagtcatctcgattgtcactgagcacagccttcctctaaatagctgatggggctaaatcgtttttatgctttattcctttgccatctactgaagatgttacatcatgcacaccgagatggccatcagcctggcaacaagaaaaaatagataaagtcttgcctatttgacaaactaggacatgcactgtgaataataaaaagttggcccaaatattaaacaaatatattttattatgtaattcatattgtttattaccaggggaaaaatccaaaacactattaagcaatcttggtaaatcaaagccttacagttattacttttggattttaaataacttatacattcagttacttacttttatatgcatgcacccacagatgatttgccaacttacaataaatatccacttataaatgataaaaggtaaataaacaaaaatttaaaactggaggaagagaaagtatgtgattatgagttgacttgttctctgcggacagtatgatgattagctagatagctccttttgcaaaatttgctcagaaaacgtgctttctttaagattacggggaaatgtgttattattttcaacataattacatatgtattgctatagaattagggttgtttaatcttatttaaaattttgtttttggatatttttctttttaaaaaagctgcattgctggcaagagtgatattctacatcattctacttcacagagttatcatgggcttctttcctgatgaagaactacagttccatatagccaatgaataaaagcatttcattccctgtgaaaattagagtttgcctattgcaatatacatatagctctatattttaaaaaatcatttttttcatcaatgtatttaatgcagtaaacttctctttatagaatgggctgatactacccaagcaaatgccactctgagagatttttcttccttcgtccaacagatttttcttgaaacagttgaaagcctccagcccttataaataaagctgagcgatgaaactcaattataattagcatcttgaattcagacatgtactatgttttaattggaggagaattggcttttagttttatgcgttaaaagagttgtttggttacatattcctgagcagctgagccgctgagtggatgtttaccatcaaagtttctgggcaatttagctactgcatgccttgtcttctttattaaaagagtcagaactttcttcagctggccccataagaggaagagcataaaattgctggtactatggcaattactgatggaaatactcttctcttggccttaggaagaaggattccattctgtgaagacccacagtcccttaagatacatatttgtcacttttgttcataatcgtatgccagacatcagagtagtgatgggtcaccccctttatttctacatatcagaaatttttttaatcatcaaatttaactgtgaagctctgtatccttaaaaggtctattcatttagaaaaaataaaataaaatacgtggccaggcacagtggctcatacctctaatcccagcatttgggaggccaaggcagacggatcacctgaggtcaagagtttgagaccactctggccaatatgttgaaacctcatctctactaaaaatataaaaatgagccgggtgtggtggcgcacacctgtaatcccagctactcgggaggctgaggcagaaaaatctcttgaacccgggaggcggaggttgcagtgagtcgagatcatgccactgtactccagcctgggcgacagagtgagtgtttgtctcaaaaaagaaaaaaaatacacttcggctctgtgactgtgtatgtatttgtaaatcaaactaattctgaaatatatttaatttggcttttttaagtaaaaaataatgaaaaagaaatcttggtgattatgctaatttatctatcgctatgtaacaaatcatccccaaacagtttcttaaaacaatactgatcactcattaatatataatatcattaatacataatatataatatcagaataataatatctcttattactctgggagtgactgggttgggctcggtggctttccctcagggtttctcatgaaaatgggggagacaatggaggaggctggtgttacttcaaaggctttagcttggcagttgatgatggcagctggctggaagcctatctggagttgttggcttgaaagtgtacacataacctctacttgtggcctgtgattactcacagcatggtgactggattccaacagcaagaagagatagagatggagatgaaggagtggcacacagacactattgcattttgtgatctaactttgcagaacacaccatttcatgtccatcgtgctgtattgattgaggctgtcacaaagtttcatgcagcttcaaagaaagaagacataggttctctctctctctcttttttagtttaaaaaattatttttattcttaattgacaaatagtaattgtatatatctgtggggtacaaaatgatgtttgaatacatgtatacattggtagaatgagcaaatcaggctaattaacatacccatcaattcacacacttactattttttgtggtgcgtatgtttacaaactactcttttagaaactttgaaatatacaatacattattattaattatagccaccttactctgcaatggatcaccagaaattctaaccctgaaaccaacatttcccctttccctaacccaccctctcagcctctggtaaccatcattctactatttctatgagttcaactttttcagattccacaaataagagatcatattatggagaagttgcaaggtcacattgcgatatgagcaagtggactactgctaaggccatattaggaaactataatctgttcaaagtgactcactaaggatcacagagtgaacttgtagtaatattagctaacttttattgggtggttgccatgtgctctgtgatgttctgtgtgatttattatacaggtactgtcattcacattacacaagctcattcatataatgtggattttattgtattatccattgtgaagattagaaaacagagctaagcaacttgttgtaaatcacataactcgaaatgaagatacagagcccaactcttaacctcgatctgataatcctactcactaggaaaaaaattaaaaaaaaaaaagaatggaaagagtttagtctcttattttagaggacctactatttagccatatgaccttgatttacttaatttttatctgtgaaaggtagagattcatgtctaaaaatttgaatagtgatagtggacttttagtgtgattgtgaaggctaatttataatgttcacatgaaagtgcctagcatagtgctggtcacataagggttgtccaaaatagactgttttgagcatgttatttaatcaattgaacatgttatttaattaataggatgttttgtttttctgttaattttaagtaatttgatattgctatatggacaatactaaacttcatcttgttcaaagacccctatgtagccctctaattcaattagttggtaggtattacaaatgataacataaacaattacatttctgacaaatgaaaaacttttgtagcactgaattttggtatggcatattgttttataatcaaatattttttagaaaagatgtggatgccagtatacaaacatttttacctcataattatatatatttatacctatttacatatgattatacacatataaatatgtatacttatgcatatatcttattccacatattattttatatatatagtaaaacatataaacagtttcttccctgaacctttgtgcttcttggagcatatacttggggaagtgaaccaacatatagcctatagttccagaattgaagtgataaaaaattatctattttttcctttgacttagattttattttctcctgtgtaactaaaatattttgtgttcaataagtgtttgttgattgatcaaaggattttaaatctgagattaagcttaaagagggattattgcttgtctcttgctaaatatcattttgggaaaagcttgaaaatagccaagccccttttaagagtccaaatttgatctgatgttaatctaagctttataaagactttctaggctttctgacattgcgaaatttggttccagtacatcttgtcttggcaggagttcaaaagtgtagaaactgttcagctgtcttataaaattattgtggttaatttaaaatttggttatatagatgagtaaagggtcagagaacatacatggcatatatttcattaccctaaactgaatcttgaaggaagtcacttgcttttttacttttttatagtcacttttatcagattcttcatttcccgcctcctaaagttaatgctttaaaacaataaatgttcactttatgctgtgctaaaggtatcataatcctcagataatacatactaagtactttgatttaaatagaatatgaaaagtacagtaactagaatgaaagctgaggtcccatcttaatattcattttagacaaatttatgacagatttaggtgtggtgatttttgtacattaacatcaaaatcaacatttttattaattggcagatgtatgcatgtgtctctaattgtgtttagaggaaaatatttaagcgctttatttatttattttatttttttcaaatgtagcagtcattttctagcttattgcaggccctgccatctatagactgtgatgccgtcacctaaatgtacttgaattcataggtagctctgtatgatatttgttaccagaccttaaaatgcaagacaactgcatttatggtaggaaaattaatatattgtctaattgtaggaacaagaaagaaattccttaacattagtgcttctcataagacaaaccaataggaaaatgtgttggaaaaaatgcaataaaattttaaaagaaatgatttctaaatctgtgtcataaataaaatttcagataagtttctttacctaacttatagttggccagtgaccatcctttgctcctgtcagacagagtaattactcaggcagtgtgcttttgcctaatggtatcaaaccagcttcaaggaagggacattttgaggtccgatcttggctattaccgggtcaaaatttaaactctttctcgtggttcctatagatcttgaaacaagaagagacgctgagaactaacatacctgttactcatggaaaaaaatcaagtacaatgatgtctttttatgttatggagagcatgctgaccacaacacaaaagagaactaagtttacttttcacaaggtgaacaatcactggatcttgtctttagtgattaatggctgtaaccttttttttctatctccttcccagtgcaagtataggatgggagataaaagcatagatgtctcaaaatcacttttagtcacttacctggtgttgaagattttgaaatgcaggtcaaatttgctgacttaagatatataagatctgcagaagaaacatctttgcttgaaattgaaggagcagagaagcagtaggccttcactgtctgatttaggggatcaaacttctaggctactacgtattactgaccccttaggtaaatatgaattccctataacagactataaaactgcatttgagtggaaatctagtatcaatattgctaaaaaaaagataaaatatcacctctgtgcataagaagcttatgtacaggggtcatattttagtcatctttttattcccagtggatgacacaagatttttgagctacccaaactcttccaaacaatttctcacctcatgagagaagagcatgccattagtttaaagaaggcacgtccaaaagtgtattctaaagaactcacatctctcaagcaacctcatgatggacatttagaatgactctctttttcatggttctcataatttgtctggtacggaaacttttattttgcttaacctacaatctccaaattaatttggtcagataatctatcattttggtttctcgctttattttttttatttttttttttttttgctatatgtaccctttgacattctgtagaactaatgtttaacacgatccatgttggaaaagtaacatttcttgttttggtgaatagctcattttcgcccattccctaagtttcttttccaagtttttcttcaataagtgctgccaaaacttcctaacttagaggttgtagaatggtaataattcgtaatttttatgtatgttcttaagtatgaggcataattgtttacaaatttcttaggatcaccccaaaaaacgttgactgagagcctcctcttgacactttaacccttactgcttgcctccactctgtatgtattagtccgtttccacgctgctgataaagacatacctgagaatgggcaatttaagaaagaaagaggtttattggacttacagttccacatggctggggaggtctcctaatcatggcagaaagtgaaaggcacatttcacatggcagcaggcaagagagagggcttgcacagggcacctcccattttaaagccatcaggtcttgtgagacctattcactatcatgagaacagcatgggaaaaacctgcccccataattcaatcgtctatcactgggtccctcccataacacataggaattatgggagctacaagatgaggtttgggtggggacacagagacaaaccatatcactgcgttacttcccattgccacctcgttgtatttatttgtcttctttctttctttctctaccatcagggacataatcctcttatctcccttgccacttctttctctcctctggctcccagggaagtcagccaaaatgaaaagcaaataaacatgaaaaacagtgagatgtatgaattttcttttatttctacaatcccataaaccaacattaagtgcaaaaataatgttgggacattcagggggaaatatctgtggaaatgacacaaatgtgacagcaactataactggaaataacgctgaatttataaagtgttggatcataaagtatttagagaatatggtaatgtgtgtgtaaattatgaaaataaaaaccccactaaaacatgtttaaaagttactgtataaaactacattttgtctctaacttattgtttagggattaattttttacgtaattaataaagctttaatagggatcttcttattttaatacctctaggaggaaaatgcacatagctttccttctattttctgaaacatggatcttaatcatttttgattaagttcaagttgcaatgtcatgaagtctgactttggaagtaccatttaggcatgggaatttgagatactattgtctctctaggtatgtaggtttctcattaatatgaactattaacaattatgactaatcaaactagttttactttgtgtaacaccttgtagtcaaagattaaaaaggtttgattttctagtaaagttgccttacattttatgcatgtgaagattttttctctttgaccctatagcaattctgtatttttaaacaaagttagtgagtatttagtttgtgctcacagtaaatctaccagtattaactgccttaagacattttattttatttgttttattatttatttattttatatttattgtttatttatttatttattgagacagagttttgctcttgttgcccagactggagtgcaatggtgtgatctcggctcactgcaacctcagcctcccaggttcaagcgattctcctgcctcagcctctcgagtagttaaatacaggtatgcaactactagatacataagctttggaaattttgctttaaggattattttaaaaatacgtaaagagtaccaggcacaaactaaaacctcaaaaagtgtacttaggtttccttttctttcttcatcactgtcgtcataggcatcatcatctaacaatcttcctgccctaagtagttgtttatttgaactctgcaggaattagaactattttaaaacatgtatcttggccaggtgcggtggctcacaccgcacccccaggactttggtaccccaagggggatggatcacctgaggtcaagagttggagagcagactggccaacatggtgaaaacccatctctactacaaatacaaaaattatctgggcatgatggtgggcacctgtaatcccacctacttgggaggctgaggcaggagaattacttgaatctgagaggtggaggttgcagtgagccaagaccgagctattgcactccagccggggcaacaagagcgaaactccatctcaaaacaaaacaaaacaaaaatagccaatcgagttggtactaatgtttcactttatgaatacagagactcatactttaaaaacttaaatacatttccaaagcttttatatctagtagttgcatagctgtatttaagagttggattattcttttaaccattattgtgaagtatgtgattgctagagggtttaaaaagcaggagaagaaaaaaacattcttgggaggccaaaggaaatacaaaataggaaatttttatttcctaatgtggtttaacttatttcatgttcaattcttgcttttggatagaaagtgttctatcactgatttggcttatagtatgtgtcaaaatttaattcttcaaaatatctcacatgccacctcattcttgaagctttaagaaaatcccttacttgatactatctcttccttatttgagcttacttagcttgcacccttcatatattgcctcacctactttatcaatctctctccctgccacatctgtcttccccctgtcccaatacacacacatatacacatagattaaatgccttcagtagaaggacagtttcttttttcatagtttgtttattcatttcattattcactcattaatttattcatacatctaacatacctgtattaacaacacacaagaagcaagtcacttctttgtctttcaaagtgtgcattgtctaatgaatgaaaagagcgagtgcaccaatatttatcatgtagtgcttgtggggccaccttgcacattttgtacatagtaggccatcagtgagtattaattgaacagataggtatgcattgtgtacggagtcattttgttgaaaatactagtataattttattttggaaatcatagataaaatggtgtgattaaatactcttaattattcaatactttgattatcagattacctacgcactatatggctttaccttataacctcaggttactctgtatgtaaaggaatatatgttgattatatttaatgctgtctctgctttacacaggtttctataacatatgactaatctatccttggaggaaaactggtccagggtatgttggaatctacattttgctcagctgagtgatgatgaaatttaatttcatttttcactatgtttagggtaaaatgtctgtcaataatatgtaaaatgtcaaactttatgtcatcattagaaataatatttctgtttgagaaattagatacattgtgtgaatgttctaaaatgctttcattattgtttcatttttattattaatgattaagaaatgggaaaatgagaagagttttccagtatactgataatcaaaataaattgtgtaataagctctcaagtagactcatgtctggagtccaaaagattatgccttgggcttagaaaagtcaatatagaagcagctagaaaacagcatgctttaaaagtagagccctgataagaagggcatgcattctaaaatcactgttccattaaagaaggtgcaaacctacttctctccctgttttaaatattgtttgaacttcagttcctttagccaatttttttccatatgggccattatattttcaagaggggctctatgagatttgaactggtatgaaataatgttttattttcatcttaggaatggtaggatgattccctggctcatatccaaaattcaagaggaatttttttcctcctgcttaacctaataaactacttttgttgtaaaaaatgaaatttgttttgactataaactcagatctctctacctgtatctcttcagtgtccacagaaatgtggtcagttggacctcatgccacacatatcaacatacttgtaaagatgcattcagcagccagggtctaacagacctttatcaaccatctaccatgtacagtgcattgtggtgggcacaagagaggcagactgcataaatcaatatctctgcttttggggagattacaatttaatgaggatgcattgaaacaaatattagagcacaatgaagagataatgaagatgtatgtttgatgtaaaagaatacaatgactaacactgtaagggaggccaagtagtgattcacaggcaggttgattttaatccagagctcaaagtttgagtgggataccattagattactacaatgaaaaaaaaagtgattagtagtaaacagtgattgtaggctctctatagtctcattctatgcactttacgtatattacatttaatcctcccaaacctgtgagaaagcataattatgatcctactttagagatgaacaagctgttaagaggttaatttacctagtgttatacaacaaatgatcaaactttgatgtaaatctagcagttcggtgcagggacctgattctggacagaaaaaaaaatgattaatccaggacataaaatatgaatacatatatgtctttaggtttgggaggataaaggttcaaaggttggatgacttgtaaatatgactggtgaaataggaggcttgaattagaggttggagcaagatagtaattagaggttggagcaagattgtgagtaggattatataccaggtgtttgtagttactattgttactatgtatatctccaacaatgaagaaaatatacatatctctttttttaagtatcccaatgggatttcagaagaaaattgtggtagcagtgtgaagggtggatcttacaggaaatagaatatagaatgttgattggaaatcagttaagaggacctatgcaattgtataggtggaaggacattgatgacgactcaaaccataaatataaatctgtagtgttatagaaatgtaagttttgactaataaaatgatcttatgattaaacctccacaaccagcaagaaattttgcaatacacaaggtagacaaagtgataaacataaaacattaacatttaatatgaaaagaaaattaaacaggtctcaaaagcaatagccactttagctgtggccaaatgcttacaaaagatagcatataaatgtgggaaccattcagttttcataataaaaggaaatttagtctcaaagcagcaacttcagatagaaataagcaagacagtaatgaagtctctgaataactccctcctcaagagtgaatatccttggatttttgacagggatcagttaaattgtccataaagtgcaaagggacaatggaactaaattgcctcaggctgtgtaaatcaaagttatagtttagaggcagttacaaaaccagaaatgtgtatgaactgttaaaacttttcatttttgaaacataaccatatctttgtctttggctctctctctctctctccctccctccctccctctcttcccttcctttttctctcaaactccagcaattttcattttctgctggaacaatgatacgttacatcaaatttcttggtcacacccagaaagaagtagcaaggttgtaaaataatcagccattggctcacttaattagtggaaaattgtgctgtttcctccaccactagaaagaaaaataaaaataaaaacctattgatctaatctaagccctagacggagatttttttttaattaagtaagcccttaagctgattgattttacatggcactgaagatacaccatgttagtcaaaaatgcaaaaaaaaaaaaatgtattcaatgcctgcctctaacactcaagtaaagcaacatatcactctatccctggatctagcagaaagcctggtacacagtagggacttacatatttctgttgcctgaacactgaacgttggtacctgtgatctaattcatatgaatcatagtatccaaatctattatgagagctgagtgattatacaaaaatgtgtttaaaatgagttttggcgctgccctattctaatctctcttttggcctactgcagtgaagtggcttcaacatttcagcctaaagttatttgctcagatgaaatttatatgggagcttaaagaaataaaacaaagaaaaagcagaaattatgttattgcaaacagtttagagaactgaaaatgatcctgtctcttgcccttattccagtgcagccagtcatagggttctggaaaaaatgcagttagaaagctaatggtacagaaaatatttatgctaaattgatcacataccttttatagtcttttgttttcaggttttcctcttcacaggtcatatagtctttaattcatggcacctttttcctcttgtctgagtttctttagccttttactccagtgctgacatgaaaacagcgtgttgtttaaattaacttttaacaaggtcagtccatttgtaaataagaaatatagctttggttttatgtgccgttagttattttaaatagctgacttcttaacaacttaccttcatagaatatcaactttacagctttattgcagtatcattgacaacacaataaattgtccctatttaaagtgtacagttggatatgtttgacatatgtatttatttatgaaattatacccacatgaaaataataaacagatccatcatccccaaaagtttcttggtgcccctttataataaccgttcctccaccaaccctggttttcaggaaaaacaccgatctactttttctcactgtaaagtagttgcacttaatagaattttatatgattgaaatcatgcaatgtgctttgtatttttctttcagtagttatcattatttgaattacccgtgttgttatatttatcaatagtttgttactttttgttgtgaagtagtagttcattgcatggctatactataatttggttttccattgacttgttgaaggccgtctactcttgtcagttcttggctattacagacaaagcttctatgaacgtttatttacaagtctttgaatggacacattctttcgtttcttgtgggtaaatctctaggaatgaaatgattgggtcatatgataagtgcatttttaaatttttgtaaaactgttgaaatattttacaaaatttctgcaccattttacattcccactagtagcatatgacagttccagttcctctgtatcctcactaacacttgatataatcagttattttaattttaacaaatgtaatcagtacagagtagtatctcatcatggtttaattttgaatttctttaatagttaatgatgttgagcatctttttatgagcttatttgtaatccatatagatatttttggtgaaatgtctgttcaaatcttttgtcatttttttttttctactctggtatttatatctttctttcaaattgtaatatatgaggcctttgttgtatgtgttttacaaatgccttctcctaatttgtatattgaattgaagtaatgtatcttttaatgagcaaaaggtttaggttttgaaaaagtctaattattttaattttgatggattctaatttaattttgtagttcatgattcaaaaatcctgtctaagagaccattaacaaattaaatgccactaggatttaatccatattttcttcatgcagatttatcattttagctgttatttgttaggggttattgacctattatatctttattaggcattaataatcaatttaaaaaattaacattttgtcattttgtattatccttctgtacatattgttttatatatttttatacacttcttaaaattgtgttactaagtttatatctatgttcatgagtgatataggtctgtggtttacttttcctgtaagataaagaagctgatttcttacccactttacatcatagtataaatgtgatcttttatgatgcattcctcagtcccagctttcattctcttttcctgtacttaaggcgtttttcctcacctttctgccctggaccttctgtttctctaggagtgaaaaagggaagttccctttcctctctatcataagggtcatggctgaaacccctttatcaaaagacaggttaacaagataaaggcatagcaagtgtatttgatagttttacatagcatgggagccttcagaaggaagaatcaaaggtacagagaaaacgatctgtttttatttaggttatatgaagtatatttttatttaggttatatgaagtatattttatttaggttatatgaaccaccacatagaaatacgattatacaaaaagtatataatctaatgctaatagattgggtgggacaactcagcaaggcctgtctgtttagatgtttcttgatccctctgtgcgacacttttccctcctcagtatggggtaggaccctctggaatgaaggtcttaatctcttaatggccaatcgtgactcaggaagaggtggagagaggttagagtaatatttttaggttttacagctggctttggggaaaaagggttctagaccaaccttggggaaaagagattgtatggcttacctcaggggagactgaggggcaagaggcaggagggcgggagaagatcagagagaaactgcttctgaggctgcttcttaggccttcagattgcgttatcattttgtgagactccacatattcataacattatcattattgtcatttttttctggattcagtagttatcatatttcctatagtgtcacaccactaagctctcagcaatgatatgcataataaaacgttcattattattattctgctatcacagctgttatcaaccctattagacttgatgcattttattttaacatatattttgcaaattccctttcactacctggaaatgaagtgtaagttcaaccctattagtacaaatcccccacttaaaatgaaaagcagaaataaagggtgagtaatttacaatgaaatagttaaatttcttttattttattaatgcttgcttgggaaatcttactatgaagacctaatgaagtaatcatatgctttttttgcacctatacatagaatgtctttaatgagtcagctataaatacagatttactttatcacatttattataccattttagtcacattcattgtataattctatcaaacatcatcagcagtattcctatggaggtaatgtgactttgcctgatggaaaacaactattgatttaaaggaaagtctctctaagattaatcttttttaaatttagatagagattgctttatggaaacttagtctataacttaaaatgtatcagaatcctttgtgttttatgtaaaacaggattaggattaagactcagattactccaaacagattctttttccccttgttgcccaataggatattcaaaaccatattggacatggaagccttcttcgatgtgcaggactgtcctgaccttacctgctaaaattcccatgttgtcataaatcgatctgacaaacaaaacatactgcctcccaggttttcaaaatctcccctaggaagtagtactgcttctgtgaacagtcaccagaacaaaagtttaaataaaaattccatttcaccttaaacattattcaattatcccaacttttgtttcttcaaaactcataattaacaaaattagcttggagaatattatttctaggcataacatagtttgctatatattattgtctacaatttttagataggattttcatatctgcatattaatcccatgaatataggttaattagcctctttgggaatcctgatgaaattgtatacatttaaggaaaagtatatgctttcgatagctaaagtcaacatcaaaatatagagacaaatctttaaattttaagtgttttattttggaagcaagaattgcattctggagcgtatacacaggctggatgatctttggtatgtccaaagaacaaggagaaggttggaagtttgataacatggagaaatgttacatattgttctgaaagaaaattcagtagcactagtaaagtttttcaggaactggcaagttctgattggtaagagatggtggtgggggaaactagtcttagagtcctagtaggttgtctcagtagctattagattggtttcaggttacaacaggcagtttcagcagccagacttggagagaattacattattgaagcaacgttatgtgccctgagtgctttttcttcctgtcctttagagcaggtatgacaaaatgaccccaatttgtatggtcagctttcacactaacattaaaacaactctttctctcatgtgaagtaatacaaaatggctctatttcgttgttttcacttgagaatcagagaaaggatttttaaaaaaaaaagcaaatgggaactcggccctgtagctgcaattaataggtaacaatgttgcaaatgcctacttttgaatatattttaaaaatcaaatcatttgttaaaaaatatgttgaactctcagaagctcttcagaaatatcacttctaatataagattttatctatttggaagtctttgtaataggtgctaatttgcatgatgaaatctggtccaacatggacactatactcataatgatggtgatgctatgttgcatcatgttccccttaatgacagtgttatttctcttcactatcttctggattttgtttttcatttaacatgttccatgtcaggggcagaaatgagatgctgaaacagatttgcagacctaggaagaggagggtcaaggaaagagatgttggccttaggcactatagtacttaaagcaattaaacatttggagaatttttgttcatgtcatgtgtcttttgagtagtgagaaatcttaattagaaggcttgcttaaatttttaaacaaataagcagtaaatgttgctgaataaattgtcaacagtcttccttctccctattggtatgtatcccttaagaaattttcagtgacaatttcaggaacttccctagggttaatgaagaactaccagacttgaaaaatgcacacttatcatgaagaataaagatattaattcagcataacaatgatataacattaaaaataaaaatggtaaacagcagtctggagttctatgtttaaaaataattgtggccttttttgagactatttttttctttttggagcacctttaaattcacatcaaaattgagaggatggtacaaagattcccaatacttcctacaccaacccatgcatagcctcacccattatcaacatcccccaccagagcggcatatttgtcatagctgatgcatcaatacatcatgatcatccaaataccatagtttacattagggttgactcttggtattgtactttgtgtggatttggacaaatgtataatgacatgtattaacattattgtatcatacagaatattctcactgctctaaaaattatctgtgagtcacctattcatcttttcagcccccccaccaaagaataatatttttaatacttaatggtgtaagtattttttacaggttaatggtcagttataaacaaaaattaaccttaaaatattaaaatattgtacatagttactggattatgcaatatcctaacatacaaatatattgtgaagtattttgaactaaaacatgaaggcttatttcaaaatagaggtattaaataagtttgagagatgtcatagttgagcttagagtgtggtaatagattttcaatatatcctaaatgcctacagtttccaggtgttaggttttgcagaatgatccaccatatagaaaatataataacttattatatattgtgtatatttttcaaagtgaaattataagggaaatctaatactgcaaatataatagaatgtgctgggaaaatgcaattaagaaaactgcggtagtcaagtatgcaaattatgtccatctgttgaacaaacccttgggataacatggaattgatggaaagaagtgaatgattatcttccaagcattcctgtcagaagtcatccattttaagcctaactgtcaagataggagccttttctaaacattcttagtacgccagaatctttccctggtctaaatgacttaacaggctcaaaagacagaacaagaaccagaataaattcagatccatttgccaattaaatctgtatcaaacttgagccaattcagtctcttaaatggccttggcaatgacttagcttcctggctagaattctctgtagagtgcaggtatatctgtgtctcggacagtcagaggttaggacgtgaaattagttatagtaaaaaaccctagagttttgaaaaggccctttttgaaaaatgactttaaggtcattttcaagggtcagaaaattatcctgttttctagtgtaaatccacattacatcacagctttcctcgcccagttccaagcaggctagttcccagaaccactgtatttgagaataactatagaccctgaggttctggaatgcactaaaataattcacaccccaaaggttatgtctcacacaaagaagacatgcgagacagtctactaatactagaattgcccaagttatgttttaagtggtcctattgtaggtcattttcattttaaaatttcattttaatcgctcattagatacttaagcatgtgtccacttgctgggatgttttcttacataatctataaagtgagatcacgaatggataaaagagtttaatgacaatggattttctcacatgtaagacacattatgaaatgccaagagctcataaatgttgactaccagaccagctggtgtttggcagttttcttttgtgccagcatttgttttcctgcaggagtccagaaataggcttaagtgatatcaccaagtgtcttctaatttaaatctgtccacaatatgtgctggctaatggttaagtgggataccatagccttcctggttccaccctttctgacatgagcagctagctatactctttagcgtcctgagtctttctgatgcgcgacgagggaattttccttagtaaatggaacacagtgatgattgtttttaagaagtcctggtacattttggcatacctacatgatttcacactgggtgtatcattgtcttttatatggcattgctaaaataaggttatggaaattcagagacttcttaaaaatgtaatccgtttagctaaatccttcactaataatgtgtaattgattaaattaacattcacaatatttaaacattctaccattgaagtaagttaattgttaaaacaaaatagagggtgtagaaagggtaaaaagtaagggctgtctagaaaattaaaatgattgatgatcttaatacgaaagataagcttctaatattgtgtaatgattaaggctaagtgtttatatatatatatccttatatataaacacacacataataattgtatgttgcactaaaatattttaatgatctaactataactattataatcttgtttcataaattagaaacatgtattaagggtaatatataagaagaattgcagactcagttcagtagtaagttaatctcccgaagtatatttagaaatctgttgtggtaagtaaaatatatttcagtttggctcttattattgttgtgagataaacaggattcacttcattctctaccgaacctcatcttgatattagaagcaaaattaaagagtttgatcacttatttatttaaataagttaaacactttttaaagtattatttaacaacttttatagctttgaaatttagcaatgcatttccagaagttttcatttctttactcgaatttcttgaataattcttaattgttccttgttttatatttttggttgttaaatttcttactgctttgataattccatataccaattttaggtatacaggtaaacatttcctatcctctaagggtttaattctctagttaatgaactaaaatagaattatatgtcatgcgatagtttagggaaatatgtatgttaaggaaaaacaatattaacttttgggtgttttagggccagtaaaagccatcaatttacaaaatatgtgttccgcagatctctgttagtcttcttaataggtctatttaaaaacatgattttgtaagatggttattttaagattgaaggggatcttcatattttatttattttttattaattatttattaattaattaatttttgagatggagctctctgcctcccgggttcaagcaattctcctgcatcagcctcctgagtagctgtgattacaggtgtatgccatcatgcttggctaattttttgtattattagtagacacagggtttcaccatgttggccaggctggtctcgaattcctgacctaaggtgaaccacccgcctcggcctccaaaagtgctgggattacaggcgtgatcatcttgctttcattctgggtggttattaagaataaagggaaattagaagaatgcacatgggcactatgtcagtgattccaattaaaggtaaaacttttgatttgcccctgagtcctcttactagggctactcatttttgctatgatatattgattcaaatcatggtcttcttaaatatttagatatttaaaaatagtccaggcgttatgttgtctgttatacgaattcccaagctgaatatgaaaatttatctttcattatctgaaaagttagcttaagctttcccaatgttccttcacatttttgacagaactaataatgtctatatactgaactgtagattttacaagtagcatgattgcaattggcaagtaaaatataatgaaaaaaatctgttcatttcttggtattgctcataacttggctttcttgaaataaaatgttcatattttatttaatctgattttttttcaaatggatgaaactaaaaaggaaaagagacagagatctcaagctgttggactttgaaattttggcagagaattattttttatgaaaaaaattgttggatgagaattcaaaacatccgcctctttagccctattcaggcttccataatgctgtctcagagaacacaaaacaatgaaggatctagcttatcttactgggaaaattatttgaaatgttggcatgcaagcaggaagaattttagcaacctctgtgtacatccaagcccctcactttccttcttagaccttagtcactatcatttctatgaaactagcagaattatcttcattgatatgcaaatgaatgcaccaacagtagccacactatttattttccatgtgctttgcaagccagaattctgaaaggtttcagtaatttaatacacaacaccatcaacaaatttcactaaatacagtcaaggagcttcacatatgctactgtagtttgtggcgaccttgacacattcctgatgcttgttttaagtttgttgaatgccagtgagggtttttccctttttcagtggataaaatgatagtgaggaagaatggaatgtttaaaatctttgtttccatttttgttctttcaagtcacataaaacgtatggcatagttgacatttgagctgtaagatcaaatggaaaaggttggccctgttttgtgtgagttgagtttctttttcagcagagcaattaaattgtcttttcaatccagactactctcattccctatcagtttgttgtattcttctgagagtgatgaaaattgaaatgggatacagattatgataatggagcttaaaaggaggggaagcagaaggaatttacccctcttcttttctattttccttctcctaattcttaaggtaattacaagactctggagatgcaaacatctttattatctatgcaaaacgccatctgctggaagcacattttgcaaacctgcagggcctgaatatgatacaaatcgatttagtagaagtgatgctttgttgtactcttcctttactccagtgccagactttccttaggtatctcaagagctctgtttctaggaaactcaaagggaagtgggaaacatccagatatttgacttcatccaaaccctactgtcatattctttttttactaatgttttagaggagagtataatttctggattagtggatcatttcagttatctcattaagaacctgtcatagtctgttttgtgtggctgtaacagaatacctgaaccggagaaacttataaaggaaaaaaggtgtatttagctcaaggtcctgcaggctgggaagttcaaggggcatggcactgtcatctcctcagcttctggtgagggctttggtgctagggcaaaatatgatagaaggtcaaaggggaagcagacacacgggaagagggaccagacaggaggaggaacctcgctttataacagccagagtgcacctcacacacacacacacacacacacacacacacacacacactctctctctctctctctctctctctctctctctaattcattcccaagagaactaatacagtcttgggagagtgcaagataattcactaccaagagaatgtcactaagatattcatgagagatccacctctacagggtgctgccaaatacctccacagggccctgcttcccaataccaccacattgggaatcacatttaaacatgagctttggtggggacaaaccatatccaaaccacagcagaacatttctttcaataattttcaaattatcacaaagttaataaatgtaaatggctagccaaaaatcactcattcaacaagcatttattaagcacttactatttgccaggcaaattgcctaagtgttaagggtacagagaggaagtaacacacaggttcacgcatgcatgtgtatgtgcaccacctcctccctaccccacctccatctccacccccatcccaaatattcttctgtccaagaactcaccaattaatcagcagagactatacaataatttccataaatttaccaccagagtgatgatagtttgtccttttatacttagcttgactggtttttaggtaattgcactttttttccacttaagtgacctatattatcccttcctgcaaacccttccattttttttttctttgttctctgagtgttttcccccctcacagcctctctctattccatgtgctatcagttttgtttctttgcctcctttctctttttcattatttcatatattcttccatcttcatcatacatgaaagcatacatttgtatgtcacacttgattaaaacttgaacgcttaattggagtcaactgttacttctggtttataatttatctttataggaatccctaagacttaccagatttggcttttgaagcttttccatttcaggcaagcttctgtgtcttccttttgaccagtccaggaggttattttgtcaggtagatgactagcagccccaagtcctcctcataagcatcttacagacccaaaggaacttcaagtagataagattctcaataatctaccaatgtacgtgatagcctagagttattagcataaatatgtaaaacaaactttaaacgctagaagcactctgggctggacagtgctccttccacaaccgatgcaaataagtaacaacttaagtaaataaatgcatataagtaacaatggtagagaactgaaaccttctgttataggttggtacacataatgaacatagttttatatcctgtgccttaactcaaaagcaaaagcaaagatgaacaagcaaaaaacttggatgaaactttaagaacaaccacaaaattttaatttgggtttcaaagctgaaatgactaagtggcttcacttagtgtttagggcatattaggcagaaggaaaacaggtataaatctcagggtccaaggaaccacaaatacatttccctgatctcagtgcttgatagatagatacatagataatagatggataggtagatagacagatagatagatagatagatagatagatagatagatagatacatagatacatagatacatagatagatacatagagagatagatagctgttttggtaagaaaagactaagaagatcagggagatatcaaggatacacattatattagtttgttacagcttccacaacaaagtcccataaatcgaatggcttaacacaacgcaatgtattgtctgagtcctggaatctggaagtgaaagatgaagatgttggtaggattgattccttccaaggactgcaagggagggatttgttccaaccttttctcctatcttttgatgattgactggcagtctttgacattcagctgatgctgaatatactgactatcctcaccttaaaagtattatccatgaggtctctgactaatgcaccagcttatacatgaaaggtattaatatcaagagcctaacttgagaattgaaatgtgctacacatgcccacaacagtttgccatcccaaaatatatacgagtgtattaattatacatgtaataattgttctttaatataagcttgtgaagtggaattaaaaaggatctttgtcttatttctttttttcttgttttgtttttatctttttttattattatactttaagttttagggtacatgtgcataacgtgcaggtttgttacatatgtatacgtgtgctatgttggtgtgctgcacccattaactcgtcatttagcattaggtatatctcctgatgctatccctcccacctccccccaccccacaaccatccccggagtgtgatgttccccaatctatgtccatgtgttctcattgttcaattcccacctatgagtgagaacatgcggtgtttggttttttgtccttgtgatagtgtgctgagactgatagcttccagcttcatccatgtccctacaaaggacatgaactcatcattttttgtggctgcatagtattccgtggtgtttatgtgccacattttcttaatccagtctatcactgttggacatttgggttggttccaagtctttgctattgtgaatagtgccgcaataaacatacgtgtgcatgtgtctttatagcagcatgatttatagtcctttgggtatatacccagtaatgggatggctgggtcaaatggtattgctagttctagatccctgaggaattgccacagtgacttccacaatgattgaactagtttacagtcccgccaacagtgtaaaagtgttcctatttctccacatcctctccagcacctgttgtttcctgattttttaatgatcgccattctaattggtgtgagatagtatctcattgtggttttgatttgcatttctctgatggccagtgatgatgagcattttgtcatgtgtcttttggctgcataaatgtcttatatcacagtcattgcttacaactggttgttgttgatctcatataccggcaaaacatcaggctttgatcttagtgcttctgaaatgtcaacaactgaggaattaagaagcaatgccttatttagtgtttttacactcccatagtagacactattttgcaattacagtttgaaaatattctgaggttaacataaagctagcagcattttaatttggaaatatctataagcagagataaacttttatatctatataaagttacatataaataatatataattttatatcacatatttatacatatatgaaatgatgttatatattatataacatatatgtaatttatacatataatatattctatcaatagctttatttacttttactttttttaaaaattaccctcttttaatcataaagaaatacagatagagcaggtgaaaaaaatatacctttacaagaatcatgaggaataggtagctgatggcaaatatttactgtgctctaggggtagctccagtggattttcttatattcgaaaagtcattttctacctaacacatgctttatggttagagctaattatagttcttagagttctatgacaagcaataggctaatgtccaatattatccagataacaatcaatattaacctgaaggctggctaatgctaagtgtttaatatacagaaatatcctgtggatgtgggaccacaccttctcaatcttaaaagtgccttttctagttgacttaagcaaacaaaatgtgaaaacaaactattcaaacattaacaggaaagcttccttgaggttcaatgttggaaataagcccattacttgtacagtcatttctatagaggcacatatctcttcccttccttctaaacgagttgtgttccaagattttattggaaatgaagtatctagaactttggatattttctctctctttttttaaagttttaagtagctaaattttgaggtatccaaaatctcttttaatcataatgggcctaaaatgtgtaacaaatgaccacctatattacagccagaatttttactttagcctttctgtagttatattaacaagaaaaatttctaggcctttctgaatgactggaaagagttttgagtagttagagattatgaagatttgacgatgtgtagggaaatgtcttgcgagtcctcagccaagtagggccggacaaagcaaataataactctggcctcaggtagaaaacataggcccattctctcattcactctctcattcattcagtgttgaaggaatgttttctattttctggacacactgataaacacagatgatacaaaacaaacaagcaagcaaataaacaaaatacataggtctctgtttttcctgaagtcgctgagaatcagaagtaacagaacattataaacaattacagcatcactttctaaggatggatgaaaaatgcacccaggactcaaggcatcattgaggaggatcaccttatctagcctggaagtagagacaaacgggcaatgcagttaagggaagtgatttttgagccaaaccttggatagctgaaccacagagagactgtaaagttttcacgcgaaagagtaatatttttatgttgaattaggtaatagaagttatttaaattatttctgccacgcttctctgaagaacacctgaccattgatttgtgtatttttgtaatcccttacaacatatttttaatccaacttcattcttgacttttcattattttaatggctttgtagaagttataattcatgacttcccataccatttttctatagagtaattttcaacatgcaatttcacatcctctcacactagaccggagatgacagtaatagtaaacaagtctgaacaaatcatggccacgtgaaaaatacctgcagctttgacaagctacaatattagcttccattttataactttttctattaatttttcgtgtgatagtcaatattgaggttgagaacatgaaattatgtatagatgttgtcatcacctatttgttgatggggcagagttttgataattttgccaacgtcgtttatatttcatcagtcctctacaaaaacattatattccttgtatctatttcttgttctaattctatatttaccccccaaatagttgaaaaataaggagtatattataaaacattttccattaatttaatgagtggtaaatatatacaggcaattagacgtagtggaaaaaacataagttagagtttaaactattgatctatccctgttccctgatgagtccctacaacacatacacacagattttatctcatgctgacaaacagactttgggcaatgttatcatttgtaaaatgggaaaagggctagcttcatgggcaagtgaacagtatggttacataggatccagagcttagtacttgagatttaatgcggtttggttcgcatcttgaaatccatattggttttatctttaaattcttgtttagcaagttgagcttttggggaaatggagtatattttgagtgcttggagcctcattcctgcactgcttcacctcatgcagcctctctgtctctggatctaggagagtttctcagctgcctccctcatactcagcctctttttctctgtacctttctgtggctgttgtcaccctccacctggagaggaaactggagggaggactatattccattgctgttctccactctcatggtcacagggcaaggaggcatggacatgagctccacagtgttttggaacagagcaaagctgtggccatctaatccattggctggtagccacactgtacattcagtaggtgagttggcagaagcctcttacccacccttatccaggtactaagtgcatcccaacaggaggtacaattttggggggatcatccatccatcatgcattggggcggctgaccactggacaatggatattgacttgtgcattccagctgggatcctatgtcttaattttgctctggaatctatacattatgtagcaggccttgaatggaaattatgcaaaccttaaactgcagtaggacttaaataagatacatgtactggacatagcataaggtctggcataaggtaaaataagttctcaataaagttgttattcttctcaagccccatttctttacttgtttgctctcattggctaaattagattgatctatgttgatggataaagatgtcttattccaatacaccttaacacattctcattgagaaccatgaacattagttcttcaaaaggaaatagcattatttatgggattcatttaatttttaagtaatgctcttgcagttgaggcatgtatccacagtatgaatacgacagttaatgaataagagtagacttttcttgttcctagactggcatattccaacacttttgcaaaagagaaaagcaaggagttgaatcaagtctcagcacaaccaaccaaataagcaggcagcacaccacagcagcttctgttcatggtaatatttcattttctcatgatccattgtctagccaataaaagcagtgccaacttttcatcctcatatcaccctctatgatcttacattaaaaacacgagctaacttgtcattagtttaatgtctctgaaagtaaaataagcggactgttaatatcagctcttttatcttgcttaagaaggctacatacattaaacttaggaaacaaattacggtgtatagcacttcagacttgtataaagtagtttgttttgctttatgaatatacttaacatttgtgattatagtaaccataagatctaaatattattctattttttaaaataaaatatctttttactataaactactaaaattcatttatataagactgtattcatctcttttgataataaaaatataaattttaagttaaagttttatgacatggagctatagattaatgttatagccacacagctgacctctgaacaatgtggaggttagaagtgctgaccctcacacagtcagaaatctatgtataacttttggctccccaaaagcttaactattaacagcctacttttgactgaaagccttactgataacataaacagttaattaacacatatgttgtatgtaatttgtattatgtactgtattcttacaataagttacaccagagaaaagaaaatgttattaagaaaatcataaggaatagaaaatgtatttactagctgttaagtagaggtggatcatcataaaggtcttcatcctcattgtgttcatactgagttggctaaggcggaggaggaagaggagagttggtcttcctgtctcagtggaagtgaaagtggaagaaaatgtgtgtgtcagtggaccagcgcatttcaaactcatgatgttcaagggtcaatggcacattatttttttctaacaagaaactatcaatattatacttaaaaaatggttaaatgacttcagattttaaaatatcacaaaaggataggcatggcagaatttcaacaataccttaagtgtttaagtagagaaaaatcatacgataatttaaataagcactactgtaaagagttttaaaaattaacattttttctaccatttaagaatagagatggcacatgtatgcatatgtaactaacctgcacattgtgctcatgtaccctaaaacttaaatataataagaaaagaatagacaatagtaagttctagaattaatctgacataattctaatccatacaaatttgtgcacattttataaactctttatttgactaatctgcgcatgtgtaatatatacctcatatggtagatgttattaaggtatatactatcttattttaaataagataatttatatagtggtttacataatgtaagcattcaacaaacagaatggattctatgattatccttcttaatatttgtattggtgttattattctcaagaggcaactgaaattatcttcatagacttaatattatatgaagatttgtcacttattgttgttttattttagaatatattatttaacctgaaataattttcaaatcaacgtaatcatatgctatattatatagaactctgcagtaagaagtttttggcctacataaagccattggaaagtctaaacaagtatgcatttactgtgatgaagaatagtgtgtatagattaagttgtttatttttttcttatagcacttttccaggatttgcaaaagcatgttttgtgtatatggaagctattattagaaataaattacaattttcttttgcttctgttacccagaggttttattgtttgttttaatggaatacagtggtttaactactctactttattattattattattattattattattattattattattatttgagacagaatctcattctgtcacccaagctggagtgcagtggcatgattgtgatcttggctcaatgcaacctccgtctcccaagttcaaacaattctctcacctcagcttcttgagtagctgggatgacaggcccacatcaccacacccagatacttctcctatttttagtaaagacagggttttgccacattggccaggctggtcctaactcctggcctcaagtgatctgcccgcctcagaatcccaaactgctgagattacaggtgtgagccaccacgtcctgctgggttaactactttaataactacttaagcaaaccaggaggttctgactttcaatctagtcttagtttagtgccaggacatgggcataaaatggacaaaggcaatggaaaatagggtaaaaggtacagaagaaacagaagtaagaaaaggaggaagaggaaggggagaagggggagagggtaagagaaggggaaggaggggaaagagactagcaagagaagagacacattaggaaaatgcatgaggaaaagaaggaacaaaacaaaaagaaacaaagtaattgaatagagcagaaacaatgaaaagagaggatgaacaatattaagaaaataagcctctttattttctaaaattgttgctaatttttactcttcattctctgtctttcacttctttccctctggcttggtatagaacctcaacacctcttctgaccccactaccactgccctccaccaaacacaaatagagaaacacaacacatttttatctttctttgagattttccagagctttggttaataagaatctagtgggatggagtaagtttccttccttttctttctttctgaaattgttttattgtcatttcagatcacaaaattactacctattttcatatactgaagaacaatacccattaggaattgcatagtcatttgaccatggctttttaaactcatgtctgtatttacctcgatgagccactgatggtttacctctatgagcatttacgatttctgttccttgggctactccagaacaagttaaggatatttatacaatattggtaaggatgatacgtaatagtgagtaggaaaaatatattctacattgtaagatgttttcaaatgtccactcatattaagtcactgcataatatggcttgacagccagctttgttggaattaaaaatgagaactgacaataaagacataggatgctattaagggtgtttagataactgaggtaaagttgacccaaagtattgttttatttgtttttgttttagaaacagtggccaatttctatttattttctcttttacacagatttatggttattgtattttcctaaaaaagcaacagatgaacagaacaaacaactgtagtaaatacctctatgtaagactattcttgcatgaaatatgaactctcatagcaggaaaagttgtcacagatgagaggaaaaagtctgagttaaaaataattttatacaaatatattttcatctattcaattctgaaaactttcagtttcagtaataagagaaaactagacaattttgcaaactgtgattttatacattgtgatcatgggtaatttacacttctgtaacctgaaagtttagctggcattttttttctcacagttttctatttctgatataagtaacaagtttgttctgttgaagagcaatgttgttagcctatctaattgtgtttgttataagatttgtttcaagtttaataattgtaaaaataccatttttagatcaagataatacaaagcatttatggtctactactcaatgtttgctttcacaagtgcttgtattataatgatatagcaggtaagaagtgaaatggaaaaaaaaaacagttttttagccatgaacactagtttaataatttagttgctatacattgctttgtaaaagtgagaaacaacattggtaaaaaattgtggatgtacttaatgcttcttaaaaatacatctatttatacacaccagaagggagaaatccctcaactctaatataaagacattgtatgtagtattatttttaatgtattcataaaaataaatgcattcctattggctcagggactctaaggaatagcggataaataataaattttatattactatttcacaactgcagagaaccttaaaaactgttgtgttcaatatatacatttttattgacaatacaaatgaaagttggaagcttaaaaaatcccttaggaaaaaggatagttctagaatccatgttttttagatttttagtctaattttttccatatcatataaaaatgatatcgagtatgcagaggtgtgtgtctgtgtttgcgtatatgtgtgtgtgcacgcgcacgtgagcatgaatatgtttgtatctgagctcccgttcagtacccaaattctgtaatttatttctgcacaccaacgactggagacaataacaaagggaaaatacttttcaaccttccatgtttatgttctttataggaagacattgatagggaaatatttcaccaacttcttttcccagtgagcatggactctctgataacataggcttgaaactgtatggaggaaaagaaaacagcatctcaaaccactagtaaaacttttcttcctcgggggattcttcctgctgttcacagtgaccttctgtgtaccatttcgtttttatttcttaatatatttatttctttgttttatttatttattttttgtccatttcttccttgtgccctttagctttctctcttctcttctatttcccaagcctgagtctcatacttcaaaattgcataaatttaatgccatttataaaatttataagtttagcaaaaggaaaactcatatcagataatagcatgtgcatatatacaaacacatataatagatattatgaatgatagcatatgcaatatatatcttataataatataaaaacgtatactttttacaatgcaccattcttgctcctatgaagttttaggatattttatgtctcttaggcaggtgcaagatgtattattttaatataaatttaaaaataattgtaacaggacagctgtcaattaactttttaaatttgtaatgacagcttgtgatttattaatcatttgatgcaaaatgttttcaccatttaactttcatgagtatagcacaatggaaaagaactggactctagagatatacttgcctgggtattctttttggttccaccaactactatgtaaagttacgtgagtagtttaaagtatttggttctcagtttctgaatctatgaaatgggcataatttcaccaaatagtttctagggttgcagtgaaagctcgtataattaacataagtaagactaataatagtgcctgcaacatagtaagtataaatattagtaatttttcatcattttaaaaacagattatgttaatattcttttgtgttatactgcaatttattattcactacatttataaatgaaaatgaccttaaaagtgatactaaaaaaaattttaatgctagtctttttatgtaaattgagatactatttaagataaacacgttaataggtataaaatatgtaaaattattttccaaccagttattctgtgtgtgtaaaccttcttgttataattttgatttttatatttttaatttcttcattttattaaattatagaaatcatagatcatactcctatccagattgtatataacaatgtagctcttttgctacattcaagttattcatttttgtatttatgaaatgaatctttctggctttgttcattattttgttacttctgtgtggctaacagccacaaaatagtaaaacaagggtagtgaaatataatttttaaagtcaatttagcaacatatttaaacaatgtggtaaggatattaagttcttactagttaaaaagagatttgatattactagtgatttttatgtatggaaaaactagaagattaaagtttaaaaaataaattttttaaaaaatttatttgattaataggaaatccggaaccaatttaaggaaacctttatcaaaagctttgctatccaaattactgggacctttccccccaactttttaccctgaaggagttaactctacacaaatgggcctctcatccctcctagaatttaaattacattcctttgctcgtaaatcagaagggggtaaacccaattaatgccagtgatttcagcatgaatagaaattaactcccaaatctcaggctggaaaaagaatcttgacagactcattcccaaggaaaatttctgtaagagcaggtgtggagcagtatttacttataagaattcataatctaatgcttagagaatttgcagcaaaatttggataaatggtttgaaatacctctttccttcaattaccttaactataaacctttacatgctattgagggtttgatttattggagtgttcttttggagaatatatatataggttttcttacacctgagagataaatgaagatgtctatcagatcccccgtcagtcctttctaatttattattttttggatatatctttgattaagtagttacagcttgtggcacagctttgaatttgggtttttaactttcaagtggtgcctcggtttgtttttagctcaatgttagtgggtaaacaaaatgcagtaacaattttttcttcttacttttaattttctctctgtatatagttaaatatgtcatatgcagtattcttaccatattgtttaacttcaagacttgtgttctatgaacattttattttgtttcataataataaccttaactgtttttataataaatatatgacaattatgaacaattcaagcaacatagtaacaacacgtagaatgttataaatcaccaagaccaaggctccctatttataaatatccagtgcatttggtgaactttataccagacatttctttatgtctattaatggagtatactctccaattattttgtaaatggattcagactacatattatggtatcttttcttattctaatttctaattcactccaatccaaggtcgtatacactgtatctcttagaggtaaaggtaagtaggtgactttgctcataaaaaccactagaacgtgacatttatgttgagtaaggtttatcaaattcactgcctaattaaaatactaaaggctaaaaattttgaagtgacaaaagtaatgctgcccccataagatacatattgcactttaaaatattttattctaaaaactatattttaaaattaaaggtaactgaacaatttctttcaaacctcttgggtggtaaaaattaagaaaatgtaggtacaggtgagatagatacagagaaaacttagtttactgtttggatttttcatttgtttgtgtgcttgcttgtttttaatatctgttacattatttgtatttttaagtctgcctttactaagacgctattcgtaagaaagaacatccagaagcctatgcaaaggctgtttccaaaagcagtggctctctgtttttcttctttactaataaaaatctaatagtttctggccagaatagaatctacttaataaatgtgtcacctcaatcactaaatttatgttatattaacagaaaaatagaattaacccccctaccccgaaaaaagattaccacaggttttgtgtgtgtcatgtcataggcctttaaacataagcttctatgggaagagtcaggttttcaaacccgttgcctgctaaataacattctaagggccaatggagcatcttgaaagctccttaagctgctccactttcttaagcataggtttttccacaatcattattctccttgcatctccttcctaaatggagatctatgttggttaactcccaatggcctgggcacatgataggccattattatatacatgtagttgaatttcttacatcatgactactatgatgatgtgaccttactctgacaaggagctttagatggtttagttgaattaaatttcattttttcctcttggacagagaaggcattaagctcatctcaagtactaactgagatatactggtggtggcctcctacagtagaatattttgatactcctttcatggctaaatagaaagaatgctgtgatcaattttaaatgtgtactatgctgagaaaaggttaacagaaatatacttgccttctgttcacatccctctttcaagatctcagctttgggagtacaaaccactcattaacttgctttgagatatggaggagggggaggctgagttgggtttctaattttctttcaggtctcagaggctaatctttgtgtagtgtgtgtgtttgtatgtgtttgtacctgcgtgtctgtgttggcctggaagaggccaataaaatgtaatgctgatactagatgtgccaataacaaagtataacttaaatctaaatcatttaaacatgtttcacaagtaaatacaacttctttagaaatttgaggtaaagcaaagtaaaatctagtgggaagctagtttcaatgccacttgagcacttaattgaaataaggaacagaagagtcaagtaaatgagaatacaattttctacactgtattgtaatcattattgtcctaattgcaggattatagttgcaggccaataacaataaaaaggaaataaccatataatgaatatgttctggattttcattttttgactagtggaggaatgaacagaaagctaccactagagtgaacatccccatggaagacagaaattgaatatatgaaagactcctatccctctaacgaacagaatcattgcagaattttgctattgaattagaaagagatagaagtgttgcacttgcatgtcaaatcactgcttttcgggattcaggaaataaaccacagttgaagtgaatttattccgtatacttccaacactatcaaaaaattcaagagagctctattgtgaacagaggtaagttaggtgttagaataagttttataagcatctataacatttgtggatttataggagaaacatcattgtatgcatttttagtattctcttaatattgacccaaacaaaaatcataggtgatatgtgtatactatttaataatagacagcagatgtctaatagttgatacaaaatataaatttagagcatataagttaaccatagttaattgatcttttaaattcattttagttttaatggtgtatataaagactgtatataagctatatggatagtttaataaaaataataaagtgaacccccacctgtatctataccctagattaagaaatagaatatcaatatttttgaagctctctaaccccttccgtccttctacctgcactccttctctaagactgaaactgcagtgaggccagggaggctcactctcaggccccaaaccttaagggggtgccaaaaacctcaggaatcagaataaataatattttaatgcagtatgttaaaataattcaaatcaacttagaaatcaataatgaaaaagatatcaacattttaaataaagacagtgttagtaaaaggaaaaatctaaagggaaaatcaataatgctaattccatattttaaaatttttcctaaaattggtattaattatgctctcacttttccttagaaaaagtttctcagtcttgccactattgatattcaggcctaaaacgtggtgtgaaggtctgtcctctgatttatatgttgtctagcagcatccccagcctctattttgtttttgaatcttataaatagcatcataatatatgtttttatttaattttctttttacttcaaattatactttttaattttaaggatgttgatatacattgtattaaacaagtatacctcaatttaattaataattccagttttgacagacaactggattgtttccagtgtttgttacaaataacactattttgaacattctcacatatttattgatatgcatatgcaaaactcccctctggcatatatccaggtgtttcattcctgggtaatatggtgtgtccatgtagcaaataactagataatatcaaattattttcccaagttgacagttttcattctcactggtatgttggaggatcacttattgttctgtattaattaacttaatgttgcctgactacaaaattatgtaggcctgatacatattaaaatgtgtctcacgaggttaaatttacattcccctgatatctaagaatactgaatagctcttcatattttagtacctatctttgtttcttcttttgtaaaatgtctaatatattgtttaacccattcattcagtttatcatttaattatattctttattcctagaagagctttgcttttttttttctccaaatccatcagtcaattcttagagcctcttgtttcattgaatatcttcagtctgtgtaggtctgactccttaatgttttatttttctgacttttatttatggtaccttattttctcatctgtttcataatttttgtcgataatagtatcttaaaattttgagaaagaaaagattgtgcttggaggcaagataacattttgggaagagcacaggatacattttaagactagagtatggaatcagcttctacttcattgtccaatgtaagattccacctgtccgaaatatctcattcagcacttgtccatttccccagagatgtccaaaactcaagcttcaacagacattcctagagtaaaataaccaagatgtatgaatccccttagaggattcagggcccattcatgtacaatgtgagagcacccagaccagtcttgtcccaagagtaaaagactcagtttaatatattagctacatgttggcaaagagaccaatacaaaaaggataatggagaaaatctttgcacagaaattttgcattctggcatctctatctgaattgtgattcttcataaaatgctggactgaaggattgcatagaggcaggccttgtgttaggtgataaacatgtttttatacagcaacacctacagccaatttccctatatgcaagcaaaatttccagtaagaattaatagttggctgggtgcaatagctcgggtgtgtattcttagcactttgggaggctgaggcaggtggatcatctgaggtcagaagttcgagatcaacctggccaacatggtgaaaccccatctatattaaaatgcaaaaaaaaaaaaaaaaaaatagttgggcttggtaatcccagctactctggaggcagaggcaggagaatcacttgaacccaggaggtagaggttgcagtgagccaacacaacatcattatactccagcctgggcgacaagagtgaaagtctgtctcaaaaacaaacaaacaaacaaacaaaaagaattaattgcaaatgaagaaggtagtggttgtcactgatacttgtagatgggaatttccatatttttctagcctttaacagtataatttccacatttaaatagaatgattgcatgtgatgtaaaaattaaagcaaagcatactagtaaaattccttcaaatttaaacataagaattcacgtgtaaaatgtccttcttttacatatatgaggggcttattgaaggatttgatgaagatatgcctttacagctgttgatagataattgtggggttaaagggattgaaatagggaaggagggatccagcagccagaattttttcttcccagcaatatgctgtaaatcttaaccatcaagacaggaatgaaaacaggttctgaagcttgtataatctcagtaagtatttcataaattataaatgaataagaaaactaagggtgataatataggaagtcttatgtatatggaaagagaagttacacccttgtattttggtaacaacaaaagtgttatttgttttgtccaggactcattattccaaggcagatcttacttcaataaataatgtaacatctaaaataaggggaaataaacatatattcttttcaaatgaaataaagaaaatcagcattaagcatttttgttagaaatatgcaaactggtttagtgaataacctccaacactttagtggtttaacgtaatgaaatactatatcttgctctcttagcaggtggatttcctcagatgtgtgatccaaacttccccattcttggttattccatctcttaggacctgaagtcctctgcatccacctgacagatagtgaaagacagaacatgaaggaggcagagatgcttcttataagccttggtctggaaaggacacatgccacttgtacacaaagtttgcttcctctctgaaacattccctgattatcctgggccacaacaatccttattctctcaggatttcaggagtagattgttataactctattttataatgttttgacttgcttactctgccatctagtgaatacaatacagaaatataagtaaaaacaaatctgtattgttaaaaaaatgaagtagaagtgaaaagaaaactgttttgttaaaaataaaagtacatttttcatgatacaataaacttacatctctatggtgccaaaggtttatcaacacttgaaaacttgtgtagctttaacctatattttttgttatacatttaatagctttttaaaagccaaacaatgatacaagggtaactattagaaaatggtagattaaggttacgttgtgcaaaattctagtaataacttcattgcatttctgaaagaactgtctgagataaatagcactgtcatgcacatctgccggaattccttaatagtctcagacgtgcaatcactcaagccttgtgggaaagaaagagtaggttacaaaagtaggctccttgattctgtgggtgaaaccttgtaggactccagcaagttcagctgtgaaatcactgtcttcctcttgacaatacagtaacaagattgtaaaattttttgaacagaggctctcaatggtgacctggtttatggggaaaagattaaatcacacatccagagaatgattagggatgacaaatacttatttttacacagatactgaatgataatatatctaactatgcttttgagtaaatatttggagcttttaaactataggatgtcattcttattatgatcagtgtaaaacactcctgttggaataaaggactcactatgaaaatgaataatgcaatcaattgaaatttcatctttaatattgtcttcaaactgacttaatcatatggaacatacatattctgctcttttggtctaacagcattcttttcttcataatttacttattatataagacttttagctacacgtttatgcttagctgctaccaaatgataaattaagatgccttgatatcaatttctatgagttccattttttatggtctccttcttccatcctactctttcttttgcttgcacaaacattatgtttatattcatctaagaaggctacttgatttacggcttatggtcatattaagtgagtgtcagggctgtgagaaaacctctgaagttgtcactgagagaatggtatagtgtaaattgaacaatgtctgctagatagaattggaaaggtcattccactggttactgttctccaagtcatatttagtcttcctaaacaacatctactcaaattttatccaacattcaatcgtatggacaaaattgacctgctgtatcttgttttaaaaaatgttgtatacatttaaggagtacaagtgcagttttgttacatgagcatattgcatagtggtaaagtctgggcttttagtgcaaccatcacctgaataatgtacattgtacctgttaagtaatttctcatccctcacccccctctcttcttcttactcttccgatttcccaatgcctattattctgtgctctatgtccatgtttgcacactgtttagctctcacttctaagtaagaatatatggtttttgaccttcagttcctgagttgtttcccttaaggtagtagccacaattccatccatgttggggcaaaagacattatgtaatttctatttagggctcattgtatctttaacgagttcctctgctgtgttccggagcacctctgttggcagagatggagcagcagaagatctggtgggcatttaccattcagtacatttattgagtgacacatgctgatgtgatcatgttatgcctcacagcttcatccatggtcctctactcaagaactacagctcccagattagtgcaaggtgaccatctaaatattcagaatttagacaattatctttgaaacactagtttagcccaagtcatacctgaaatttttcatagatttgtcttcagacgcatttgcccttgaagatgcattatttttccttgttttagaattctagttttttcctttcaaagtgctcttcaggcacttaaatcaatggcttttatttctgttgctatgaacttctatttcgtccacagatggcattacaataaaactaaaggaaataaagaaattaattgcttaccccaaagcatcagctgttttcattttttatttttaccaatctccccctttttcccaagatatattaaatattaaggtaattgtttcatacagtaatttaaaaatcatatactgtgtttttcaagtttattttgtcatttatttatttacacaaaaatgtgtaccctttttctcatttatctgtttgccattgtgtataggtgaattttatggaatgacttactttgtttagcatcagctctgaacttgcaaacctggaaagaaacatcacagctgttcaagcagagtaagaagtggtttgattatacatacatacatacatacatatatatatatatatatatatatatgaagttttttgattttatatatataaacattatatataaacattttaaatatatataagcattttatatatataaaatcaaacaacttcttgtattatgtatatggaaatatatataaacatatacatatataaacatatgtgtgtatatatatgtatatatacagattacatgttaacattgagagtttctaaatatcctcatatcatgacatgagtcactttattgaggacttataactagtggaaattgatgacaaatgtgcaagaagccccccctccttggcattctttcccataccccaagagctacaaaatattggtgttgtcttctaagtggtcaatgcagtgtctacaagatgctaccttagttattgatccatggataattggtaattgtttccatattttctggatacctatgaaaatgcctcaattgtgttttcatactattatctctccatcttctcacttttgtctgagctctctgacatttttttctctcctctgtatggctttaagaagcaatatatagagatggaattcacaaatgggtattactctcttaaatgtaattggtgaatctcaataatgtaagttgcacatggtactttatatttttcacaattgtattttaatagctggcataaaggtcacatgaattggtaattcagttgaaatttttttaatttgtagaaatgaatagttttccttattttttactacatgttttcagaaataaactttttcaccttttaaaattatttctttagtataaatttacaggaagagaatataataaactgaagatctgaatgttacattgattcttggtactgattgttacattgttttctagaaatattgtacttatttgtcctaatcaaaacaaaagcaccagatttacattatttctggcctttaatgttctcatatatggaaggaataaacttgtagatcattttttaaaatttcccttttttgatgtagaaaatgttttttctcatttagttctaattccatctctgcattatgtatttttgttcattgtctttaaaggacttttgtctgttttttatttttccttttgagataagtagaatattgaaaaatacgagatcaaaggccctgtgtaccaatgcacaataaaatccaaagaaaatcatatagtataaaaaataaagtcaggtagaaaagttataacaacttaaaaaaaaccttagggactaaggatcaactgtcaatgttactggaatccagttctatgcgagaacatgggagcaaggggcagtggggggctgggaggagggaaacaagtttgaattgattggacttcccttccctaatggcccattatcaaatgttctaaatgaagaaattcgattgccactaatctgagcagaagtataatttaaaaaatgagattgattggtcatcagagtgtcttataagaagccatttaaattttatttttcattttcaaaaatttactgttatatagatttgctataaaccatggattagtggatttgtgttttcatgggtttttctctgcctagatattttacttctttccaaatccttgctattatggactccttggaaaagttgattctatacttaaagcagtgctgtctatcttcttggcatattgtatgcaatacaatttcataaataatattgtagtcacacagtttccagtggaaaaaaaatcacgaactgcagcattcataaaacttaaacatggaagccagattattccttagaaaagcagataaaaccaaaccaagtagtgttcaaagtttagaaaactgaactcttagctctttatatcattttgttttgtcaccttttctactccttaaggtgtctgttacgtaatgaataaatggtccggtaggataaaagctgtctaaattcttcacagctggtgcaatatgcctcggtgccttgtcatctacctgcccacacttaattaataagcatctgtttcatttttatatttactcaagatagtggcttaattttatattcctgtttttctacttatttctagcaataaatggatattttctcttttctattccttcccaaacagcttatattgacaaaaattcagggcatgtttgttaaaacaaaatgggggagcagactcccaaggatttagagttgtagaaattaaaagatgaaataacttctggataaaactgcagtgaatttagttgcattttatgtgttcagagtttctgttcctgttcaagcggttttagtctttttattttttgagacgcagtctcgctctgtcgcccaggctggagtgcagtggcgcgatctccgttcactgcaagctccgcctcccgggttcacgcccttctcctgcctcagcctcccgagtagctgggactacaggcgcccgccaccacgcccggctaattttttgtatttttagtagagacggggtttcaccgtgttagccaggatggcgtcgatctcctgacctcgtgatccgccctcctcggccacccaaagtgctgggattacgggcctgagccaccgcgccccgccgcggtttcagtcttatacctcactaccagatgcagaatatcaaatagagtttatgataaattacgaggtaacacaagtgtttcccagagaagactttaacagcaaagtcctcattacataggttttgttgttgttactcctgggaaccagaaacttgacagcctagagctatatttaggtttatgatcgacaacttctgatgctctatttatgttgtgtatgtgcaggtctagtggggaaaatgttaataatacaaagcttctccaaggaaacaactctgaatgtgtgggaattgatgcactgctaaatgtagcaacataggtaaattacttttttcctttttaaaaattagtttttattttttttctgttgttgttgttgttttgcttccatacgagaagatataacactttttaatagtgtttcctacttccaggattttttttgacatttatactcacttttacacaattattcaaggggttgagaattattaaatatatatataatttttgtaacactatgaaagagaacaagatataaatgacaagtttcttgctctttatcaaaatattaatttgtaatagaatatttaaaaaactacaaacatacattctgagtcaagtagtgttttaatggggctaatattttcattagaatacaattactatttagttacataataatatttttattagtgcattatatattttagaaagaattaataccagttctacacaaaatatttttagaaaatagtggggaaagagtgaaccctttctagttatttttatgatgccagcataaccctaataccaattaatacctgataaataacattagaagaaaatgaaattacagaccaatgtctctcatgaacataaatgcagagaaagaattaactgttgatatatacaaaaccataaagctcaaaaatgttatgctgaattaaagagatcagacaaaaaaatgcattatctataactgtaaaagttcaagaaaagaaaacaaatctaaagtgggaaaaattagatgtgtaatttcttatggagtgaggaaaagaagtggtctttgtccaggaaggagcataaaagaactgtttgggatgctgggtatattctatatcttgtttgaagtgataattatacacatatagagatatagatagatgatgaatacaataaaactcatcagctcatatacttaagtttggtgcattatttccctctgtatacatttgacctcagttttacaaaatgaatttttataatgttgttcataactgaacaatatgcaaatctgataatttttacattgtgatgatatgctccagtatttattggtatgtgttttcttggtttctagtctgagttacactcagtctcaccaatttttctattcctgttactttttcaaaatctatgtagctactaatgatttataagtctgtgtgtccattctttaactttctgctatgatcaggacctatatataccaaactgtgaatggataacaccatctagatatcacaaatataattcaaactatatttaaaaccgaggttattatctttgctttacaaaactttttccttgtctccaccttagttgagatataattctccatggcttccaataagaatatttagaactgttcctgtatttcactttccttatctgatacatccagtagtttttcaaagttattaccatcaaaaacagatagtcttaattcttttcttcctattctaattgggttgactctcatgaggactgtttcaatagcctgatatataatgtcagtagtggggttttatcaaatgtatgtctattgggagggagttggctttgcttgattactccagatgactacctagtgccctcggaaaagaaagcagagattctttggtatgagatatggcactaaccctttatggtttagcatttacatacatccacagcaccctttactactacttggctttcataaaaactaagcctctttgagtttcccagacatgctgtggtatttcattccttttgatttcatgcgtgctatttctccttacaagaatgctgttctggtcttatctacttgcaaactcctaattttttttttttttgagatacaattaaagcttcacgcgctctgtgatgccctccctgatacctctgagtttctaatacttttttttttttttacataaagctattattggaattgttgatttacatatcagactcctctactagattaaaagctcattgtgagcagggctgtatctgattcgtctttgctttcccagtgcttaagatagaaaaggcacatgccattcaatcaacatctttgcaataaatgaaaaattgaacccaaagtgaataatgcagttaaccctatttttaaagttatagtatcacatttcatttaaaattattataaaatagttgaattactttaaaattctagatatatattatttcaaatcaattaccaatgactgtattgctattatttaggctgatgaagcaggccgggcatggtggctcatgcctgtaatcccagcactttggggccaaggcaggcggatcatttgaggtctggagttcaagaccagcctgaacaacatagggaaacactgtctttactaaacacataaaaaattaggctggtgtggtggcttacacctgtaatctcagctacttcagaggctgtggcaggagaatcacttgaatctgggaggtggaggttgcagtgagccaagatcaggccactgcactccagcctgggcaacagagtaagactctgtctcaggaaaatagagtaaaataaaataaaataaaataaaataaaataaaataaaataaagaagaagaagaattgtggccacaaaaaggaatctttcacaactttattaaattaatatatctcaccttttcaaattttctgttcatttatgttacataaatttaaagtttttgttgtattttttgcagttgaaaaaaaattctgaaataaaactttaaagataaatcctacaagaaagatgagaaaaattcaatactaacatattataaacttgataaaacttgtagttaattctcctgagaatttataaataaatacacatatacatagataaggcatatggctggcagccactttaaaacaagtacaaagcttctcaaaataatgcaaagttttgcagagcttgttaaaaatagaattatagcattcaaagtattaatttgtactcaaatgttccttataaaaaatcatagaataaaggaattatatttgatttggcacttcacagactatagccttagtaagtaataattttagagacaagtcctagacttgttgtgtacctggatgtatttgttactttgggttctaaaaattgtttacagatttgacaactagagattgcttctaattttaaaatgtattttctgataaaattacatgtattagatattaattttgctgaatatacgctttattctcagattgcagacactttttccaatcaaatcttcctctagtaagagagttttgaccagtcatattttttatatcaacatcaatactgcctttgtcatagttatacacattactaagcttgaaaaaattgagtctaaatttataaatcagaacaaatgatatgttctttgtatttattgtacccaaactatcatctcaatttatctgcttgttcaacaaatatttaatgctagccaactagatgacggaaattccattcactggaaacagccatgaatgaggtccttccccatcagatgggagtgataaaacttagtgtggaaacatctggccttttatgtatttagaggatttttcaaaatcagtaaagctattctctagtattataaactgtcatggtgtggaacagatactctgagacagagttgaccaaaactgagttgttttttttcagaacacatagaagcaagcaaacccaaagagattttcacgtggaggaggaaatctgacagcttgctgtacacactgaaaaatggagtaattgggaaaggcaaggaagaacattcaaatctcatagaggtcaatgccttcaaaattaaagcatggagaggttaccaggagagcacctagaaagccagagatttagcagcaatggcacaagctggtagattggaaaacaaaaattagaagctattttcttttttcactattggggagtgggggagggaaaacatgcatctgattcacagattctgccatcaaatcctaacaaaattgaggcagggatagaaatgatgataggatttagcttcaactttgcccttgcaaatttgttttctctaatctttataatttataggttaggaaaatcatggtgtgatctaataacttaagatgaactcatttattttaattatatgttattaccagactcgactgagaagtttgtaatacagaatggttgtgtatctgtcacaggcatacacaaaagcaatttttttccattttaggtatgtgcatgcactaaagataattcttagtagggagaagcagaattgtcccaattaaggatctttatttcttggaatagtggaataaatgatggaatcctggatccatagagcttatctagccccttgtctgtgagcagatggctatgaacagaagtcattgtaaaaccacaaaattaccagaattactgataaatcttttaaaatatagatgccttaccctcaacattcaagtttctgcttcaaaatgtgggtgtggccttttcatcaatgatactttgccaaacctaccaaatgtcctggggggtagccaaagctgacaaactgtagtataaaatacctctaacagctggtgttaactagggctaggtttattttcttctgaactccaggaaaactagttaattttaagcaactttcaatttatacaccaatgatttattgagtgcttcctgtgtgctagccaccaagccgtcaggtaaaaaccaataacacatgaatacttccttccagaaactcacaattcacattaaaaaaaaaaaaaaaaaagagagagagggagaagacagtaaacaggaactgatttctcaggaactcacttggattgaaatccacagtgtccctccactctgatacatcaagagaagtacacgtatatctaactataatctttatctctgtctgtatctatgctatataccttagtttaaatttctataacagaataccgttgtctgggtggcttaaatgacagaaattatttctcatagttctggaggttaggtggtccaagatcaaggtacccacagattcagtgtctggtaagggcctgcttcctggttagcacctaatactttggccatcttttccttgtatcctcacattggcagagagcagcgaggaggatggagatcaagctccttctatctcttttaagttttaggttaggccacttgtgaaagatcaaactgcatcatacattgacatataattaacacatattaactattcactggtgcatatatatatatatatatatatatatatccatataatttttataagtaggcatccaggtgctatggcatttgaagcacccctcaagtcagcccttttaacttcctaaatgactatttaaatcatgaaacataggataatttgaagaaatgcacatgttgaaaaaagaaatgcaaacaatcatgacagctaaataaaaagatgcaaagtttttttttttcattttatttagtatcctttctaatgccagccctgtacttacaacagcatttggaagtgggaaaagcaccttagactaaggttatctcgatgcaattcccaccaaaagctggaatctgttcaataacatgacaggcagaaggtcagtagcctctgtttgaaactcctggttgtgggggggctcctgctttccaagaaatctgaggatgctatgactgtattattagaatgttatttttgtaataagcccaaactctctttatgtaagctctcttttggaggctaaggttttgttctcaagagcagcatatattttactaaattcctttgaatataaaagcactgtagaaatttgagggcagctaccatttacttcattgagcttctctttctcagcctaaacagcctctatttgaaaacacatacagttttctcactgttcttatttctttcatctgaatgatcaactgttcaaaatatattggaaaacatgttgccaaataattgaaaacaataattcagacgtggcctgatctgtgtagaaaacttggagaacgtagaaaaacacactggaaaaaaaaaagtttactgaaaattgtacctctcaaatttaacaactgttaagatttcttatttcaaaaatcagattttgatgtattttcaatgtatttgttcttaaaatgttatttatggttgacaaatcataatcgcatacattcatgggatacaatgtgatgcttacatatatgtttgctttgttgaatgattcaatcaagctaattaacatatccagcaccttgcattattcacaatacctaagatatggaagcaaaataattgtctatcaagaaataaaacagataaagaaaattcatatacacacacacatgcacacacacacatatatatgcacacttatttaatggaatattattcagcctttaaaaagatgacaattaaatatactcctatgcatacatagcacattacactttatcctaaaatgacattatattataaaatcatttgtaacttgttttattcatctagcaagatctatgctttaaacatttgccaatgttgaaggactttaagtatgccaatttacatttggatagatttttttcaaattttgaaaaccacctttttatcattataactaatgccataactaacacatttgtacatatttcttttaagtgactttatcttatcagattttctaaatcaatgtttcacacctttatggctttttatactatgttcattcaaaatgttccatgttgaaatggtttccttcacagaagcattggagtatgtattgttttctttcaccattgcactgtcttttccaagcaagagtcagatgtgccattttccgtaccatttttataactccaaacattttgtaactccaaggctatgatcattggatataattattcattatgctttagaataattgtgatttctccctctctatccagttagctgtgtgagtatataagctgtgtcttttatttctaggtgccaatgactcatgattaataaatgcaaacttgtttttatttaccaaaaattaaaaaggaagtttacttagtttcctggttcttcttagtattttacaaccatcctttgcaaatatgctagatgctttcaattgacatcaatttatgtttatatttttcctcaggtaaaattctaccaataaattgaacaaataagtagcatcttagctataacattctgcaaatgtttttcatccccttcctctgcatgattgtaactgtttacttctaagtcctttctgcaataactccccttgagaatatgtctttgtgattctgtttatttgcctccttgagaaactctgttaatgtgtttcctttgttgtaatgtaactggatagccatgaaaggtagtcagtcatatggtcttctctttcttaaatgatgtaaacatctagcatttcgtttttcaactgcactattaatattttggcctagataattctttcttcttggggactgtcttatgccttgtttaatgtttagcagcattcctggcctctattaactgtcaatagcatcttccttctctcctccatagttgtgacaataaaaaaagtctgcacatattaccaaatttgccctgggtggaaaaaaatttcccagttgaaaaccactgatctatatgttataccagtcagcttatcagtctatgggaaacagatttaaaaaatagatggatagatacttagaaagacaatttttcttggtctctttgttaattagcattatgtcaaagaggtgaattactgaaacaagagggaggtaaaagaaagcatgagtctttcaagggttcagaagtacatattgcacgtcacaaaatgtgttgatcactaatattacatgatataaaatttttacacatctgtatagaagaaaaacagtaaaaaaccttagtatgctaggataaataattgtattttaattctaacttaaaataatctttgaaatatatttgttatttcctcagtatgaaggatgtgtgtgtgtgtgtgtgtgtgtgcgtgtgtgcgcgcgagtgcccatgtacttgtgttaagtggtagttatgttggtattgcctccatctttttactttaatgatatcaatgtttatagttttgttggaaagataggagatcaaaaacatgaaccaatgtgcaaaatgatctggtggatccgggctttggaatcagacttgggtgggttggaaattcagatttgctccttcctggttttgtgtcttaagggaagctatgtggtatctattcttaagtaataaatattatattatccacatctgagaaatgagaataatataatatttaacttcctaggtgattaagagaaatatataagatgacctgtacagagccctcacccatttcttgaaacacagggggttctcactgtttctaattcctggtctctgttttgattagaagataaagcaagagtgcctgatgcctaaagttttcacgacagaataaagaacagaggtgggcaggtatcatgtgagtactgtcaaacttcccataaacattgatctgttaatactgattgtggacaagtttctcctatcattatacgtaggtcatttgtaggagtacgaatagtcaaaatctgatttctcagtgagaattgtcatatattagaaagaactaactatacactaagtaattacggtaagaaatagaatgccttagaccatatattgttttttaacaaatatacgaggaaatatacattataaaataaataagaatcagttcgaatagagcatattgtgagtactgcatccactcctaagaagtgccagaatgtgatctctcttctataccatgaaagaggatttgaaagcctgaagaaaaaaaaaaagaatttggaaagaattaggaaaaagaaaattctgtgtaggtatcttatgccaacataagggattgtcttctcataactctgtgaacatcacttagcaaaatttgaaccattcaaagtttaaaaggacaattctgaaaaaagtgacccctaagcctctttaacatgtgtctttttattgtcaacttgtatacaatgagcaattaaatataaatctcatctcatacatttacaacggtaatatttaagccaattttgtaaagaaacatatgataaaataaattatcactgggaataatggattcatttttctatcttggagaactaaaaaggcttattaatctgctgcagaataggtatgatattaagtaaaccttttcagttgtttatctgcttccaaggttttgattaaccaccatcagtaaaaatgaaatttcattttatcctttcaatgttacctttgtccttgcctctaacagtcctgtaatggatcctgcttctcattttttccaattatgcccataatgctaatgccttcaggcatcaaatgtcctgtgaatctttttttgacccgcctcttcaggcaatcattacaactttcagcttctattactgtactccatttgttactgctgctcatacttggccaatggttgtaagatgctgcctaactccatcttcctttcaggcactatcattcatgcctgaccactactcctgtttttcacagcatatactctgacctgtcagtgttgctacactagaaattatcatactgtacctattctttcccctcaactatatagtgatgcatttctgtgagattcattcttgttgttagttcttcttatagctttaatttgcatgaggttcatccttccaactatttctctttttaaggaaaacaatgggtatcattatatatacaatatgaaagtactaattttagtgttagatatgtattagaagaaagatttattcttctatttaatagagaagcttttaaaaactatatgaatagaagaaacaattttaaaagattaaattatctctaggttgaaaataatttcaatgtttaaaaaaattttcaagtaggaagcatggcttatacttcatagaagtattaagttatatttcattaacattctgagatgccatcaaccttatctgaaagctatttttgggtctttgcttacagatctgagtgcttgttcttgctctacttacttctctgttctctttctcctctataactgccttacagacccatccctcccatggcctaccaggactctgaataaaaattcttctctataaactgcatatctcagccttcccctatcagcattcaggactctgcttttcctgaagcttctaacactacctactggtgaaatacattctttgattcttgtatctctctgtgcctaactgtgttatataagaccactgaccctttcaaagggctgatttgttcaatgtaaagacagtcaaaacgtacctcttatttcttacagagatatagttccctgtaataagtaaagcatgaatttgctaagaggaaaaatatgataaaattatatagggagtaatgcctcctgttgcattgtccaagcaaagtttttaatgtcttgtaagagaaaggaaagcaattctattaaagggaatgatctcacatttctattctgttggaatccattcacatcctcggtatacatggctgctgtcatattttaaactcagtttaattcctacccagttttctcattgactaaatttataattagattctctgtcttatccaaagtaaaagtaagttatcataaacagaatgcatcaaaagaggaaaggtcaggctagagccaaaagggagtggtggggtgggggtgcagagtggcagtctttcaacttcaaactcttgactgtttggcaacacgacacagttttatttctactcctgtgcatcttagttcattaaggtgcctataacaaaacagcataaactagggggcttataaagaacagaaatttatttctcagagttctggggcctgaaaatctgagatcagcgtgccagcatggtcaggttccgatgagggccatcttctttgttcatagaggaccatcttcttcactgtaacctcacttagcagaagggcaagtgaaaatgcttttcatttataaaaacactagtcctattcatagtggaggtgcccatgtggcctaatcacttcctaagagccccacttctgaacactatcactttacaggttaggatgctgacatgtaaattctgggggtatgcaaacattcagtccactgcactatgtttgtttgttttatgtatattttaaccctgaggtaactatgcctaccatgatgtattatattcagactgtagggttgaattattctcacttttttcatatgaattttcccttgaaggcaattcctttaaatatagtacaattttaatactaatttgtcaccttactataatgaattagcatttgctgtcttttcttataggaaatgataaggcattaaaagagtacccagagtctatgcagaggggtgttacataacattttgtctttcgacggatgttcaggtgacctaagaatgtaatttaagagtcatggtagtgggaactaatacttctggcacttaatttgtgccagatgttttcaaagcactttacatatattgacaaatttattattcaagtgaaaatgttatgagtgaggtcctcttattagtgacatcaaagatcttgtaactgattgtatgtcaatctttacactgggtttacaaaactcagagagaaatggtgatcctcagctaaacagtgtagcaagatattgtactttatgtcatattattaaaccattatttatgtacaataaagtccatgcattaaagttcaatgatttttgataagtgtatatagtctcatatttctataagtgtatagaaagaactaccacaatctagttatgaaatattttcatcccccgtagagttctttcttgcctttctatagtcaatccccctcctccacttccagtccagtccttggaaaccactgatttcatttttatcactgatttgccttttcaacaaagtagtacaaatggaatcatacaagttatagttttttcatgtctggctacttttacttaacatagtgttttgtaattcatccgtgttggtagatacatcaagtttgtctctttttatttgtgactagaatcttgtatggaatctagcttaatttgataattaaattatttcaggcttcatctcctccacccttccccatggcttctttactgctttatttatttttttatcttatttggtaccatatctatctttgcaaataaccttgaattatttttggtgcaggtaagaaatagatggttggatgacagagggataaattataccttatactaaagttgacctgggatcacaggcgtgagccacggcgtctggcctatttcccttttaagtaaatatctgggtaggtggtctgagaatagtctgatgtgaaagaccttggctcccagaaactggtacatgatatttctcacatctcattggccagaaaacagtcacatggacaggtaacagcaaacaggctaggaaatgcaatcttgattatgaaaggccatttaaccatctaaaattggggtctctaacaaaacagaagagggcaaaggattttgagaaaaactaactgcagtctctaaatatgtaggctcaatcattaccttccttttccaaatgaggaaagtgagacatagagatgttaaggctcatgcctggcattgtacaatattcccttccgtttttattcatcctgttacaaatgcttgttgaaaggtcaagaccagcctggccaacatagtgaaaccctgtctctactaaaaatacaaaaaaaaaaaaaaaaaaaaaaatagccgggtatggtcacgggtgcctgtagtgccagctacttggaaggctgaggcaggagaattgcttgaacccaggaggcagaggttacagtgagccgggaccataccactgaactccagcctgaacaagactctgtctcaaaaaaaaaaaaaaaaattaaatgaaaatccttgttatttttttcttctgtcagtcactgccaaacttaagtctaactaatataacatctcattagagttgtggctgtgaaaggaaatgatccttaaaaagtatagaagagtgtttgaaatactgtaagcctttaataaatgtcagctgttgtaatcaatggaactagaaaaattattaagatatagaaaaatattttcatattctctttaatgttcacgttctttgaacattgtaaccaatgtatgtaattgtgtgggaagtatttttagatttagttttacataggagaaataatttatagtgcttctattagcatatgtgatatggctgaagtgggtatgaggtaggttcatgtgttaacagactgaaccagaataggagtaattcaaacatataacggttgtatgatcttgcaaagaatttaacatctttcaacctcagattcctgatcaataaacaattctcactttataattatataatctctaacagccattctgccaattacaaaatatgaatgtgaatagctctctctctctctctctctctctctctctctctctctctctctctctctctctatatatatatatatatatatatatatatgaatagctatatgatgctcagcaaatggtagttaatttgcttcctgtggattaatgtatttgatattttctaaaatgagagtaactagggtaaattctgataagggacagtccagaataaagaggataaagtgagaagcacgatgggaagaggcatcaatgataagctaagtattgaaaaattacattggtgactgattttattcctccaaaattgtattttggctgaacgttgctttgaatactgagtacgtatttgggtgttatcatttattttagaagtactttggagaaagaggtgaacataaataggtgaacgggagaattttcagtttattgttctttgttctaactttgagcacagcaatagttgatcactttaacagttataatggaacgtgtttcggagcatctaacaaagcatgtgattctatgtttccttaatttaatttttaaaattttgcattttttcttcgtcagtgcccatatgagtgccaagttatttattatttaaagtagtttaaagatatattactttttgtatctgaaatattcaattgctttcctaaaactctttccagataccatacgtgttacccaaaataggagaacctttgctacaagaagaagtgctaatagaatcttacaaagaaattctgtaacaggttattggcatcctgaaaagaatctttttgaatgcattcagaaacactgtatcttgacattttaaaactgggaacaaccctcattcctgtatccgttcacaaaatactgccaatactcaaaggtgttggttccctcccacccccgcttttacatttgtttgccttttgacaattactctgttcccatgctagtactttatttaactctcgacctctcatgggtaatctgcaagtctgtacttctttactagatcctactctatctccttcatcccagcccaaccgcacacagaggctttaggttttaaacacagtctaggtgggatgtctgagtagaatttttttccccaggtcaagtttaaaaagtcataaataaagtaaaaattttcaggaaaagaacctggaaatgtaacttatgtaaaaccttacataaactacataaaagtttaaaaaggaaaaaaaaagataaaatgacaataatagagtctctaaagaccagagatcatttaacggggaagggggttgataaaggagggaatgggaaattgaaaaatctggaaattgacaaagctatttttggctgaacatacctgctgaagaagaaacaaaattggcctatactgtaataagggaaatttggattttatacaaggaaaagggaaaatacttaaatactagaaaaggattttcatgatgattttggaactcaattcatagagctcttgggaaataaggtagatgtctccctgcttaggaagctttaggctgttatccttcttagaatcataagtgtagactcacacgtccctattgtaccgttttgctcttgtgattctgaaatcctcattaacattggtttcaggctaagcttatttttgtctactgagatccatagaaagtggttatctctctctagttgagctattcctttccaagcatgtgttttcataatctgagagcaaggttaggatttggaagctagtgagggatataaaagaccaggttcaatgtctctggtcttcctatgtaaatcttacccaatttgagagcacagtcatttgaatagtgcagaaaacattttgatctaagtaccatcactgtcctcctattgaaaccactaagttgttggtctgtgtctataagattttttaaaggaaggaatgtagtgataaaatgtaacagctttttttttttttttttttttttttcctggatcgtgaccttgccaatactttgacttctacccagtgatactcatttgggttctggcctccagaactgtgaaagaataaatttctgttgtattaagctaccaagtgtgtggcaattttcttacagcagccatatgaaacaactacagagtttttacataacatctcaggcaattaagtgagctccgtttattcagtgacactccaaaaatcttcacttcctttcacagtgctgtaggtatctgcctatttaaaaacaaaaatggcagcagctcattcaacctaagggtcattactcttgatacttttcacaaagtttcttctggaattcacaaaaggttcagttatgataaaatatgtatcacaggccttggctaaggtcctactcttagttgtttcatccatctttcttcaagtattcatttgattaccaacaaaacaatttctaataattcaaccagtacctgtgatttgctaaccaccatcatcagctttgcagacacaccgttcagtgagtcttgggaacttatactttgatatttctactagaaactaatgaaaagaaaacatctaagtagttttgacgaagtcatatagagaagaaaagaaaaataagcaaatagctaagaacaatgtcataaatgcttcctactactgctactgcaattgtacatttaaaaaatactatgagaacactgaggaagtcactgagagcctggggaaatcatagaaagattatcagaggaagtggaacgagagggtcactaagcaaccctctgatcaagtatattttgatggacatttgggggaaagagagcaatacaaacaaagtatagggatatctaaaaacttagtttgtgtgtgggatggttttccatttttagaaaactaaagtttggaatgtgttgcaggaatatatagaagactggaaattgcaggcattttttcccttctcctgagctcaattacccttacaattccttctttcaatttgtaaatgcataaaatagcattagcctctccaggaaccctttaatttctatattattagtagtagctgtagcagtaattaatacttaaagcaatgtctgtcatttgtattagttttataaattggttttataagaaagaaaaataaaatagaatatatattttttgtttttaaggaaattgattcactgatattaatatatttctcagaggtaaaaattatattttaatttacccctaactttttgtgttaattctccaaatgagtaaaacatcatttctttcttattcaaatgagcatatcttatgaaaaagtgtcacataaattttcagcctgatgttattaacagtcttgagtcctgatttttatttatttatttatttattttgtaattactggcatccaaaaagttgagaggccaattattagtgaagtggtccaatctcctctggcaacttgtcttacattgactaaataaagggatatcatactattttattgctttttcttattcccagtaacaatagttaactggtgccttagttagattcacatttacttagagaggctgctggccacaggtaaaccccataccctgtgtattacttcagcagcctacttattttgttgctagactcataaacctcacgttgtacaactgcatcttgagttgtttttctaaaatgctgatctgaacaccactttgactttttttttttttttttttttttttgagacagagttttgctcttgttgcccaggctggagtgcaatggcatgatcttggcttactgtactttctgccttccaggttcaagcaattatcctgcctcagcctcccgagcagttggaattacaggcgcccaccatcacacatgggtagtttttgtatttttagtagagatggggtttcgccatgttggccaggctagtcttgaactcctgacctcaggtgatccacctgcctcggcctcacaaagtactgggattacaggcataagccacagcgcctggcccactttgactttttgttttttttttttttttttttttttttttttttttctggagatagagtctctgacgcccaggctgcagtgctggagtgcagtgtcatgattgcatgatcttggatctcaattcactgcaacctccacctcctggttcaagcaattgtcctgtctcagccacccaagtagctgggattcaggaccactgcaccacaccctgctaatttttgtatttttagtagagacgaggtttcaccatattggtcaggctgatctcgaactcctgacctcaggtgatccacccccctcagcctcccaaaatgctgggattacgggcgtgacccaccgcgcctggccccactttgacttttctaatctgttggcagcttctcctaattctcagagctcaactctttaacagaatgtcgttggtctttggattctggtgtcctctttttatctcttacctccattttctgatcctccttgcagtgaacatcctcttgctttctcttccgtgctctgttttgtttccaggcctttatgcataccctgctgtacctttaattcagaaaactctctctcccattccctcattccttgccaaactaactcctactccttctttgagtcttggtttatatatgatttttctagaaagaatgttttgatttctcagaaaatttagtgatatacttctgtattttcttatagtgccttgtaattgcccttttaaaatatttttttttacagccgttgtttctttgcttgcctttcttcattactgctttctgtgagggcaggattcctgtttgtcctgctgcatgttgtggaacattgcaaaacatgctacaaattcctcgcatgcacacttccttttaaaagtgatattataatagctctcttccaagggtggaatatattctccatcccattgaatctgagctggatttgtgacttaatttaacttataaaatgcagcagagatgataaggttgggcctttagtggtgttatcacatttaatcccaactctttctactctgatagccccgtgtaaggaattctgggctagcttccttgaggatgaaagacccatgcgtatggaactcagccagcaccaactccacatatgtttatgagaacatgtttcctcctgcagccagcagctggagtcaccctaaaagtggcagcagggcaattcccacagtgaaattccccagacctttcctagatgggaccagttaggattccaaagaaagaagcactaaactccagggcgaccagtccaaagcatttattcatagaacttacatacagagggaggctgcagcacatcctcacaatggacatcagatgtgctgcctggacaggtaagagagttggcgaagacactttctatttctcagtcaggacagaaaaaaaaaaagtaatggaaactggaataccctacatgtaagactacctagccacagttgagccttcaaatggttacagcagactgagtgaccccaggcaaagccagttaaattcccaacccccagaatcatacaattattgtgttaagctccaagttgtggggttgttagttttgcctcataaataactgatacaattgttgtactcatagtgtcttttgtagtcacagtacctggtacattgtagtatacaaattaatcaacctatttgcttctggtgaatcttatgtcttcattctctaaataaaacctaccatgcagtgccaatgacatgtgaatgctcatgcacacccatgacttctactagtgcctattgagatacatgctttccaaaatatcttgccattcctagagttgagaatgacagttttatttgtaaaaaaaaaaaagatactatttatctaagtgttatacaaaatgaaaaaaaaatattgaaaaagctagttatttccaagaagactaagttgaatgatttggaaagtcaaaaaaagttaacaagtttctaagatgttataaattaagtctaggaaagacaactataaaggattcaagtggaattcaaaaactgatgaaggaattttcattcagattactttacaagtaatttctcactcctaataatttatatattatttaagattaaacagagtattaaggcatgccattaccatgctttcatgagttatactttaatactaatttccaattaatcaattacagtgtcatctaggatatttgacttactgaatgcatatccataaaatgaatgaaaataagtagaattggcaggaaaagggtgaatagcattactcattgggacaaaccgcataaatgaaatgactttagcatgaaataccatgggttttcgaaataatgttaaataatgttagcagagatattaaaacatgagaagaaatggtgtattaaagtgttgccagaaagatgcattggacctcaattgtagagacttctcaatgtcaaactaaataatttaatatggattccataaacaaagagaaaactgaaaactgccaatttttgacaagtggaataaagtgaccaaactccaaactacatttaggaaagataattctagccagattgtaaagtatgaataggagagctaggttagaccaggtgggggacctttgccacaattctagtgagaggtgatgaagtcctggggtcagctacaaatagttatttctacagatgtggcagaataacccatgaaagcagaggagcatctttctaaagcagaaaacctccgttgcacctggttccgccccccagggcagattttccttcacggctgaagggagaaaagtttcagtattggagagcgatgtacctactgtctttattttagaaatatggtgttagtaaccttacagatactcactgcaagttagaactggaaggaattcgaaaggccaagttcaaagctctcagtaaatagatgggaccagttgggattccaaagaaagaatcactaaactccagcaaactgtaaagtaaatttttgttgagaggtctttgtgcaaatgcctaaatgatgataatttggaagctcctaatataataaaagtcaggatcctaaatatatctaggcaatgtagatgatattggctacctctcagtttttggtaaactgcatgtaagtcaaatgctgtgctatattctagttttaaaaagggtgagagagctgattcatctattcatcctatttcacacacgatgctgtgttgcatgctgtaagagacagaaaggttaaaaaaaacacagcattttaaccatgaaagatataaaaaatcaggcaatcaaattaagaagtttttaaaagagcatttatggattattagcaagaagaaagttgtataaattgaataaaacatgttagaatttttcttatgttgatttcttaaaaagcaaaataccttttctctcctgttatgctctgtaaatattaaagcaaaattccttttctctcctggtatgatgagtgagtaataggactgttactgctctcaagaacattaatcatgggggtttctaaatatatcaacaacatgaagtcaataggtttcctaattgtggagttatttaatatggatgctagtatcttagagttttttttgtttttcagtagtcttccccagatgttaaaataatctgaaaactcagttttctgtatcttgtgacagtagtctaggctctgtcatacagataaataatttatacatttgagaatgccattttgagtagtgtacttaatgtttcacactttagtaattcccgatactgcatttttatagcattcagtgattttatttttttctactatgttatttatgagccaaaaacctatcttggcaaggctagtcattttagaaacctcactggaaatggttcagtgttaattctgtttaggggaggattcgtaaagatgataaatgcattgtgttataatagcctcatgctttcatctatcatattgttaaatcaaattgcaagtgttgcattaatgtgataaaatgcttttttcttactttatattttagtcatttaagaactgaaatcaaatgagaaaattggtcccaagtaaacaagattgcaaaatatttaatctatacaacaataaattaaaagcaaaagattgatcatataaatttaaatttacaaattatgcagataatattgatgctacgttgcatataggtcaactgtgggagaataattgactctcaggttgagtttaattatatttaacttttccaagttccaatcaaaaacgttgatccaatagtctggattgtatcaaaagtttgttgaggatgagtcctctactttcatactgccctcaataaaaaaaaaaaatattgtttatttctagcataattatcttctaccactgtgcatgttctggtatacaagtgaaattgtcaatactacctctcaaacctgagccattattttggagaataatgttcaaatgttgacaaacaaaaggctctgctagaaatcactctggaacctctcattatttatgctgaaggctttttattaaacacttgccctctccacaagaaatagacatggcaggttttattatctactcctgcatcatattatgatagaatgttatgatgcttcccaggaaacaagttaggtcacaaccctcatatgtagattccacaagtaacaacaacagggaaaaaaaaaaccgctggttctacagtgaatgtatgttaacacattaattataatctgcaatacagatataaacagaagataactgacatttaaaaagcacaggtcttagagtcaaattagcctgtgttctaaccgttgtcttgcacatattagccgtataacattagacaagttaccaattctccctggggtgtttgtaaaacgcagataacagccattccctaaggattatgtgaggattaactgagttaattaatatatgtgaagtgcctagaatacagtttaccacaaaggaggaaagatataaatgctaattttctttctcccttttcttcaagagtagtgacaagacttctcaaagcaaacagcaaatttctcattgtaatggaagtttatgcatcattcgaaattggaaagtatcatcgaaattattgcttcacatgctcagtggcttttattttcttctcttggcctcaaatatatcctggtagttgaaaacccgcttttgtactctcattaaatgtagtaaatcttagtaaatcagagttcacaaacagctgggacctcatatagaaaagagtttcaaattctgtaaagattaacagtgagatcatctttaatgctgttctgataatagtgttacaaaagagctggtagattttttttaaatatatatttttacactttcatgatgttgtttgtttatactgcattaatctccttgacttgggaaatagagtgtctgattttttacacaaaaggttatgaatgtggcaatgattttcactttcacaaacactgctgtggttatagacctttattacatgtgctttaagtcttcctgcccttcaggtgtgatgtgtaaaaaggaataaaaaaactcactgccaattacagagttttctctatgtcaaacaggacaccaagggttttacatgccttctcttatttgatcctcaggaaacctcgcatttatcactttgactgactcaagagatattgcttattctgcccccacatattaattattttataaaccagaagaagagaggtgaaagcagcaaagaaactgggggaaggaactaagagtatgatggttcttaccagggaaagaggtgggcataattccactattcaccaaaacctttatttaaataacgaattgctatcaaagtataacaaacgtttaccaaacacatactatattctatgcattgtgctagggctggggattcacagatccatgtaccctaattcttgtctcagagttttagtgtctaggttattgaattctaaaatttattatttatttatttatttatattttttaatggagcctcgctctgttttccaggctggagtgccgtggtgccatcttggctcattgcaacctctgcctcccgggttcaagtgattctcatgcctcagcctcccgagcagctgggattacaggcgcatgccaccacgtctggctaatttttctatttttggtagagatgtggtttcgccatgttggccaggctggtctcgaacccctgacatcaagtaatctgcccacctcggcctcccaaaatactgggttaacaggcaagacccactgcacccggcctaaaatttcttttttattgaaaccagtgcatcatctcattattgaaaggttttggaattattcctatcctaccttatgattctttccttaaatagtggaaaaatacctttagatctaagagatgtatacgtgcatgtgaccagatgtgttaaaattttaatgtatgaatttaaaatgcttgaagattctcaacattattgtatgtgaggggaaaatgattctatttccttatgagcattcaatcagaacacaattataatagttatctctcctttgtggttctgtctttactttttaatatgcattggcatttcattgtttgcctactagtttattcatcactaaaaaggctttgattttcttggagctttttctttgacgttttattttatctgaaaaaagtaactttacaattgtttcttgtgtcctctctttgtccccttcacttactttttcatttttcatctctcctcttttcctttactttttaaattccagccttagatgctgtctagatccaagtccttgagaaaaggtgaaaaaaaagaaagaaattaaataaatcaaacacctgcaacagcatttcttcttctcatattctctctgtctcttttaaataattcctcatgctgatctagttatttgatcttaaacaatagttacatgaacacatttaaaaaacattaacagtctctgcagttactcaacactgtagtccttcagagatatacattccttaagcacttcctttgcgcaaaggattataaatataaattgatcataatcctagttcatgaaacagtcatcatccatccatgcaatacaactcttattattattgtcttcttttctcctgccttgttcccaatcatagtcctctgtttttctgaggtacccattctaatatatttagtatatctcctctccattcatggatgataaaatgtgtattgtttctttaaaaaaatggcaaacacttcctttaaaaaattgaacactttactatgtgctaggatctgatctaagaagttgtcgtagttaaaatccataacaactctaacaagaaaatagcattattcttattcttattaaaatcattattatccccacttacctttttaaaatgtagacagcaagagattaaataacttagccaagattagaagccaatatatagaaaaatacattaaatgagccaagtaatttggttgagagcctgtttctgatcaagtacatggtgtcatttaactgctgtcttcatattttagtgcataagagcctgtaggaatggaattgttgggtgatatacatacatgcatactgtcataaagtattgccagattatttctaggatgattgcactaatttatacacccacttgaagtacatgagtcccaactgcctctctatttataacttaatattttcttcctttacattttttgccaaactactgtttataaagtgaaatcaagtgttttactgtccatttatttatttcctagtatgttagaatatatcttcaaaatacttacttgtcattttggtttccccctctgtgaatttttgtattaataatattaaataagtaaatagatgttaaacacttagagatattactgataaatagtaagagctctgcatctgttgttgttattatgattgttatacttatcatatttttcaatttgatctcccctattttccagagaatgtggaagagtcattaattccctataatttagacattccaagtatattctctgatgcttttatccatacatttatttttgtctgtgatgcactttggttaaaaatctatcattttgatgcagtaaatgcattcctttcttttttcttttcttttttttttttttttttttgaggcagagtctcactgtgctgcccagactggaacaagatggcatgatctcagctcactgcaacctctgcctccctagttcaagcgattctcctgcctcagcctcccgaatagctgggactacaggcacacaccaccacacccggatttttttttttttttgtatttttagtagagacaggtttcaccgtattagccaggatggtctcgatctcctgaccttgtgatctgcctgccttggcctcacaaagtgctgggattacaggcgtgagccactgcacccagccattccttttttttttttttttttttttttttagtatttatgatacatagtcatatttaagaaagcttttctgtctcagagttccaaacatagtatcttatactattttttttgttgtcaatgtagatttttctttcccattttagtattttatccatttgaagttaattttcatatatggcatgaggtcagttttttttttcctccatgtaatgagaaaattttcaaacaccatttactaacagttcaccttgccatagattatgtttttaggccatcacttatgctactccatttgatagtaactgcagaagtacaatgatatcttaattactatgttttataatataccttagtatctgacagaatcagttctctatttttgctcttatatctcaaaattgttttaccaactgatgatctttaactgaaaaaaaaagttagtgtttgtgaagtctcttaaaaaaaaagttagtgttggtgaagtctcttaaaacaggtttagaagtgaattgcactaagagataaatgaatttagaaaaacagatatccacaatgtcaagtcacttcaactgtgaacacagaatttctctaaatttggggagtagttttatgtcttctgatagagttttgaaattccatatacgctagtcgtagcctttattatgttagaatttttaaaaagctttgttgtagtttctctttttattgcaaatgatatcttacattttctggttgaaaattgctcatataaaattatattatggtaaacaaactcctatttttagctctaaagattagatgactatcctgaattgtctatataaaaatcataatcattcattaacaaatatttgttattttatctcttaatttcaagcctatatgatgcatttgtttttcttgacttacagcattacctaggaacttcagttctgtgctacacagtaggagtggtagaagacaatcctgatgctattcttaatcttaataaattctaaagtttattcattgaatatgatatttacttggatttttagggtatttttatagggttatggaaatttaattctaatccaattttctgattttcttttccatcattaatatttttaacttcataaaatcatttttctcctgcataaatgagatgatcatgtgatttctatcctttgactgatacatgtaaatatttacatttataaataatcaaaggttgagtcacctttgcatttctgggataaatcatacatcattatgatgacattttaataatatactgttgatttggtaagctaatctatttttttagtatttttaagtatagttcataaagtaaattagcccatgagttttttttttttttttttgtactttatctggttttggtatcaaagttaaattactatcattaatttaaaataggcaattttcatcttaaaaatttctggaaaattagatggactctcttgagaagtttgttagtgttcatcagtgaaatgatccaccagaaatataatattttatttaagttttcacatttatttgagctggtgtgtctcaacccaactgaacaaggggaagagtagtaggaaaggaggtcagtgatgaaagggaggaagttgcagatcatgtgggctgtttttacttttagaactttggcttttatcctgtggacatattgtttcttttaccagtgtataagaaacatctttgtgctttaggtcttcctgttgccttgaatttccctttatgtgaaataaaatgtctatcctatatataatttgattgaaatattttctgatattttttaaacatatgttttaaattttcaaatattgtatatcttttggaactgtatgtgtgtattatagatgatgtaaggttaacctgtgattctgttttaataagttaaaaattgtaagtctctatcttctgattagcctactaatatttattctaattgctatcatatgttgtcatatcttatttcaactttttatttatgacatattttccctttttaagacttcctttcaatgaaatattctagattatcaaatttaattttgctagctaaataaaatagtatgcttagttttgcagttattgtctaaacctaaataatagtatcatcttctagtcaactgtaggcttactgctgaagagggtaggctgtttagccagactggctaggttgaatactaaccctgggcaagttagtctccgcttcagtacttcattttaaattaaataataataatggttatttaccttattgtgttttagtgaggattgaatgggtgaatataggtaacacatcttgaaaattgcattgcatgcaataaacctataataaatgtaagttatcatatcccaaagtaacaattttaatatgcacttacttccctgtctgaccccttttcctcaaaatactcttatttccaagcaatatataaatactatattagtaaaacttgaaattattattctggacatttaggactatattttatcattactattgttcatttagacaaaagtaaatttactaacttctttattcaccttgtttccatatcttactgaagttttctagattgactgctttctatgttggcaatatcttctaagagttattcaaaaagacttttgatatttgtgctttctataactttttataccagatacatctgctttcagctcaaatttaattgttttcttttaagctgaaaaaagcattcctggctcaaagttctttttcttcaatatttaaatgttactttagtgtcttgctgcatccactgctgttgatatgaatgatgtctaactcattctatattttaggtgacctacttttgctttttgaaaattatgaccattaaaattttggtttaatatttagcattttatctatagcatacttagatattatttttaatctctcttatttgattgttcatgaactattttatcatatttcatttattttttaattctagaaaagtattgttccccattcctgtatttcctcacctgtatttattacttttttgtgactcatagaaatacatttttacttatctatatattgtagtttcaaccgggacattttatcccccagtgtgcatttgtaaatgtctgaaaacatctttggttgtcccaacttgggggtactcctcacatctagtgagtaagaccaggatgttgctaaacatcctataatgcacaggaaagcccctcacaacacaatattatatggcctagaatatcaatagtaccaattctgagaaatcctgatgtatctgaactcttcacttattatttctttttaaatttcattgtgtaggaggccagcaatttgatcttccaacttaatagtttgttctttttctacgtacattttgctatactgttcatctgttgaaatccgtatttcctcaattatatttttcatatccagttttctcttttatcacctggaaggcgttcaaatatttttatcctttcctacaaattttggctcctctaatttggctcctctcttcttttaaaacaaattaattgaagtgctcatatccctcagaagctttgtgtttttttcatgtgattccatcttttatttccttaacaatatcaactgtctggtccagtgacatgttggtagggaaggtggaaagaaacaatatcccgggccctagattttatacctctaagtgagtatggaaacttagggaaaactctagctttccattggcacaatccttccttgtgccccaatcccattccaagggaagtaaatatcttttacaacttagaaacttacagtctctccattccagtcattctggtggacaaccagtccttactataattgctcactaatgcagtctagagggtaaataagagaagtacaaggaaagcagtgcaagtaatgattcactaagtggaagaaggaaaaaattaacaactagaaagtgctcctctagtttagctcttactagccacctatctctggactgctcccattttggtttgcaattggctatttctggtaccttatatttgatgtagataatctttttttaattataaaaggaagtggatagtagataacaaccactttgaaaatgtgcaataaagagaactactgacttgaaatttacagatgagtcagtatttaaatatgacccctccagaacataggcagagctaagagaagaaagaataatggtcaaaagaacataccccaattcaaaaagagttaacaattaattattaagtcctgctaattctaccctttaaactatatctccaattcattcacataatttcattcccgttgacagcagcctgatttgagcccctatcatagttcaccacaaatacaagaaagcctcctaattcatctgtttttcctctggtcttcctgtcccgcctatctttccatttgttttctatactgccaccagtgtgttctttccaatatgcaactttcatagtgtcagtctttttttttttttttacaacattttaacaactttcctttgttctgaagcacaaactcattattctagcatacaatgccatttgttatagccccttggttttctacctcttctacctgcccttgtcctcttcatctgtgccactctggatttattaggcatcttcaatttatcattctcttccctgaacttccacatttatattcttctctttcaacattggctccttactcacctttcctggcaatttcctactcatccttggactgagtttaaatgcaggaagcactccacgatgaaaccaagtatactacccctctagaatattaatcacaatgtgaagcaactttcatttccatttatttttctcaattcttttttaatgtataagatttgtgaagggactcaatcttattatatcccatgtacctagcatgctggttgtaacatgtgtaggttacatggatgagcaaaaaaatgaaacaaacatcaacaacactgtataagagagctaccatgcaataaatatgctgtgcttgctgtttgtcttttataagaatgtgcttcagtgaataaataagaaaaactgatcccactcactttattgataaaaaaactagacattaagtgtttattccatatcaatggtgcattatgttaacttttctattcacagtttttcttctttggaatgtagtacttaacatggtttactcaactggagcttgtcttttatagagatgactgtgcggctcataaacatggttgaggatctctggaggctactcctaaagtagttcacttcctaggcccctgtcacctcagagagataattatttgtatgatttatgtgcttgaaaagaacctttgttcaagataaccttttccaatcacttttactatgtgactgtcaaagtaccctgagatttaggatttatctctgcctgcatggatcctcttttggtttacttacaggtctgataattgatttgatttctgatacataggtcaaaatgttgcttttttccttgtattggttctggacaattttatggataatctgagtgatttggtttagattgttgaaaggtaaactgcctagaattttctgtttttaaaatgcctagctttttacattcctaaaagatgatttagacgtctaccaaatttggaatagggaaaaaaaaacacattaaaaaccttgagttgaaaaaaaatttatataaaaatagttacttgtacaaataaatgatgttcaaataaaatactggatttacatgtaatattaaaaggttaatacaaagcattgtgctatattgagtaagaagtatttaaagtaatgtaacaatttatgctcctcaaagaaaaaaaacctttgcttttatgaccattttccaccaaataaatgaaaatatcccaaacaaatattgttcacaatacattgcatttcaaaggaacaataacaagccatttgcagtttagttttatgtctattgttactctactttgcagccaaaagtacaaaaagatgttggaaaatgctattaagaataaccttcctttatgtcttattgtatccatgtggagatttattttaattttagttttgttctctttttctttctaattccagacaaagttgtgttactgtgttgagtataacattacttatgacaacctcatacgtcaaggctatatatggtcatactattccacatactttgactaatttaatgatttgctttaaagaaagatttttgaaaattagaaattaaatcaaatggaaagaatatttcaacatactttaatatttaaatataacaatctgtaccacagggtaacattagtttgctaatgaacctatgatctgtatgttaagggattgcaaggttttccattacattcaaagttaacacataaaaaatcttaggccatcactttctgttcagatagttactgcagaaaagtatttggtattcttaatcattatatcttaaggtaaccatatttaatgttatattatgtatattccatttttcttatgtttttaaatttagataaataattgatttgcttgttgataggatgagactcaaataataagagctatcattcattaagaaccatgggtaagccagatgctttttcttaacatgacttctaatcctcatattttctttctgacaataaataatagtagtatattagtttttcaagggaagagactgaaattttggtgaggctaagtgaccttatcagatttaagagagctagtaagtagcagtactattgcaggcacagcatcctgataatttttggattgatccagcttcttccattgagtagttcttatctctcttaacccaaagggcaatacctaaggctttattgtcaaataaagaagaatcatttttcatcactaacttagcaaatgagtctaatcctcactactaatgggttattttaagaaatgtatttaataatagacaatctcaagctagctattttctcaagtaatttcaagcattcatttttactaattttactgattaccattaaggatttctgtatttgagaaaagctgtaacaatgtccaattcctgaaacaaaagaaagtagactaactttaacattaagcatagagtttaatttactatggggttacttttttattattagttcttaataaattatgcctcttttatggtttttctataaacatttgttgaaattaccgtaggcatctgtacatatatatgtatatatatgcacttatgattagttgatttcactttttttggggaaatacatacacagactacttcaaaatgtaaaaaaatttaaattccaaatctttggaaagaaagctaggaaaaaaaaatctttcgttgatgtatgatagttggcatagtacatttggtgttgctaaaaagaaatacctgaagctgggtgatttataaatttaaaagtttctttggctcacaattctgatgtctccaaaagttaaaaattgggcccctatttctgttgagggcctcattttccttccactcatggtggaaggtgaaagggagccagcctgtgcagaggtcacttggtgagagaggaagcaagagagaaatggatgaatttccaggctgtttttaacagtcagctatcactggaattaattgggtgagaactcactcagttccaaggaaggacatgagttatcctcccccaggacccaaacatctcccataagattccacctccaacattgggatcaaatttcaacctgaggtttagcaggacaaacattcaaaccatagcaataaccaaaaattcaaaatatttctgggagtgaaatttttaaccctcacctctaccacattaggcaaattgtcttaatttagtaagtgatgccaaacaaaagctcattactgctcagacatagagttctaaatagattacttaattgtatatgcatacacatatggctggcatttatttctgcacatggtaggaaagaattttcctcaaaattcagtacataagtatgaccaacattattatagcactaagtcaaaccttggctatctaaaatttaacattcaaggtttaactatttgtgtgagactacaaggctcaaggcttgttattacttgtaattgtcctgagattcacctttcaatctagtgtgctgtgagagcatcagacacaaaggcgtttacctcaagaatgaggactgacagctgcacaagcacatgcatccctatgagtctttgttattttctgtttatccttaggtgtgagatatcctcttgtaaagtactaaaatctcttctgtgtgttaaaaaaaaatgttctgaaaagattttagggccaattgttatttggaaatggtaagataaaggagaatattcctatgtaaataacaacattggtcaatctgggaatgtgtggaaatttggggacattatccttctggaacatgaatgacttcagttttgatgagatcataacagtatgtgataatctatgggggaattctgaccctacatcttactagctgtgagtcactacgggcaaatcacttaaactttccttaactcattttttgtactttataatagtaaaaataataccttagccaatttaataagtgtcctgtaacactccattatttataatattttgttttctaatttcttttcaaaggatcttaaagtttttatacctaacaaaattttaaaacactactagaatacgctaaagagcattctccaacacttcaaaataaatccccccttcacaagtgtatctaatcacaataaaatgttgatatatgattctgccatctgtaatcatacgctaatgttatattccaaatagagataaaaaatggccacattctattctgtaatatgaattatttgttaggtaattaatactcaccaatcaatggcttcacttttacaaaggaaaaaggagactccagtcatatttatgtgacaatagaaccttgtccttttcactattagttttatttaagttaacatttttatttataagtatgcatgggtatctcctctgtaaggttcatccatctagtcagctgataaggtttatctttgattccatatacatttcagtttattcctcttcacatatataccataacccaacactgaatgctaagtggcctgggtatcactagcaggcctgtgattggatttaatcagcagatagcaaaacacaattgctctctgtattataaactttcttggaaacgttcccaacttctgtcatagccactttgtgctcctgttctcctaattcagttcagcattaaatgaggttgaagaagagtcagctatgaataggttaaccagccgcatcaaatgtgaaggagctagaatggcaggtcccaacaaggcatgatgtagtggctcacatggagaattatggatagaaagtggttagatgttagaacagattcaaataatatcactttcaagtaattcagtaggtaagatttcaactacttgatttgttaacaaaataaatttgtattattaataatataattgtaatattttgttaactgtctttaataagatcaaaatacaatattattcttacaggatctctgcatatggggtggtgatattagtagatgaacatttataagaggtagcttataaatatattataggctgcaagagattttgacttgtccttcaggtgagattttagcactggcagtctaacaaaaaacagacgataatttataccactgcctataaacaaaaatctgccactagaaccaagtaactttttcagttggtcgtctttagattttgactccttaagaaccatcatatgtgtatttggtattcagtgtaaacatattttcattgctccatcattgaaataaatttaccaaccaatctttggaacttgaaataaattcttatgaggctggaatggtatcatttggctccttgaaatattgaccaaggaaaatataacaccatgtcttttcatacctaaataatagagtgattctgtcctttctactgcctactattcctgggtttggaaaaaaacagcatgatgggggttattaatccattttcacactgctaataaagatataccaggccaggcgcggtggctcatgcctgtaatcccagcactttgggaggccacggcgggtggatcacaaggtcaggagatcgagaccatcctggttaacacagtgaaaccccgtctctactaaaaatacaaaaattagccgggcgtggtagcgggcgcctgtggtcccagctactcaggaggctgaggcaggagaatggcgtgaacccgggaggcggagctcgcagtgagccgagattgcgccgctgcactccaggctgggagacagagcgagagtctgtctcaaaaaataaaaataaaaataaagatataccagagactgagtaatttataaagaaaaagaggtttaagccacagttctacgtggctggggacgcctcaaatcatgtcagaaggtgaaaggaacttcctacatgtccgtggcaagagagaatgagagccaagcgaaagggtttctccttataaaaccatcagatctcgtatcaggaaccatatcaagaaccgtatggaggaaaccacccccgtgattaaattgtctccaccaggtccctcccacaacatgtgggaattatgagagctacaactcaggatgagatttgggtggggacacagccaaaccatatcaatgggtaaaatgagtatttaagaagttgaacagtagatctcccaggtatagatataactctctaaatacttaattcacttctgcagtaaatggggctttataaatgtacattgttgctgtttggggcatttgtctcatgtatttcaacaaatatatatggtttgcctaatatgtgccaagcaccaaattgtaatggtgctagactgcagaagtaatgattgcatcttagtgaaatcaaggaaaaggacttggtgaaaattataccgggtggagaagagtaatgagggtgtgttcttgaatcagtgttcagtcctagtatttaaaaaatgttgttatgaatgtttacccatccataatgtctattagtgtgatgatatacaattgctaatcaaaaagaaacatagaaaagcaactggaagatactgtgttgtcaaaaatgataatatttgtatttggaataatacaggttgtgactaactgtattgtttagaaaatgattcctttttgttttctttgagacggagtcttgctctgtcgcccaggctggagtgcagtggtgcgatctcgactcactgcaagctccgcctcccgggttcacatcattctcctgcctcagcctccagagtagctgggactacaggcgcctgccaccacgcctggttaattttttgtgtttttagtagagacggggtttcaccgtgttagccaggagccgatctcctgacctcgtgatctgcctgcctcggcctcccaaagtgctgggattacaggtgtgagcctgcacgcctggccaaaaaatgatttctaaaacacgattttattttttctttcaaagaataatttaattttatttgagagtcctctaatataaaaagctttctcagtaaaatatgcccatcagaagggaccttgccagttctttcaatggccactttgagaagaatgaggcctgtgcaaaaagaggtagttgtctatattctcaataatgctccctacagcagctcaggatcagattctgagctactgcttccagaagttttgtccagtgctgcctgcatgtgataaatgcattggcatatttgatgtaccaaagtttctctatcattctttgaaattcttgatatgcaaaagtcccttctgttttctgtgctgcatgtcaaagttgaagaatgtctcacttgcattttgtgataagagagtatcatattgagaacatatttttccttaatcatttgagtgtatttatcttttcttatttgaatatatttattatagctgctttaaagactttataaactaaatctaatattttgacccacttggaatcaccttctattgagcatactagcatggattttactttcttatttctttgcatgtctactaatttttggttgaaaactgggaattatagatgatacaatttggagattttctgcctaaacactcatctacagcaccttttactggcaaggatgtagagttttgttctggtatttcctgcagctatagaagaagttgtagaagttggtcaaaaagccacactcaagattagaatttcctttggattctctctacattgggttttttacagtacctttaaatagttgacctattttataattttttcactttagaattgttatttgtggaaggtacagccacctcagttctctgtcattacaagaaatgtggtcctactcattgcttttttttttttttttttttgagacagagtctcgctctttcgcccaggctggagtgcagtggcgcgatctctgctcactgcaagctccgcctccggggttcacgccattctcctgcctcagcctcccaggtagctgggattacaggtgcccgccaccacgcccggctaattttttgtattttcagtagagacggggtttcactgtgttagccaggatggtctcgatctcctgacctcgtgatccgcctgcctcggcctcccaaagtgctgggattacaggcgtgagccaccgcgcccggcctgcttttattcataggttttttcttcctttcataggatttggacatcaatacattaatggggatgggagtaaggggttaactattattagtaacattgctgttttcaggattatctctccattctgaaagatatctgtatattgaaccaagctggtttctgacaatttttaggatgaattatttcccagaagttaccatttttctgcaataaactcctgacaggtggattggctcctccagtccataagacatgacaaatattagagggaaacaaacaaagaattaaattctgtttgccctacttctagataaagtaaacattttagatttaattgctagcgccgtgtgtgtgtatatatatgtatatttcattatgtaatatatacttcatttttcagaaagagaactgaaattcctagtttgttttacttttgtctgatactcaaagaaaaagtaaatttaaacttatgtagttagtcattgaattagtgagtgacagatctattttcttttaataaatacttttttggctaaaaactttatattggaaaatgaaagattaaaacattttctttcttttttaaatatgggaagatacactgctgctttggtattttcagagaaagagaagcacaaaagatgctgttcttgtgaattttctgttagatctctatagagattttaaaaggcaaatgttaggaataagagcccatgccgaggcaaggtttcacaaaggacatggctgattccaggcaaacagcagctgtgaaaacatcattgtgctgcagataatagtgtagatcattacacagacattttaagcagcactacctattataatgaacatgggatttttaaatcaaattagtaatagcagatcttttacatctcatgatctatataaacttcatgacttagtaaatatctcaatgtggatgaaataattgaataaaattataatgttaaactagattttattacattattatgtaagatgtttgatttattgtgacaactacaatgcaattttcatatattttgtaataatattttagaaaatgccatcacctgcaaaagcaaatatgtttccaaacttcaagatgttctacacagtcttaaaatatagcttcaaggaaaaacacgtgaattgcctcctttcacttcctaccctcacttccaaggataatggtcactgaggtacaatgagctctgtccatacagttcagattgaaactcaagttgcaatgcactgcaggctcctcacagggctgtagctctttgcacattttggtctcttctatcacacagtatgaactcttacagctatatagggagaaggtgaatttgggctttatcttctatcacacagtatcaactcttacagctatattgggagaaggtgaatttggcctttatcttctatcacacagtatcaactcttacagctatattgggagaaggtgaatttgggctttatctagcttcctgggaaacaaaatggatagcctcagaggctttggaagtatgctaagaataagtattaaacagaaaacttcataaatcatcctattttaaaactccgtacatccacttctaataagatattccatatatgtatgcataatactttcctaaaaattacagttcagaaaagagtattccatttcctaatagataaatagataatggaattctctttcctgaagaggactgtggatctcctgtactttgtaatacatatatgggtttttatatgctgaatccaagtatctttgagtcctcaagaagaataagtgaaagggaatgtgcactttaccatttcattctgttcctttgtttttaacctactgataatttatttagacgtgcacgcatgagcccaaaaatctccagcaccagctttaatcttgtattgccatgagtgctcaaaaataggtgagaattagctccactattactagagaagactctctacaagattatttcttaattctctctgaaatacacatcaggctccatactactccataagcttctgttagccttagatttgttatgaaaaaaaaaaaaggtctacttttataagtctaagcacctgtaaactcaagtagataaattctgtattttaggtttataggaatgttgattttgaatgcttaataacaattctgaaagtgaatactttgttttaaccatcaattccataaatagttcaaatgttttaaaggaaagttggtagaataatagtcttacagaatttgcacatgctatagggtatggagaatagctgattattgtatacctacaagatataaaagaaattagcattaatgatggaaataaaactaccaaaatatttcagaagctcttattgcatgggcaaaacatctgatatagtggaaaaacttgatgccttatcatctttattttatttcagttaaatatattagtatcctgactttcttgaaaatgtgttattattatccacttccaagtgctagggaagaagaacaattttgtttactcccaggtggttcaaatttgatttgaactcacagcagagtttatgctgatgaatagcttttcattgaacatgaataaattgagaaattcacattagtcagccactttttcttcataatttaaattccagagaagaagcatttagcaaaaatagaacacaaagggttgtgcggttgatgaattgcacctgatgactagctgaattaataaaactattaatgaactagacagacaccaaagcttctttttgaatatctatgaaaatgatgttttaagtaaacaaacaaaaaaaaatcagcattggcatcagaaaaaagcaagtgctttgttcagttaatatgcctgctgataggatgttagacagatgcaggctttcaaacaatttttttttctcacagtgtgagtgttttgttttttttttttttcaatttttcagtccctttattactaggtatctctaacaatcaaaattaaaaatttaaacagtatcttctctattagagatgtatattatggatacgtattttaaaacataggtttatgtatgtatatatgtacatatattttaatacacaggtttatgtatttatatattatgcattatttaaatatgcatacatgtatatataatgcataatatatatgatatgtattatatataaatacttttgtattttaatatatagctttatatgtttacataatacataggttatgtttacataaaacatagattatgtctgcatagatctatatattgacatgtgtatttatatatttaaatgttctttaattttacagaactcatgcctttaaaattttcagatttctacaaatacataaacatgatattatattcagatgggtgtaattatttacagtatggttttttttaagagaaaatacttcgataaatgttttaaatatttcagaaatgtttggctctgtaataaacatttaaatttgtcctccattattttaattcattcatcaactattctaggtcttattattgcaatgctcattttggccatgatttattcttaatttgaaagcattgagtcttttaaaacattaatattttactatttggcaactaaacaaaacattttactagccgtattgtcatatataagaatgccattgttatacaaagaagctatttattttctacacagagctaaatattttttctacgtttgacactattaaattttttcagcatgttattctaccttttattgcatatatttcattctgttttaacttagaaatcctgcaagttaacaagttttggtgattcttagctgtggcttcatgtttattaaaattcatgacttcagactctcaccaaggacaaaatatgagtcacatgctttgaaaattactcttggcaaataaaaatcaaatgttagatgtaaaaagattaacttgatgttacttccaagcaaatataagacataatagcctgttacagggtggtaatcttttgagctgtataaataaagcctataggttaggactgtgagctattccatcgagattgctgaactgtgcttttgtttctgtagggcaccaggccctgagaatttctttagttctgaggtatttcctacatcttctaattaaacatgtgattcaggccatcaaagatgaggcaattttcttccccttttcttatccttaatgacttttggatagttcaggttaaagtgtaggtctagtgctctaagttcagatgaatcagatgtatgctattgtctttttttttttttcttgttcaaattacttccatgtccccttccaagctcagcatatctcattagattttctgtcatcctttatatttctaaaacctttaaaccttcaggaataatctagagtcagcttcattagttgttaactcatcaaacctggatgtatgtgtgtatatatatttgaataaaatatactcttttgtgtacttctatttgaataccaactttcaaataaatctttgatattttacttatgaactgcccacttaacaattaattctagatttataaggacgatgcaaatcacatataattttcttttgtattttagtcacaccatatgaacatcctcaaaactgtaatatgaagttagtgtcctagagcacactcaattagatcttccatactgccccttgtaaaaggagattttttttttcaggtaacatcaaacaaactcaatggaaagacattggctgtaatgcatcgatggcaaacttagtataatgggagaaaaaacagtgaatctggaaaactcatgactagaaacagttcaattcagttactgaaataataaatagctaattaattgattcaataaattgttgtcatttgtattttgaaagtgtgtaatcttatggccctctagaagccatttaacttgagtgctaaaatagatttgtaggttttgtggaaatgaaaacctgaagatattattatatgtgttctctgttctgtattttataatccctcaaggttattaaatattagtgcaggtatttttatgcactgatatccagatatcagttgaacattggtttttaaattgcatttcccacttgaaagaatagtgatgatattcttctatcctgtgcttcaggccaagtgatctttttgaattctgggtctaggtgtgtgtgttaaaaatagttcattgccatatagactacaatacacatttactttatgttaatattgtgaaaataaatggcaaaatatgaaataaaaaggactattcaagttatgaaaatggtaatactctaaatgacccttcaaaaagaatgttaatagatttttgtcttattgttgaacatatgacttggatatttggcattaacctgcatgaaaatagcaatatccaggtacacttgattttcaatatatttttgaagaggattactaagaagaatattctttgagaatatattgtgctttgagctgttgaccttggtcagctcaagtaaaaattgttgttctaacttgcctaccatttaaaatatactgagttggttttcaatcttgtctttgatctatatatagaaaataaactgatagcatgaatttggaaatgaattatgagattaaaatatgttttagtatgtaaaaataacagcaactttaatggaattgtggttgattgagtcatatttattctagtcagcttagaaattcactctcactttataaaagtgagtatagtcacataagaataagttctaatgcaaatattttaaaatgttataacagttaaaggatggtttttgtttacatttatttcaaatgatggcaaaagtatttctaagttatatgtggtacattttcaaagacagtaattaaaatcaagttgaaatgaagggtggatttagggtccaggaaaaagatagcaaaaagtaaaaactggcctccatgagaaatttatatatttgatcaattagagaatataattcaaaatcattttttaattaggataatcaaaatttaaaaacaatgacactcagtagaataagggttatttaaaaaataaaaaataatcacatttaaagtttatttcatgattccttttcttatttctttccccctctttgtgtgtttttctctttctctctatatagagagatagacatttagataggtagtagatagatacagatatagatttccattatatattccttttggagccaatctagttgttgacattaagtaatacatcttgcttacattttttccctgaagtactggctaaagaagaaaagaataataatatgcatgtgacaaaatcaaaaaccaaaaaatgtttgtgtgtaacatagcttaataaagtaaagctatacaatattgaggggtgatcaaggcccccagctccatatatatttatatatatgtatatgtatatatatatgtacatgtatatgtatatatatacgtgtatatgtatatatatacacatatatacatgtatatacatatacatgtatatatgtgtatatatatgtttatatacatgtatatatgtgtatatacgtacgtataaaactgttagttcgtacccattcatcaaactttcttcaaccccttctactctctaccctttctggcctttggaaaacaccaatttactgtctgtcttcataagatctccttttttagctcccacataggagtgagaatatgtgatatatgtcttgctctgcttggcttatctcacttaatataatgatatacagtttcattaatattgctgcaaatgacagaattttgttctttttatggctgaatattatttcattgtgtatatatatcacatttcctttatccattcatacattgacaggcaattaggttgattcaatttttattttttttgtaaagggtgctacagtaaatgaggaatgtacatatttctttgatttactcattattttttctcttggctttatacccagcagtggaattgctggatcctaaggtagttgtgattttttcatttattgaggaaccttcatacagttatccacagtggctatactaatttgtacctgcaccaatagtgtgcaagggttcccctttctccacatcctcactagcatcaatattctttatttttttataaataccattttaactagggtaaaacatttcattgtagttttgatttgcatttttctgatgattagtgatgttaagcatttttttaaaaaatatacttttggtcatttgtatgttttcttttgagaaatgtcatttaggatcttttgcccattttgcaattagattattatctttttgctattgagccatttcagcttcttatatattctggttattaatcttttgtcagatggatagtttggaaacattttctcccatttaagttatgtctttattttattgactgtttccttttttgtgcaaaaggtttttagcttgatataatcccattcagctattatggcttgcaatgccttgcttttgtggtcttacacgaaaattctttgcccaaaccattgccctgaagcatatccttaaattttcttataatagtttcagggtttcaagtcttcgattaagatttgcaaatcattttgattttattgttatatatggtgagagatagggtctagtttaattcctgtacctatgtttatccagttttctcagaaccatctattgaaaagattgtcatttcccctgtaagttcttggtacctttgtgaaaaaaatgaattggtggtaaatgcctaggtttatatctgagttctctctattctgctccattgatgtatgtgtctggttttatgcaggtacaatttactatagcttcctagtatattttgaagtcaggtagtgtgatgctttgttctttttgtttaggattgctttggctattcaggatctttttgtgattccatggacagtgtagaaattttaaaatttgtgtgaataatgttattggtgttttcattgggattgcattaaatttgtaaactgctttgagtagtattgtcattttaacaatattcttcaagttcatgaacatgaaatatcttttcatttctgtgtgttctcttcaatttctttcatcagtattttgtagttttctcctacaggatttttatatctttggttaaattgatttctaggcattttatattctttgtagctactgcaaatgggattgttttattgatttctatttcatattgttaactgaagaattatataactgctactgatttttggatgttgattccgtatcttccaactgtactgaatttatcagttctaactttgttttatgttgtcttcaggtttttctaggtataagatcatgcatgtgcaaacaagactaattttagtttttcttcccaatttggatgccctttgtttctttctcttgactaatttctgtggctagggcttccagtactgtgttaaataaaagtggtgaaaatgagtatccttgttttgttctagacataaaagaggatttcattattttcctatttagtataatggttagctgtgggcttggcttacatagcctttattttcatgaggtatgttttttctatatccagtttttgaggatttttaccataaaggaatattatattgtattgaatgcttttttggtatctattaaaataaccatatggtttttgttcttggttctgctatgatctttgagaagaattggtattcattcttcttgaaaggttgggtaaaattcagcagtgaagccaacagattctgggcttttcttttatgaaacctttttgttatgacttcaatctcattacttgttattggtttgttgaggttctcaatatcctcatgcttcaaacttgtcagattatatgtgcccaggaatgtattcaataagttttccaatttattggtgtatacctgtttgtaatagtctattttattctgatataagtagagctgctcctcctctttttttggtttccagttgtatggaatatcattctctacccattcattttcagtctacatgtgcctttattggtgaagtgggtttctttttggcattaaatatttagatcttgtttctttatccattcagccactctatgactttcaatggaagaattgagtcctttctgtacccagatatttgtcattttgccaagttttagaatgttttgtattattgtttttgtgaatgaagggaagtttccttctcctcattcttgctcaaatcccttttgaacaccaataattctcggattctgcctgttgaggttattttctatatctggtagcttactttccttaattttcaatcttttttttccctctagctgtgtattttcaaatagccattcttcgagctcagtaattatttcctctgcttgatccattctgttactaagagcctctaataatttttttttgctcagcaaatatatttctcacttccaagatttctgtttgattttaaaaattatttttttcttataatttatctgataaatttctgaattatttttctatgttatctgggagatcactgagtttccttaaaattgatattttaaattatttatcaaggagttcatatattactgtcttgtgaaggtcagtcacaggtttattgctttgtctgtggaggtcgtggttttctatttgctgttattttttgtgcatgcacatctattaaagtgcttccaagattagttgtttattccagacttctctgcctggctttttttttcctgactatatttgcttagatatatttgcaatattttttcctgactatatttgcttagatatatttgcaatattttcctgactatatttgcttagatatatttgcttagaaaattagactatatttgcttagattctttttaacttacctgttgattttctttctttctttctttgtattttcattcatttattatttctttttttcctttttctccccacatttttgccttttttgagagtagatggtaccttaagcccatatttacctgagttctagtaaataattagaatacagtctgtctggaatgggggatattccaaagacaatttccaattagtgtgagaaggcttcctaggtgttcatgcccagggggaccagtggaacaaacctcctacaacatggtgctgctgaacagccactctgacttggggtctcctttgaaagagttatagagcagagtttccaagactgaggatggcagttccacctccccatattgtctctggatatccttagggatattttgccctttaggcactcctgatgcttcttgtggattgaggaaaatacaaatatcctgccagtggacctgaggtactgaggaggctggttgcccatctcaatctcatttttaacggtgtagagacaataagtcagggggaaattttccatgcagttggtggcaggcaaatttggaggaggcatcgtggatatgaatatttggttcttttaccatatgctcagaatgcttctatttatctgcagcccagggaactgtttcctccctggttttaaatcctgagatgttgatggtaataaccacagcattatgtatttgtttctggtttcctatgagtggcagtgaagctagcttgcttctaggctgctattttggtactagaacagaaattcctaacagaattttagcaaaccaaatccaacagtgtattaacagagcaattcattattacaaaatgggggttatcactaaaatgcatggctgattaaatgtttaaaaattaaacatggtaaaactatacaagagctgacagataaaatacccagtatagaaaagaacataaatggctgggtgcagtggctcacgcctgtaaccccaacaacttcagggggccgaagtgggcagatcatgaggtcaggagttcgagaacagcctggccaacatggtgaaaccccatctctactaaaaacacaaaaaattagttgggtgtggtgggggcacctgtaatcccagttaagcgggggtctgagacagaagaattgtttgaactcaggaggaggaggttgtagtgagctgttatcgcgccattgcactccagcctgggcaacagggtgagactctgtcaaaaacaaacaaacaaacaaacaaaaaaccataaacaacttgatagggttgaaaaacatactacaataatttcacaatgcaatcaccggtattagtagcacaatagaacaagccaaaggaagaatctcagagcttgaagactggctttctaaaatagatagtcaaagaagaatagagaaaaaagaataaaaaataataaataaaactaatgaaaagcatgaggttatgtatggaggtcaaatctatgattcatttttgtccctgaaagagatgaggataatggaatggaaccaacttgaaaacatattttcggatatcatccatgagaatttccccaacctaactagaaaggccaacatttacatttaaaaatgtcgagaaacccagtaagatacttcacaagaagatcatttccaagtcacataattatcagattccccaagggcaaaatgaaaggaaaaaaaatgttaaaggcagtaagagagaaaggtccagttacctacaaagggaagcccgtgagactaacaccagacctctcagcagagacactactatccagaagagactgaaggccaatattcaacattcttaaggaaaagaaattcaaatccagaacttcatgtcttgccaaactcagctttataagcaaaggagaaataagatcccttttagacaagcaaatgaagaaggaatttgtaaaaaccagaccagccttacaagagctcctgaaggaagcgctaaatatggaaaggaaagacctttatcaattgtcacaaaaacacactgaagtacacaaaccactgactataaaaagcaacccccaaaaaatgtctgcataacagccagctgatgtcatgatgacagaatcaaatccacatgtatcaatactaaacttgaatgtagatgggctaaatgcccccaatcaaaaggcacagagtgacaaactgggtatagaaccaagatgcaatggtattctttcttcaagagacccttctcaaagccagtgacactcatagtctcaaaataaaaggatagagaaaaatctgccaggcaaatggaaaacagaaaaaagcagaagttgcaatcctagtttcagacaaaacagactttaagccaacaaagaaaaaagacaaagaagggtgttaggtaatggtagaaggttcaattcaagagaagacctaactatcctaaatatatatgcactcaacatacgagcactcagattcataaagcaagttcttaaaaactttccaagagacttagactcccatgcaacaatagggggagatttcacaacaccactgacagtattagacagaacactgaggcagaaaattaacaaagatattgaggacctgaactcagcactgaaacaaatggatctgatagacatctacacaactctctaccccaaaacaagaatacacactgttctcattgccacagggcatatactctaaaatagaccaaacaatcatatataaaacaatcatcagcaaatgcgaaataaatgaacccataacaactctcttggaccacagcacacacaataaaattagaaatcaagactaaagaaatcactgaaaacctcatagttacatagaaattaaatgacttttcctgaatgacttttgagtaaataataaaattaagggagaaatcaagaagttctttgaaactcatgagagaaaagatacaacacaccagaatctctggcacatagctagggcagtgttaagaaggaaatttagagcactaaatcctcacattaaaaagttagaacaatctcaaattaacaacctaacatcacaactaaaagagctagagaaccaagagtaaaccaatgccaaagctggcagaagacaagaaataaccaaaattagagctgaaccaaaggagacaggcacacacacacacacacacacacacacacacacacacacacacacaaacattcaaaagagcaaaaaatccatgagttgttttttggaaaaacataatagaagagtttcctactgaaactattccaaaaaaaattgaggagaaatgactcttccctaactcattctatgaagccagcatcatcctgatatccaaacatgccagagacacaacacaaaaagacaacttaaggccaccatccttgatgaacattgatacaaaaatcctcaaggatatacttgcaaactaagtccagcagcacattaaaaaagcttatccaccacaaccaagtaggctttatctctgggatgcaagattggttcaatataggcaaatcaatgaatgtgatttatcaaataaacataactaaagacaaaaccacatacttatctcaatagatggagaggaagcttttgataaaattcaacaccacttcatgttaaaaactctcaaacatgtagtattgaagaaacatacctcaaaataataagtcgtttatgacaaacacacagccaacgttgtacttaatgggcaaaagcttaaagcattccccttgaaaactgtcacaagacaaggagtccctctctcatctcttctattcaacatgttattggaagtcctggcgagaacaaacaggcaagagaaagaaataaagcacatctaaataggaagagaggaagtcaaactatcctgttggcagacaacatgactccatatctaggaagccctatagtcttgttccaaaagctccttcagctggtaaacaacttcagcaaagtctcatgatataaaaccaacataaaaaaaaatcaccagcattccaatatgccaataaccgtcaaactgagaaccaaatcaggaatgctatctcattcaaaattgccacaaaaagagtaaaatacctaggattacagctaaccatgtaggtgaaagagctctagaatgagaacaataaaacactgctcaaagaaatcagggatgacagaaacaaatggagaaacattctatgctcatggataggaaaaatcaatattgttaaaatggccatacttcccaaaacaattcaaagattcaatactattattatgaaactaccaattatgtacttcacagacctagaaaaacaaaaagtaaattcatatgggaccaaaaaagaggctgaataaccaagacaatcctaagcaaaaagaacaaagctagaggcagcatgctacctgacttcaaattatgttacagggctacagtaaacaaaacagcatggtactggtacaaaaacaggcatatagaccaatgaaacagtatagagatcctagaaataggccaccctgctacagccatctgatcttcaataaagctgataaaagcaatggggaaagggatccctattcaataaatggtactgggatagctagctagctatatgcagaagactgaaactggaccccatatagaaaagtcaattcaagatggattaaaaatttaaatgtaaaacccaaaattataaaaactctggaagacaacctaggcaataacattctgggtttaggaatgggtacagatttcatgaagtaagcatcaaaagcaactgcaaccaatgcaaaaattgacaaatgagagctaattaaactaaataacttctgcacaacaaaagaaactattcataaacagataacctacagaatggcagaatttttgttcaaattgtacatttgacaaaggtctaatatacagcatttataaagaacttaaacaaatttacaagtagaaaacaaccccattaaaaagtgggcaaagaacataacaggcatttttcaaaagaagacatacatgcagccaacaaccatataaaaaaagctcagcatcactgattattagtgaaatgcaaattaaaaccacaatgagataccatctcacaccagtcagaatggctatagttaaaaagtcaaaaaattacagatgctagtgaagttgcagtaaaaaagtgcttatacactgttgtagggagtgtaaattaattcaaccattgtagaaagcagtgtggtaatttctcaaaacagaactaccattccacccagcaactcctttactgggtataccctcaacattataaatcattctatcataaaaatacatgcatgtgtctgttcattgcaacactattcacaatatcaaagacatagaatcaacttacatgcccatcaatggtagactggctaaaaaaaatgtggtacaatatataccatggaattctacgcagccactaaaaagaacaagatcatgtcatttgcaggaacagaaaaccaaataccacatgttctaatttataagtgggagctaaatgatgagaacacataaaggagaacaaaagacactgttacctcccagagggtgaagggtgggagagaaagaattaggaaaaataactaatgaatactaggcttaatagttgagtgacaaaataatctgtacaagaaacctcagtgacagtagttcacctatataacaaacctgcacatgtatcctgaacttaaagtttaaaaaattgtgattcatcatattagcaacatatatatatataatatataaaaattgtataaatatagattatagacctaaaagtaaatgcccaaagtgtaaatgtctggaaagataaaatcatttaatctttgggttaagcaaataatttttagaaacaatatgaaaagcaagacccacaaaatcataaatttttctttatcaaaataaaaatttctgctatttaaaatacatttttaaaaatatttaatttatttttaatgacaaaaattgtatatatttatggggtacaatgtgatattgtgatgtatgtacacattacagtataattaaatcaaattaacatatctatcacctcacatgcttattatcatttttggagatgagattatttaaaatctactctcaacaactttcatacatacaatgtattattattaactatagtttccatgatgtaaaatagatgtccagaacttatttcttctgtctaatggaaacttttactctttgaccaacgtctccccattcctcacccatcagcccctgataactgcaattctattctctacttcaattagttcaatgttttatattccacagatatgtgagctcatgtagtatttgtctttctctgactggcatatatcacttagtaaataaaatgttctccagcttcatccatgctgtcacaaatgtcagaatttccttctttttgggggagggtagggggggagttcactcttgttgcccaggctggagtgcaatggtgcgatcttggctcaccacaacctccgccttccaggttcaagctattctcctgcctcagcctcttgagtagctgggattacaggcgtgtgccaccacgcccagctaattttgtatttttagtagaggtgaggtttctccatgttggtcaggctggtctcaaactcctgacctcaggtgatccgcccacctcggcctcccaaagtgctgggattacaagcgtgagccaccacacctggcctgatttccttcttctttaaggctcaataatattccactatgtatacatgcaaaatttttcaaagacgttttaagagaatatgacgataaaactaagagaaaatatttgtgaatcacatatctgatgaatgatttgtaatcaaaatatatgaagaactctcaaaacaataataaaaacaaatcatccactaaaaatgagcaaaatattttgtatagaaactaaaaacatacagataatatataaccacataaaaaagatattcaaaattatttttcactaggcaaatacagattgaaaccatgagagagctacacatagttactagaacgactaaaacttttaaaacacttatgctaaatgatgccaacagtaagtctcatactttgcttgtgggaatgcaaaaaatagtatagtccctttggaaacagtttagcagtttattgcacagttgaacagaatcttactacaatatccagtaatcccaaccctaggtatttatgaatgtaaaatacaaacatattccctaaaacctatacgtaggtgtttatagcagcttcaatcatacttgccccaaattgaaaacagcctaaatatccttcagttcatgactgaataaactgtggtatatccatagcataggatagtacaaattattgatacacacaacatagatttcaaatgcattatgctaaatgaaagaagcctagctattgtaggattctggaagaagtaaaaccacagcgacagaaaacagatcagtggtttcctgggcttagaggtgaagaaaggtcttaacaacaaatagctgcagagacaattttgtgggttgagggtttgggacaatttaatatcttgattgtggtggtggtcgttcagctacatgcatttaccaaaactcacagtattttatgctaaaaatagtaaactttctgtatgtaagttaaactttaatttttaaaaaagatttaaaagttagcaaaaaagattgggcacggtggctcactcctgtaatcccagcactttgggaggccgaggtgggtggatcaccaggtcaggagttcgagatcagcctggtcaacatggtaaaacccagtctctactaaaaatacaaaaattagcagggcgtggtggcatgtgcctgtaatcccagctactcgggaggctgaggaaggagaatcgcttgaactcgagaggcaaaggttgcagtgagccgagatcgcaccactgtactctagcctggtaacagagcaagactcttgtctcaaaaaaaaaaaaaaaaaaaaaaaagttaacaaaaaagtctagaaatacaaaaattagcagggcatggtggcatgtgcctgtaatcccagctactcgggaggctgagaaaggagaatcgcttgaactccagaggcaaatgttacagtgagccgagatcgcaccactgtactccagcctggtaacagagcaagactcttgtctcaaaaaaaaaaaaaaaaaaagttaacaaaaaagtctagaaagtatacactcatacacccaaatattatacttattttatatccacaactcacctcatacaatgcagtattgatggctgagtgacaaggctaagcttttaaagtaatcatttcctgtgttcaaaagcaaatttgaaatttttaagagaatttggggatactataaaatttttattgaactccaaatttgtggactgactgttcttttaaacaagttatcttactacccacagtaaatgttctgagggaaactacatcatgttttctaattaaaaccttgtactccatgccactgatgtatcaggatttatttcaccatttctttttttttgtttctttttttttaaagattattatttttttcatttttaagttttttttttattttactttaagttctagggtacatgtgcacaacttacaggtttgttacatatgtatacatgtgctgtgctggtgtgctgcacattaactggtcagttacattaggtatatctcctaatgctatccctcccccctcctcctgccccacgaaaggccccggtatgtgatgttccccaccccgtgtccatgtgttctcgttgttcaattcccacctatgagtgagaacattcagtgtttgattttctgtttctgcaatggtttgctcagaatgatggtttccagcttcatccatgtccctacaaaggacatgaactcatccttttttatggctgcatagtattccgtggtgtgtatgtgccacactttcttaatccagtctatcattgatggacatttgggttggttccaagtctttgccattgtatttcaccatttcttattggtaaacctttatattattttttgttcctcactattacaaataattctttgaaaatatctttaaacataaatattcggaatttctgaaattatttctagtgtctagatttctaaaatttagtgtgcaggtttaaaacatataggtagcttttttcctgacaatttttaattataaaaataatggatagggccagacgccatggctcatgcctgtaatcccagcactttgggaggccgaggcaggtggatcatgatgtcaagagttcaagaccagcctggccaacatggtgaaaccccatctctactaaaaatacaaaaattagctgggtgttgtggcaggtgcctgtaatcccagctactggggaggctgaggcagaagaattgcttgaacccgggaggcaaaggttgcaaggagccaagattgcaccaccgcactccagcctggacgacagagcaagactccatctcagaaaaaaaaaaaaagaaaaaaaaagacaaggtattgtgccagaccattcatttgaattgtccacagttttatagataatcaataatgagctggaattataatctattcattctggctgcatggcctgggtctataatgaatataccaaaggtctagaattccaacagtcatggggactaggcaggagtacgagtaagtggtgtacaccaggtagaggacggaggcacgctggagggcagtgccttgcctaaatgtaccatctgctattcatttaaagccaactcttgtcatgtaaggacacagactagtctaaaaaaaggtggaaactaggatttgttcatgttgttcatgcataaaatcatcaagttttaaaaactttttgtacacacaaaacaagaaacacctcttgggaagatctggcccagattctcccagtttatgcccctagtagcaaactttgctatcttgagttgttgatgttatgttttagtaaaaatattggatgaaaaagtgacaaaacttgtgttgcaacatgactgccatgggatatataacttaatgggaataaattaatatctacattcatgttggtgtttgagtaatatgaatactgctccttacttgcagtttctacatggtcataatatggagagagctctgcttcatttgaatgtgaatcatatattctcatgtccttctattatgaatgaactgcttttctgagccagctgcaggaagcacactgaaatgccattaatttattctgaaaccacatttctgttctcacatatcacactctctgctactattcagctctagcagtatatagaaaagctaaatatagacccaattttcaaatgtctatatccaataaaaaatgcttatttaaaatgtgtctgagatagtagggctcaaacttggctgcacactagaagtacttggggagctttaaagtatacatagacatggttcttacccccagagatggtagtttaattggcctaggtgaacctgggcattacagttggtaaaaggccctaggtgattctactatcagccaaaattgagattgacttgtccaatgtatgttttgcaacataatatttgatgtgtaataacagttcagttaatagcacctatttatataattgataattattaacagtattttgacctcttccttgaatcagtattccatagtatttgctttccttgtatcttcttgagaaatgatacatagcatactgtgatgccattattttttaaaatcagagagctgcctaatcatattgaagagatgaagttctatttctttcattgtactcattttctagactgtaatctttttgaagaaaggaactgtgtctttgttccaacacttagcatcatgccagatacacttatgtactttaaaaattatcagttgaataaatgattattaataggtcaatttatttctcatagatgaaaaaagtaaaatagattaagaatagacatacacaatctgtgagtgttgccttctttcccggaaagctactaagaattagaagtacagaagcaagaacaccagcaactccaccgatttctttggcttgtttgtcacactgtatagctgtctcatagccatgtagattcccttcttcatagttgaaaatagtgaaaggtggtggtgggcatgaggtagaaaatctctggatttagaaagtcgtatttctcttgacttttggatatctccaaagaaacaaaacgtggatcaaagcccttaactatatactttcacttttctaatgggctcagaccttgctaccacaatattcacatgtgcaaaacaaatatagcttttatgtttttatgtatttatttattttgagatgaagtctccctttgttgcccaggctggagtgcagtggcgtgatcttgactcactgcaacctccgcctcccgggttcaagcaattctcttgcctgagcctcttaagtggctgggattacaggagcctgccgcaatgcctggctaatttttctatttttagtagagacggggttttaccatattggccaggctggtcttgaactcctgacctcagatgatccacacaccttggcatcctaaagtgctgggattacagacatgagccgctgtgcccagccagcaaatgtagcttttgcatctctataactcttcttccttttagacctttcttctggctgggaaaaattaaattttgactagtggagtaaaactcagtgttatttaataagcaaaggcatttttaaaacgtaactcaggcttttagaattatacgttgtttcaagtctttgctattgtgaataatgccgcaataaacatacgtgtgcatgtgtctttatagcagcatgatttatagtcatttgggtaccagcatggcacatgtatacatatgtaactaaccagcacaacgtgcacatgtaccctaaaacttaaagtataataataaaaaaaaagaactatatgttgtttttcacattttctcctcccccagtgttcctctttaaagtgccttttgagtatataggcagtccactttgcactgcacggacaacatgtcagagggatagaaaagggttcatctccatataaaatactctagatcccttatagtgtcccctgtaagtaactggtttagtttgctcctttattagcttctgtgacaatgttaatggtctcattttggcacggggtagaatattccatcggctgtgcccaggcatttattttcagacttgaagtcgccacctacatgtctggatctaagatcttggcttatcaactgtctctgtcagcagcacattcatgtccctattgagcttccccaaatatattggatatttgtaaaggcttcctgaacttctcaaggtattgctccaagatgtggatggacgactaaaacttcagcatctcaaatctccactctccccaaacctcttttttttcttctcccattccaccaaggctggaaaaaacaaaacaaacaaacaaaaaaaggagcaaagtacagtgctcggtcggcttcttgtgttgacttttctctacctagttgaatagagccaaataagtttaactctaaatagcccaagctaaagggctttagaaaaaatttccacctcagaaaattctagctttcaagactatttattttctagggacatgttaatacaacttacctatgatctttagcttcttggcacaacctgcattcttattccctgaggtcataatttcaaccgattcctggagcggccactttaagtgtaaatatcatcatctgaaattattttatatatttgtttatttattacttgtctctctccctgaaaaactgtaatttatataggacaggggttttattggtcttattaaccatgtatccttaccacttaggatagtgtttttctgcctagatagtatcactaaattgttcattgaataaatttatgtatgtatgtatatatgtatgtatgtatgcatggatggatggatggatggatagaatagtatgtatgtatatatgtgtgcatagatcactgtataggcatatacatatatatatatatatatggatgatttcacttaatttttagctttgggctgagaggaaactaagaaaataagacataaggaaaaaatgaaatgatacagttttcatagtctaaaaatattacatctgcatacttttatttccaaatatgttaaaataaatccaatagaatatttgatattgaagttttagaacatatcaatttatcttaattaactgtttataaacatgcatacatatacactatatttgtatttttatattggtttcaacaaaatataattaatttggatgagattttgaataattttcattttgccattatgtccattttccagattttctaccatcatattttatgtaaagtaaagcatatcatatcatactttgaattttttctgttatacatgtctgtgtgtgtatatatacgtgtagtatatgtgtttatacacatacacacatgctggagactcttgtacaatgcagaggttaatggtaccaatcccatgcacagtcaaaaatccatgtataagtttttactcccccaaaacttaataatgggttactattgactagaagccttactgataacataaacagttgattaactcatattttgtatgttctatatattatattctgtattcttccaataaagtaaggtagagaacagaaaatgttattaagaaaactataagtaagagaaaatacgtttacaatttattaagtggaagtggatcatcataaaagtcttctttctctttgtcttcacattgtttaggctgaggaggaggaagaagaggggaggtgggtcctggtatttcaggggtggcggaggcagaagaagatggacccattcagtttaaaactgtgttgttaaagggtcaacaatacaaacaaacacatgcaagcattcattttaatctgcctgaaattatatgtggcttcatcaagaaattgatgtggtcctaaatgaatttttatggaaacagaaatctcaatttttacaatgtctttgaatagttattaaaatgtaatctaaaccttctaatattcattgtcacagggtaactctgtagatattttcgtggggggatactgaatatatataaaaattaattttttgaaaaatcggtgtgtttattttcatattttttttcctgataaaggaggagactttatattttttcagtttttccagaggtgggccggcaagtcttacctacttttcttgttggttgagttatagtacaatgctgtagtttaatactaattttatttttaattttggctaataaaaaaaatcagtattatcccagaaatgtataaaccacatgccaaatttcattctgaaatgatttttttgttaacattataatccattagagagagagatttataatgggaatgctgacagatcgtttcagcagccatatagaggctccttagctgattcattaatatctaacgaagctagtcccatgtctttacaaatcaaattcttcctctccagtggagataggtcaaaatattgaagaaggcttgtgctctccagtagaaatgaaatagatgatgctgacatctccattgttttaatgagagtgtggcagcagagtgttgctggatagagtgctttgtcaaagtggactgaggtctatttttagacaatgtgggttgccttttatattcatcctacctaagagcagggggaatacagcaagttcctgggtactgaaatagaaaaggcaggaatgaaagcagctcaaatttgatcagctcctaagtccgcctgagtgtcaccaattcttcatcttaccttaaaaatatttatttattattttactaagtccagcctatattttatgggcagtaaatggggaacagatgttactttttggagagaagagtattaaagaattttttgaaatagtttataatgactgcactgatctaattgtgttaaacattgcaaagagtttcttaagaattgttaaaaagataatttgtgaaaatgttgacaatataatacattcatttattctctatttatttttaaaattactttatttttttctttagtaattggaaatgttaattttattaattcattttttcaactttagaatcagagtgtacaatcacaggtttattacaaagttttattaaatgatgctgaggcttggagtataaaagtatccatctcccagatagtgagcattgtacctaataggtagtttctgaatgcttgccctacttcctccctctcccctcttgcatcccccagtgtctctttccatctttactttcatgtgtactcaacgattagttcccacctacaagtgagaaaatgtggtatttggctttctgcttctgtgttagtttgcttaggataatggcctccagttgcatccatgttgctgcaaaggacataatttcatttttttatggctgcatagtgtcccatggtgtatatgtaccacattttctttatgcaacccactgttgatggacacctgagttaactccatgtctttgctattgtgaatggtgctgcaatgaacatacaagtggatatgactttttgatacaattttttttctttatgtatatacccagtaatggaattgctgggttgaatggcagttcaactcttagttctttgagaaatttccagactgctctccatggtggttgaactaagttagatccccaccaacagtgtacaagtgttccattttctccagagccttaacaacatctgttatatttctgactgtttaacaaaagccattctaactggtgtaagatgatatctcattgtggttttgatttgcatttctctgattagtgataatgagcatttatttttttattttattttattttatttattattattatactttaagttttaggatacatgtgcacaatgtgcagattagttacatatgtatacatgtgccatgccggtgcgctgcacccactaactcgtcatctagcattaggtatatctcccaatgctatccctctcccctccccccacctcacaacagtccccagagtgtgatgttccccttcctgtgtccatgttttctcattgttcaattcccacctatgagtgacaatatgcggtgtttggttttttgtccttgtgatagtttactgagaatgatgatttcaatttcatccatgtccctacaaaggacatgaactcatcattttttatggctgcatagtattccatggtgtatatgtgccacattttcttaatccagtctatcattgttggacatttgggttggttccaagtctttgctattgtgaataatgccacaataaacatacgtgtgcatgtgtctttatagcagcatgatttatagtcctttgggtatatacccagtaatgggatggctgggtcaaatggtatttctagttccagatccctgaggaatcgccacactgacttccacaatggttgaactagtttacagtcccaccaacagtgtaaaagtgttcctatttctccacatcctctccagcacctgttgtttcctgactttttaatgattgccattctaactggtgtgaaatggtatctcattgtggttttgatttgcatttctctgatggctagtgatggtgagcattttttcatgtgttttttggatgcataaatgtcttcttttgagaagtgtctgttcatgtcctttgcccactttttgatggagttgtttgtttttttctcgtaaatttgtttgagttcattgtagattctggatattagccctttgtcagatgagtaggttgcgaaaattttctcccattttgtgggttgcctgttcactctgatggtagtttcttttgctgtgcagaagctctttagtttaattagatcccatttgtcaattttggcttttgttgccattgcttttggtgttttagacatgaagtccttgcccatgcctatgtcctgaatggtaatgcctaggttttcttctagggtttttatggttttaggtctaacattcaagtctttaatccatcttgaattgatttttgtataaggtgtaaggaagggatccagtttcagctttctacatatggctagccagttttcccagcaccatttattaaatagggaatcctttccccattgcttgttttggtcaggtttgtcaaagatcagatagttgtagatatgcggccttatttctgagggctctgttctgttccattgatctatatctctgttttggtaccagtaccatgctgttttggtaccagtaccatgctgttttggttactgtagccttgtagcatagtttgaagtcaggtagtgtgatgcctccagctttgttcttttggcttaggattgacttggcaatgcgggctcttttttggttccatatgaactttaaagtagttttttccaattctgtgaagaaagtcattgttagcttgatggggatggcattgaatctgtaaattaccttgggcagtatggccattttcacgatattgattgttcctacccatgagcatggaatattcttccatttgtttgtatcctcttttatttcgttgagcagtggtttgtagttctccttggagaggtccttcacatcccttgtaagttgaattcctaagtattttattctctttgaagcaattgtgaatgggagttcactcatgatttggctctctgtttgtctcttgttgttgtataagagtgcttgtgatttttgtacattgattttgtatcctgagactttgctgaagttgcttatcagcttaaggagattttgggctgagacaatggggttttctagatatacaatcatgtcgtctgcaaaaagggacaatttgacttcctcttttcctaattgaatgccctttatttccttctcctgcctaattgccctggccaaaaattccaacactatgttgaataggagtggtgagagagggcatccctgtcttgtgccagttttcaaagggaatgcttccagttttttgcccattcagtatgatattggctgtgggtttgtcatagatagctcttattattttgagatacgtcccatcaatacctaatttattgagaatttttagcatgaagggttgttgaattttgtcaaaggccttttctgcatctattgagataatcatgtggtttttgtctttggttctgtttatatgctggattacatttattgatttgcgtataatgaaccagccttgcatcccagggatgaagcccacttgatcatggtggataagctttttgatgtgctgctggattcggtttgccagtattttattgaggatttttgcatcaatgttcatcaaggatattggtctaaaattctcttttttggttgtgtctctgcccggctttggtatcaggatgatgctggcctcataaaatgagttagggaggattcccttttttttctattgattggaatagtttcagaaggaatggtaccagttcctccttgtacctctgggagaattcggctgtcaatccatctggtcctggacttttttcgttggtaagctattgattattgccacaatttcagctcctgttcttggtctattcagagattcaactccttcctggtttagtcttgggagagtgtatgtgtcgagaaatttatccatttcttctagattttctagtttatttgcgtagaggtgtttatactattctctgatggtagtttgtatttctgtgggatcggtggtgatatcccctttatcattttttgttgcgtctatttgattcttctctctttttttctttattagtcttgctagcggtctatcaatttttttttattaatgattgttttctgcttgtatgtcttcttttgagaagtggctgtccatgtcctttctccactttttcatggggttatttgttttttgcttattgattaatttacatttcttatagattctggatattggggtttatagattctggatatgacatagtttctgaatattttctcccattctgcagatggtttgtcttcacagattgtctgagcacagattgtcagagcttcttcacatcaagagaaactctcttgctgagaagaagctctttaatttagttaggccccacttgttaatttttgtttttgttgcaactagttttgaggacttggccattaattatttgccaaggctgatatcaagaaagtatgttctggattttcttctagaattttgtatttatagttctttcatttaagtcattaatctgtcataagttaattttatgtatggtgatagatagggattcactttcattcttctgcatatggctagccagttatcctcacagtatttattgaatagggaatctttgccccattccttatttttgttcactttcctgaagatcagatggttgtaggtacagggctttattcatgtaatttctattctgttccactggccagtgtgtctggtttttgtcctagccttgtgatggtttggttcctgtacccttgtagtccagtttgaagtaggataacatatctccagctcatttcgtttgtttgtttgtttgcttaagaataccttttgccattcaggtttttattttggttccatatgaattttataatagctttttttttcaaattctgtgaaaaatgatgttgatagtttggtaggaataccattgaatctttaaattgctttgggaagtatgggcattttaatattgatttttctatccatgagaatggaatgtttttccatttatttgtatcatctctgattttattcagcagtgttttgtaattctacttgtagagttttttttatctccttgattagcagtattcctgggcatttttttttcattgctattataaattggtttgcattcttaatttgtctctcggcttgactgttatgttccactgaattttatgcatttatcttgtatcctgaagctgcactgaagtaattcatcagttctaagtgccttttgggggaatcttcctggttttccaggtatagaatcatatcattagcgaagaaagatagtttgacttcttctttttctatttggatgcctctttatttttttctcttgcttgatttctctggctaggacttccaatactatgttgaatagcagcggtgagagtgggcatctttgccttgttctcaaggggggtggttgcagttttgcccatttggtgtgatattagctataggtttgtcatagatggctcttattattttgagctatgttccttcaatgcttagtttgctgagggttacttcatgaagcgatgttggattttatcaaaagctttttctgaatctattgaggtcatatggtttctgtttttaatttggcttatgtggtaaatcacatttactgatttgcatgtgttgaaccaaccttgcatcccaggaagaaagcctatttggtcattgtgaactaactttttgatgtgctgctggattcagtttgctagtattttgtcaaggattgttttgtctatgcttatcaggaatattgtcctgatattgtgtctctgtgagattttggtttcaggatgatgttggcttcatagaattagagaatagtgcatcctcccttgatttttttgaatggtttcagtaggattggtaccagctctatgtacatctgttagaatttggctgtgaatccatctggtcctggactttttgttttttgtttgtttgtttgtttgttttgttttgttgttgctagagtatttattactgatttaattttggaactcgttattggtctgttaggtttttaattttttcatggttcaatcttgggaggttgtgtgtttctaggaatgtattcatgtcctctggatttcctactttgtatggataggggtgttcatagtagcctttgaggatcttttgtatttctgtggaataggttgtaatgtcatctttgtcttttctaattgtggttacttagatcttatctcttttctctttgtttatctagctagaggtctatacatcttgtttattttttgaaatacacttttgaatttgttggtcttttctatgaatttttgcatatcaattttcttcagtgcttctctgatttttgttgtttcttttcttctgctagctttgggattagtttggtcttgattttctaattcctctaggtgtgatgttagattattaatttggtatatttctaagttcttgatgtaggtgtttagcactatacatttcctcttaatcctgctttagctgcatcacatagattttgatatgttgtgtttctgtttttattaatttcaaagagttttacaatttctcccttaattttgttgtttaccaaaaagccattcaggtgcaagtggtttaattttcatgtagttgtgcagtttgagatattcttggttatgatttcttttttttttttttttttttattatactctaagttttagggtacatgtgcacattgtgcaggttagttacatatgtatacatgtgccatgctggtgcgctgcacccactaatgtgtcatctagcattaggtatatctcccagtgctatccctcccccctcccccgacgccaccacagtccccagagtgtgatattccccttcctgtgtccatgtgatctcattgttcaattcccacctatgagtgagaatatgcggtgtttggttttttgttcttgcgatagtttactgagaatgatggtttccaatttcatccatgtccctacaaaggatatgaactcatcattttttatggctgcatagtattccatggtgtatatgtgccacattttcttaatccagtctatcattgttggacatttgggttggttccaagtctttgctattgtgaatagtgccgcaataaacatacgtgtgcatgtgtctttatagcagcatgatttatactcatttgggtatatacccagtaatgggatgtctgggtcaaatggtatttctagttctagatccctgaggaatcgccacactgacttccacaatggttgaactagtttacagtcccaccaacagtgtaaaagtgttcctatttctccacatcctctccagcacctgttgtttcctgactttttaatgattgccattctaactggtgtgagatgatatctcatagtggttttgatttgcatttctctgatggccagtgatgatgagcatttcttcatgtgttttttggctgcataaatgtcttcttttgagaagtgtctgttcatgtccttcacccactttttgatggggttgtttgtttttttcttgtaaatttgtttgagttcattgtagattctggatattagccctttgtcagatgagtaggttgcgaaaattttctcccatgttgtaggttgcctgttcactctgatggtagtttcttttgctgtgcagaagctctttagtttaattagatcccatttgtcaattttgtcttttgttgccattgcttttggtgttttggacatgaagtccttgcccacgcctatgtcctgaatggtaatgcctaggttttcttctagggtttttatggttttaggtttaacgtttaaatctttaatttttatcatactttggtctgaaaagtttgtttggtataatttctattttttggaatttatttagacttgctttatcattaagcctgtgactgatcttagagtatgttctgagtgcagattaaaagactgtgtactttgcggttgttaggttgagtattctgtaaatatctattaggaacaattcgtcaagtgtcgagtttaagtccaaaatttctgttagttttctgccttgatgatctatctagcactgttagtggaacgttgaagtcccccactattcttgtgcagctgtctaaatcttactgcagtccaagaagtacttgttttatgaatctgagtgccaatgttgcattgcatatgtatttaggataattaggtgttcttgttgaattgaatattttattgttatgtaatgtcttgctctgtcctttttgactgtttttggtttaaagtgtgctttatctagtataagaatatcgacctgtgctctttttggttttgcagttgcatgataggtctttctccatttcttttctttcagcctgtgggtgtcattacatatgacgtgggtctcttgaaggcaatagctggttgggccttatttttttttttttaattcaacttacaattctgtgcttttcaagtcaggtttttagatcatttccatcaagattaatgttgatctgtgagttttgatcctgtcattgtggtgttagctggttgtttttgtagacttaattgtgtagttgctttatagtgtctgcctgaaatgtacttaagtgtgttttcatgatagcaggcactgttctttcatttctattattagtattcccttaaggacctcttgtaatactagtctagtggtaacaaatttatgtgttgtttggttgtctgaaaagaattttatttcttcttcacttgtggaacttagtctggttgaacatgaaattcttggttgaaattttgcttctttaaggatgctaaatatagacccccatctttcctggcttgtaatgttcctgctgagaggtccactgttagcctgaaggagttttctttgtaagtgatctgacacttctttttagctgtctttaatatttttttctatcacattgaccttggcgaatccgatgactatgtatcttgggtttggccatcttatatagtgtctcatgggggttctgtgtattttttgaatttgcatattggcatctctaatgagattgggaaaacttgtatggactgtatcctcaaatactgtttccaagttgcttaatctctctactactctctcaagaatgccagtttgtcttaggtttgatttctatacataatcctgtaatttccaaaggttttgtttatttctaaacattctttcttctttatttttgcctgactaagctgattcaaaggacttatcttcaagatctgagattctttcctcaggttggtctattccattattaattcttcaaaccaaattatggaattcctgtagtgaaattttcaattccaggagttcaatttggttcttttaaaaaattgctatgtcatctttcagctgttggaccgttttcctggattcgtttgattgggtttcaactttctcctgaatcttattgagcttccttgcctcccagattctgaattatatgtctgtcatttcagccatttcagtggttgagctgctgtggatctaatataatagggagccatggtgattgtctgaaggtaagaagatgctgactttttgaattgccgtagttaatgtactaattcttcctcatctgagaaggatgctgttcccttatcttttcgcagttgcttttgtttagatggggcttttttttaatataatttttatttatcttaagagtttgactgtggtgtaagttgaatatacacgactagcttcatttctggatgctttcagagggcaaagtatctgtacgggatatatatttgtggttagattcctgcattggatttcacagatgaagcgtgctggaaaaaaaatggttttggtggtgtaaatcaggctgcaactcagtaggcagcacttaagaacaatggccagcagttaggcatttacatagctgcctgcctgttttgtattttaacacatttgcagcagtgttcagtcattgggaagttggtggtcagccggggatagatgaaccccttattaagttcattcatgggccttagggactcccaaatcactggtgccacacccatatttccttaaccccaatgagggacctgtcaggctgtgctcccttctcccttgggggcagccagagccaaagataaggtcaccaggagacctgcagctctctggagacccactggtcctctttgcttggcagagtcagagttggttgtggtatatgtctgtgggtggtgtactgatgcagtagctcaaggctgggagacctctgggcagggtagtgttgctgtgagtgtgcagcagggatggcacccatggcctggagtattttgctcagtagatggctgtggagactgcccaacctgtgctccctcaacaaaatattcccattttacatactagttttgataaaacattgcttgaatgaaaaaaagtatgtaatatagcaacacccctcatttatatgtcactgtgatatatgaaaaaagtagttaaactcaccacattttaccaacaacaaaaaatcacataacaagcactaagcacagtgattatgcaagtactatctttccagatcatgtatttttcaaataaatgttagtatagcattaattaaattcatttatgaaattcaagcattcttcattcaaaaattatttaaaacaggcacatactaattaactttgttactatctattggtgaacatattacttgtttttctactttacatattatttacttttattatggtggacttatagttatatttcatactatatagtcattagttatttcatattatacattatatattagtttacattctggtagacagaccttttaagttatttatgttatttgtgcacgtacacatttatgtacttatatataacgtacaggtatatgcttttatattttattcttgtattatattcatatatgtatctgctttgtcctttctgaaactagatgtgaggtgggaacaccgtcacctgcagagttaaacattggacacaactctagttttttagctgtaggaatctagtccatatttggtgtactttctgcaattccccatcagctttttttctttattttctttctgacatttgcttagtctcttcagtatctgtgagtgctgtttcagttctcctctgtatcacctggacatatacttcagcaccgttagtgatctccatccccaaaatctgcccacaccatacatgttctaggttatcaactttaccaaccatggtaaacagcctcagtgaatgtcctcgttggctgtgtgctggaagttcaaattctttgcctctatatctacatggactgcctgagtgttctcatgccatggaagttgacttcctctagaacaagtaacgagagggcatgaaagagagacaatgccaaggcagaagctacaaaataacaatcttggaagtgacatatcatcacttctgttgtatcctattggccatacaggccaaagtgggaggggattgcataagggcataaacaccagaaggaagggctccttggtgtcatcttagatgttggctgtcattgtctggcctctgggcctcaatatatcacttgtatgtgcagattatatttacctcattctaaggttagaaggagcagaagcatgacctactaaaatattctgtacagaatgggcttccacttacctgatctcttactcatttatcttctgttctctacttttttctggagtcaaccaacaaattggtccagatattcttagcatagcagagctatccttatggtggacatgctaagtcaataatttccactccaagtatgtgtactgaaatttttctcaacacaggtagctatcttcttaagaagcattctgtatctattaaaataatttgttcccatttcagtatatttggatctcctcattcccatgtttaacgtagtcctcatcatatggcaggtgtttgttaaattaaagtgaataattattttcaagagagtgaatctcaagtaatatatagttgaagttttttttaaattacattctgtctgagaatctatttgccttagaataatcaatgatatattaaacaatgataaatcagaatgaagtggtgggatgtaagcaacatttggtacaaggaaacttataatttctggaaagtctcacatcattttcatttttctgtgtacagtttttttttaacttcataatctacaaaaagatcacaaattacccaatgtcttaagaataatcattaccagtagtaactgctgatcactcatagaaactatctcagtgatgaattttgcctcaatattttttatttactctatatcattgtctacttttatcactgtagttattagaaatagctaaccgaatggtgtgtagttgaagagaggctaacccagaatacagcataacctttttcctcatcacctctaacttattaaaggtgctatattgtttgagcatattttttgattttcagtttgtaattacacgtattttgatgtcacaaagcgatgggaaaatctccaaacaggtgtgaattgtaaggtcaatgatcaaatccacctttactgcatcctaaaggtagctttagaaaattgtgaagtagtacatcttccatgactttctaccattactgtgcccttcacaattccacacacacacacttctgagttaaatattagatccaattatgaaagataccgagttatgaagaaagtgcttaatagcttacatcttccttcatatataattataaaataatgggaggtatttaatacataatggcactctaagtatttgtaagttggtcacggatttgggattctgagacattacatgtgttattttgttactatatttttacatttattttccttattcaaccctgaatgtggcatcttagacatacttcaaagactgaaaataataaacaatatttgttaagcacttgacaatacaggctttatgtggaatggttgaatactctcttactttgttgaaatagtgcactgaactactgcaattgttcccattctacggagaaggatgctgatgcataaaagttacactatggtatctagtgtctaagggacagaacttagagatgcacgcagtagtctttcatctcagagctttgactctctaattgctgttagacagtaacatcaggtggccaaaattaaaacacagcaattgtttttcttagagatttgctccatcctcactctctttattcctcccagaaagcacagccagttttctgtgacctcctctgcagcccagcctccaacaaatgcaattctttttgttcttgttttgtgctgcttgacactagtatcaccttatacttcttttatcttgcatttgatggtagcttatagagctttagggatctattctttcctttcttttctgaatgttctgtgctcccagtctcctctattctaagaagtgctgaactactttgcacatttctttgtaaaggaaggtctgagagccttgtttcccaggtcacttcaatttccatttccagtgcctctgcctaacgtaaagtacaatttggctctgaggaaatgatcatatctgcacactatagttccagcttattttttttcagttttctctttagcataataccctttcttgttcagaagtgttattacttgtactatttctgtcattcagtaatgatttactagattagtttttacttataatcgctaaatactttcttctattttaaagtttgcaactgtatgctcagaagacagacctttgtgtttaatgcagttcagttctgccaatatttggttgatgactaagtgttatgccctgtatttggtaagatgaggtagacattgatatttgacctcaaaaaacccacagttaagtagaaaaaatattttcaataactatagatatggcatcattatcactctaaagagagggcaaatatgacataggttaatggggaaagatcaatgacaaagtgggctttgtactaaaatttggcacaatttttgatagaaggaacagaaaaaaatggtatgttattccacatagaatatctttgaaaacagtcatagatactgaggtaggaagctcacgtatttgtatggttgttgaataagctatctcaattggaatgtgaatattatgtcccagtagataagaaagagccaaaaaaaaaaaaaatagatttgagtcagattatgtaaaactgttagtgctagtctaaaaagtttacatttatacaagaggaatgggagccattgagggtgtctgaagtctgtaaacatccttatcaaaatcaaaaaaacaaatcaaactatacttttcagtgcaccaattttaaattaattttcagcaatattatttgcaagtgactacagcataaaagtcatactgtgaagggaaagaatatttaaaaaaaaacatttggttatttccactaaaccaaactaccatttttattctcaaataagcttttgtttagatgttttctctgatgatggtgttttaagctagagataataattattgattattatttattaacaataccaaaagtcagccaatttagcaaattcaaagtaaaatatttaggtggaaagacacacaaatgacatttacatacaagactttactttgctactgacagaacggtaattataatgtaccagcttgcatactgaccaagaaaccatgggaaaagtatatctggaatgaatttggagccagaggttcagacctggttgtcactagcatttatttggcaactgatttcttgatagtaggtgagatggtagacaatggagaaggaaccaagaaaagacgagtgagataagtgagaaaaaaaaaaaaaaaaaggaaagaaaaaagagaataaaatccaagtgagaaagcaatttgagatccagagagtggtcaatcatgtcaataggttttcagattcaagtaggaacagcagtgaaaacagaatattaagttttgaaattaagaggccactagggatcttaaaaaggacactaaacaaattttgatgattaaagaaaagattctcaaagtgctcttgaaaatccgtacatgccattagtatgcatggactttgtgaagtctgtcaatgataattaggtactttcgggctagtaaaacaaaaattatctataaacaaagcaagatgaatatcaccaaatagcaggcttttaaattcatacacaaacaagaagcagcaaggtccaatcgctttctttcttaattcatatcaggagttgaaatacattatttgttacattggaaaatgtcttctctacccttgttaatagtagctattattttatcattttgtaaaactaatctttgtgtattcccaaagccaatatatacattctaatttactacagttattttatgttgatgatagtagccatgatgacactctaattcagctttgtgtttaaatatataagactatattaagagtctggcttttatttttaattaattaataaagtcacatgtaatatctcccaggtgacttattaagtactattaagtgtttcaaaaaattgaagtttgccaagagctcaggcagcagaaaaacagtttgtgatggttgtgaaacttggactagttcttaacggtgagggagtccctaaagacggtatcgcagagagaaaacaggcattgaaatggcaatgtgcttagtgtgtttaaggattctattagtttgccagaactgccataacaaaatgccacaatatgggtggcttaaacaacagaaatttatggtctcgcagttctggaggctgaaagtcctagatcaaaatgtcagcaggattggcttcttctaagggccatgagggaaggctctgtttcatgcctcagtcatagcttctggtagtttgctgtcagtcgttggtgttccttgacttctgctgcatcatcctgatctctgccttgatcttcaatggtgtgctccctgtgtgcatgccaatgtccaactgtcacctttttataagggcaccagtcatattggatttgagtcccatcactatggcctcattttaactattgcagctgcaataatcttatttccaaattatgtcacattctaagccattgtgtgttaggcttcaacatattaatttggggtacacaattcaacctatagcagagctcagagaaccaattattttgagtcaagcaaaggactcatgtggaagggaagtgatacagaacattggaataaaagttggggccagaaagggaagaacctggagttgacaagagatctgacttcatcctgagtcagctaaaactagtgcctttacagacttattgtagctaccaaggcctttctccaaacatgatgtcaaacagaagcataatataaaatggataaaaagcagagtttttctggtgatcatatgatttgtgatttgccattctccacaccctatataccccactgatctctgtgatagtgacggggaattttaaggctacctgtaacagaatttaaaaacttccacttcggaagactgatctagagaaatatgttagaaagagaggaactggagatcaaaatagattattgcagtagtttagagatgagaaaatgaggccagattggggtggcacaagtgggaaaatggaagaggttaatgaatttaccagtgtaggttgtatattttatataatatttgatgaataataacaggatggtagaaggataagaaacaatatgattaatatcattaataaataattacagtatattaaatttccattccattccaagttgtgtcctacttgtccaagttcattaaactaatacattgggatttgaatttaaagctgagagagaaatatgcttgatttcaaaacctctcttctttattatatgtctgtcttgctctctaggatcaacctaagatgttgaatataagtgactatcctaaagaatattaattcaatttgtagaattatgaagtgctttattgaattaaaaggcattattttcttttgccacattattttgagataatggaaagacaactaacaagaaatgtcttgtgggccattacagacagaggaatcatactcaggacattggtcttgtgtgccagtactctggcaccgtttgtgtcagtggtcccactactacctgaagttcagtgctttgctagaagaacacatggggctcaggatatagttgtcctcatgtatgatatttattacagcagcacagtaaggatacactgctggattagtgatggagaaatacgtgcactgtttgaatgaatttatgtgtatgtttcccttgctttccctgaagaggccacactgaatatcctgttacccagaaatgaaatgtaatagcacatgtgcagtgtttctgccaaaaaaaaaaaaaaaaagtccatttgagactcagagtctaaggcattctgggagctggttacatggcaatttctatctactactaccaaattctagactgccaggagaaaagcattatgaatcacattgtttgtacagtttcgtcaagcttgaacagtggaacaaccttatcagttagtgatggagggaacagttctcaagcaaaatttctagatgacagtcaatacccatccctgtcagcaggcccttctaaatatctagacagctatgttaactttttcctgaacatgttataaaaaagaaaaaagaaagaatctagtgttctggtgttgctgatgaaagttaagtgatgagaaacctgtaaaggggaaaatagaagagtatagactagttattgagttataacaacattgatgtggtcaaatatctatacaaaattcgtaacgaattgattctaaagttttaggtggccaggagagttttatatatatatatatcaatgtgtgtgtgtgtgtgtgtgtgtgtgtgtgtgtgtgtatatataaaacagtattatttaaggaatcaaatttcaatactgaacccttgaaaatgagtaaaagactgtgagttattaaaaaattaaaacaagtatgatgatattatggaatattaaatattaatgggaaattataactggtacaatacgtaaatgccatgtcgtataaaactaggtggtaattgtaaagcaagtagagaagggggtcaggaaaatcgagctcactatttctcaactgtaataacagtatgagtatatgcccacctttgtttcacaatctaattcttgaattgttggattgatatttgaatcactaagtttggatacatgccaaatgctaaagaaaatacaacttccgtatattgcttgaaagcctaaattaaaaatttctatttctgttctcttcccaaaatgtgttttataggtttaaaattaataatctattttaccatcttattgtgatagtaaaattatttatgcatttttagttttcttggtcacacaatatattaccatatctttagacattttacatgctatatctatattgacctctatatccatatttatatccatatatcaataccaacttctgattttcctgtttctaacttatagttttactaaaatattttttaaaaagaagatgggtgcggtggctcacgcctataatcccagcactttgggaggctgaggcgagcggatcccgaggaaaggagttcgagaccagcctgaccaacatggtgaaaccccgtctctactaaaaatacacacacacacacacacacacacacacacacacaattagccgagcgtggtagcgcacgcctgtaatcccagctactcaggaggctgaggcaggagaatcgcttgaacctgggaggcagagcttgcagtgagccgagattgcgccactgcactacaacctggggaacagagcaagacgctgtctcaaaataataataataataataataataataataataataataataataaaataaaacaaaataaataaaaataaaaaataaaaaagaagataaaaacgaaaagaaaaaagaaatgattgatttattttcctttggttcaccacattcttcctcacaaccactttaaatagcacaacatgtaagtagaagggagtatgaggcaataatgtggatagagaaaacagctagggactatgaagatagtataatagtatcttaataaaggtaattgattatattgtcttgcacagagctcccacctttaagtttgtacaactcctacttttattcaaatcaattctgcctcagaaaatcatcagcatatttatcaaatgggaccctaaatacatttcttgagataggctaacagacaaccaccttcactttcacagtgatgatcattcagtcattgctttgatgtatttttacttttctgtcatgagctatgtggcttcacagccatttgcaagggtcctctaccatttctgaagatggtcttctggagactagtgcgctcttttgacgttcttgcctttagattatccctcctcctttaaaacatccacaaatagatctgtttatgttataaaatcacacaaaagtttcagaaaaattttgtattctgcgaaatgatgatgtaaataaaatgattaattggaaaaatacattaagagcagagtgctcaaagcccatgcaactttattattacaacattagcagaaacaataataattaaacaataataatcctaacaaattggtattaataacatacttaaaaagttatgctaactccctaataaacaaaaaattacaatgtatagaaaaagtgcaggagacatatatatggcttgataagaaagaggtctaaggaagggctaagacctaagaactatggatttgacggataaatattcaaaatccttggctatttatccacaataagcacttgtatttcagagcatgtggccaaactgaggtgaaagaaaaaatgtggggtgaatacgcatggtgtgttgtattatattcttccacagattaatgcatttagctgcatagtgtactttactttcaggagcaatatttggtggcacaaagtattaatgtgttgggaaaattgtaaaataaagtaatacctttttattcactaaatgtatatgaactaattcttattatatgaatatgcatgaaatgagtaacttcttctaacttgtgttttaattatattaaaaatgctatttacagtataacaaatgatataacaaatcatagctgcatcctgtgctctttttaaaagagaccgtcaggttcctcaactgagtaaatggctttcaagttaagtctggccagttctctaaatgcagcttgggtgcatttcaacttatagtagcaataaaactcagatgttccttccagggtttccactccatatacaaaattagatagcttcacacctacattgtttggcaaattgttgtaaagaacacatgcttactagtaacatgaatatcaatatcattaagtccacaaacattcaccagatacttgccatggacttagcactatggatgtgacattgtgtccacagaaagttactctccagccagctcacctaacagtgtaagccataatgtaactaaaacacagtactggcaataatgcagaacttaacaccatgagcatcagtttggggaaagacgtattcactattccaaggtagaactaatgcggtcatttttctttatttctgttttccaaaataacggtgttcttttattgatctgcccacgtttttccctcatcttttaaaagtccatctgaattgttggtggattctttttcacaagccacttttgtcagtagttatataacaagatggttcatgaaggacagggctggagatcatagagaataattaggagagaggctttagaaaatctagggtcaacttccaagacatttcttcactggttttcctgtatcaaaaggaaaggcaaataaaagcaaatactatcttttgtaattcaagacttcatagagatgactgcaaaatacaaaagacctaaaatagcagtctagaaaatcttaaatgtttcctcacctcacaagttcacacactaacacaccacttattagtcacatagataatttttataattaaagtctattgggtctaaaggtggccaaatcccagaggcaaatttaaaggataggaaggagcacctatgtagcttcaattcactgtgtcccctttctcaatatcttttttgcttcagggaacgtctactgtcagcaataatgtcctgtgggacgtgcctttgctgttcgttgcattaaatgtccagctttttactatgctttgtttagccaggtgtttgactttagttctcctcctgggattcagggaacatgcagacagcctcatcagcagatgtgtaactcaggcaagcatagttgttaacaagcgggccgcttaaaggcagctctgcctgctttatatctgccgcaatctttttatatctgtttccaggctgcctctgtcaaggaaattcctctcaccaacaggttccagtttacaactgctgtataatcactgtggttagtcagctgccaggtgatggttaagtcagggtggaaggtgtcaatatggtttaggtccctttcgtgagtatggctagtgaggcctaaggatatttgtaaatacctgtctattaatatctatatgcaaactagagctgtgatttagatgcataaattttaaggatgatttagaaaactgaagattctcactaatgtttaattgagcccaatgtgtggtatgataatcaagtttttattgatatacttacgttcagtaggcaaacataacttccatttcagcatgatatcaaccaaaaggatgtttttttttcttattcttcataaccttccagtctttctctgcatccaattgtccttaattaaacatctagaaccatactttcccacggtagccctttgatacctgttaatttctagatctatttgaaataaaataatttttgttggataaattattttcattgactttctaaatgtggtatttcatatatgataattgcataattgcaagaaattaattttttttgagatggagttttgctccattgccaaggctggagtgcagtgacacaatctcagctcactgcagcctccacctcccaggttcaagtgattctcctgcctcagcctcccgagtagctgggattacaggcaagcaccaccatgcccagctaatttttgtatttttagtagagatggggattcaccatgttggccaggctggtattgaactcctgacctcaggtgatccacctgccttgacctcccacaatgctgggattacaggcgtgagccaccgcaccaggccaagaacttaagtttaagtacataaaagcccgaagctattgtgaacatctcagaaatacactgagtgtgagatttgtcttgagattttgtaacatgagttggtattgcaggaaggaggtgaaattgtagtcaaagtcagagtggggattctttgggaggtaacagtagagaatgtcacacttcaccctcaatcctcatggttggagggaaaaaaatcttggaattcactctggaaacaggatggtacctacaaagggtctgcgtaaatactgagagagactcaatatttaagttacagagttattgcttatcaaatgatgtaagacatgaagcctactttgaactattgtatgagatagagataagtgaaaatggaagattctcatagacagagacaacagcagcagagcaagaattaaagataagttagacttaactcttaacgatgccatcaattgaatattcttggataggctgtaaatttcctccttatgtatctttcttttttgttgacgttatattgctcgtgttttgttatgtgttgttagtagtagaatctacagcccaatctggcttgcccttatcaatgacaacacttttggccacatcaattccatattgaatactatttgcctattttaattttagcctaagcaaaatgtaattaggaaataaatctgcttccaaattgaaatgtatcccaaagccaactctaaaaaactttggaatcattcagtatttaggattatccatgctaccatttccctccaattacatggctaaagaaagacaatttaaaacagtctctataaatttggcatatttaatcattaaagcagtgattggattaaattatctctgataatcaatactcttattcacaatactatacaagctaataatcaagtttaaagaatattgaaatattaaaggtattttaaaaacacccttgacctcttagaattgtctactttggtacaaaccataatacaattctacaaccctatttagtcaataaaaaataataattatactttatcaaagataaataaatttttactgctggtaatgtattttgagcccctcttcaatgtctacgtgagctttgtctattttttcttttctttttgaacctattgaaattattactatggaagggggcatcaaggaatgctaggtgagattgatagcagggttgaatatttggcctgcaattattaagataagtgagtcagagaaagctctctgctttcatgggattatcgttggctcctcaagtaggatttattgaagaagaaatgtcatttttggttatggattcttattaaatttttatgtttttaagcaaattttttttcaaaatttatataatattgatggatgtatagaactatagaaactttttgaaaacctaacatatttaatatttctctaagtgtctaagaacatcataaacaaatacttttataataagcttacttcaaagtgcactgatattatgattgacaatttagtttaatggtgtaataattacaatgaaagactgttttcagaggacgtagactgagatcttatgatttgtgtgagcttgaaaaattaattgaactctttagttctcagtttcctcaccaatgaagtgaggataaaaagtacttaaatcagagcagtggttgtttagattaaaagagataatacttaaataagtacttgagtttcagtaaccatttaactaaaggaaaatattattattatttcttttattgatgctactgctgttgtattattatgactagtgggaaaaattatatgaaataatgcaagtaattcatttgcacaaagccttacatacagaaaatgtaattatactttgttattatgaagtgtaaaattcttagcaccaaatgtcagttttattttgttttcttatgcagcatacaaacatcactaggacactgggtggcttattgcagattgccattacctttcatgctacataaagctaagtttctatcactatcctgagatttccaatttatgtagcttgtacaatcataataataaacacttgaaggaaacatcgtgaaagactttgaagtgggccaaaatgcctgtcttcgttggaaaactagatattttctaagcatgccctcctacgttttctgattcaaataggtctctgtacctctcattatctcggagctatgttacaactctgtacattgtagataactaatagtaatgcacatgactgcttttatagacaggaaaataaatttttgttctaacagaagacgatgatttcccttcttgctgtggaacacatcagttttgcatctacttttaaattattttattatttccatgcggggggtcttgaattatcacaaccagctttatcatccaatatcttaccggttccctcaataatgaatgacttgaataaaatctttgacacgtttattttatatatggatgagagttatgattatactctgttataaaaattatccttttacacattcgatattacattttaactactcttactactagaaccgttttaaacatttttcatgtactaaattagaagtcagatgtactacactctagaatgcatgatatccttttaaaagattctcaacagatgtgatcaatccagtgtaccatagaaggcaaacactatggagatggttaagataataactttagaatctgtctttggatgaccagagcaaataatttatatttccttttccagggtatggagataataatctctgccttataggattattgttgggtttgattgtaatagttaaaaaagggggggttagctctgtgccaatcacctcaatgaatagtagttatccttcttatggaactttagtttctgacaaggtagtaaatttcactgctcagcagtactattacttaggaggtgtttcttaagtggaactctacgtttgttgtaactttaatgccctggttagtctattttattttgtttggatttgttttactattttctaaatgaccattattcaaattattaaagacagctgctgtttttattctatgtatctctttcaagctaaatatgccctcttccttcatctcctttattattatttatttatttatttatttatttatttatttttggtgtatttcccagcttctttacctttctagttgtcctatggtttgaaaaagtcattctcaaaacattgtgcctagaactcaacatcaaattctagttgtgattggattaaaatgtagtgttgagataccaacgattagggcacatttttccaataatttaacccaagaatgcattaggcttattaatttttatattatattacatttttatcttattttgagctcatagccaactaacatctttaattcttttattctccaattcttttttacttgcacatttatgattttgaatcaaaaattaaaaatttacatgtatcacttctgataataacgatagcctataatattgagtagtatatgttgaatctttattatgtgtcaggtactatgtgaagtatttggggcttgttattttattttttaacaccaggacaactctttaaactaggtgcttttatgcacttagatcaagtaattaagcatatattatttcttttggcatgattgccaaaaagatatgtacattaatatattaaatatatagacagttatatagataataaatgtttctatagatatatagataataaatgtttctatagatagatataagataatggatatatgtagatagatagatagatagatagatagatagatagataataaatgtgagaagtttccttcagccattgagcaattacactctaatttaatgcttcccttatcatggccattgcaaacctcacaggtagatgactttactagctctggtacctccatgtggctaattacaagtgaactattgcacctatagaaagaaagtgatatacattcattagacatttcctaccacattttttccaggggggaaagtatcaggtaatagttccaggttggtagatagtttacctctagctacaaatcattttgttttccttaaaatcaattagaagatcctccagaaaaataaagcatgtaattccatgaaagcattgggaaggcataaatcttctctggagacaaaggtaaataaacatattcagtttctttagtcagaaatttcaagatttttttttaatcttctgacatgaattgtttcaccaaaaaacatgtccaatcctaactcccagttcctgtgaaaatgcccttaactgaaaatagggtcttttctcaaggtgaaatcatcctggaattagagtgggttctaaatctaatgactgctattattataagaaaaaaaaaaaaacggggagatttaatccatacagggaagaaggccaagtgaagaaggaggtagattgaagttaatactgctgcaactaaccaaaaactgaaggaagcaaggacgtattctcccctagagcttttgtagggagtgtgtccctgctaatgccttgattttgtacttctagcctccagaactgtgacagaataaatttttcttgtttttgtaagccaccaagtatttggtaatgttttatggcagcactaggaaattaatacattgtccatagacactttcagttaacaagtatgctaaaggaataacatcaactttctgtctaacttctcaggttctacatttagcagttctaaaaatgggctaatttactgttatgtaggcaatttactctgttttcttgccgtgttgaaagtgccatttacttttacatatcattcttttgttgcacaaatgtttatcgatcacctaaaatgtgttatgatactgttgtgaacaaaacaggaaaaaaaagaagatacaaattcctgctctgatgaatttatattctacgagcgggtagatgtaaaagaaacatagtaaattatgtagtataattagaagcataagggaagcaagattgtatggaagaatgtgattatgaataaaatacttagcatagatctaaaagagaaggcgacatttgaaaaaagtctagatgaatgcagatgagtacattatgcatatattggggaaaataattccaggcagaaggaagagcaagtgcaaaggctcccagttgggggtatgcttaatatgtttgagaaacagagtgatgtgtctggggctaatgttggtggaatccaaaaggctacagaacttcactatgagtcaagccaatggggagcctttggagggttttcaggagtgcagtgacatgacctgactcctgcttaagacaggtgcatttaatcttttgtgaattcctttagcagtctggactgttcgaaataatgttttaatgtacataaaattaaaatgtgtagggagtacaaagtaatctatatcacaaatttgagatacagtagtatatgtgtttcactaaaaaacctaacaatgtgtgtattcaatgctataattttgaaatagtgatgaatataaatggtatattaaggtatctgtggcaatattaattgatacgaaaatatctatgatttcttttagtgaccaaaacagatactgtgaatatgactatggcttgttgcctatattcataatcaattaagtgaccccctgaactaattcaaagttaataaccatttgtctatattagtattgtacttagtcagcaatagaagcataaacactaataatccatgtagcataggatctaattcagactgacatttaccagttagaaataaggagtctttatgatgatgtggttatttcaatgtgcaactgcaaacctcctatggtcttaatgttcagatattggaaagaaaaaaagcaattatgtttttgtttatgttgaactttactcccgcttgttaagcctgatataattataaatacaaacatgaagacaggcagattttgttccctaataaaccataacatgaatatgcctatatctaagtcattcatctctcctttttttctatcttaaattatgtattgcatgtttccataaacaaccagttattcagattctaagtcatacatgccaaaagagattttgtttttacttaggaatgtatttatttgggatacacacatacatattttagtaccccgtttttgatatagatttattgtcctatatttaagaggcatctggataaaagtaacttattcaaatatgtcaataactctgttatatcacactattccagttataatccaagactaaactattttagtttacaaaaggaaatacagctacacagatttacagtgaatctttcccttagtggggaacagaaagaaaaaaaaacttgtaaagttttaacaaatataattttacttgaagtgccataccatcatgtaagtcttaaaacacatcaaccttgaaagtgagtatagttctggacattaaaacatggcaagttgtgggttaactttcagtgtcccttggccaaattgtaaagaagcaaagagatctgatttttaaatttcataatgtaactagtagttctcaaattattttggtcacctaattacctaaaggcaacataattttatagactacattgaaacaattcactctcagaatgtgccagaatgcactataccttacattccatattatgactctctataattcaataaatatgtatcatacttaatcagaaaggctctgataaatatacaacattaaacatatggaaagcttattcacttgattgtaattttcatatttgcactgtttgtacctaatccacatttttaaatttctagatacacccaaaggaatatagtgtgtgtcttttctttttaatcctcgtatttttactgcttctgtaataggcattgacctaaaccttgtccttgccacaggctgtgagagatagcactttgaaggttttttttttctcgtttttttttcttatccaataagtaatgctccaagaaagaagctgatgaacccctccctttaaaaagtaataaactttcaagcagggtaaggcacagtggtaatagcagaccactataattccttagaaaattttacaataaaatcctgtatctttccatattgctattgatattctaaagtagaacttgagatctaaaagttgggactataacatgaatcagcttaacatttaagaacatgtattattaaaaacatgttgctaaaatgtcatattgtaggagctatattagcattgttttaaaggttagctatattacatgtgtctttagattcacaaggaagctatacaatttatctatatatgcatgtgggcatatttcatattgataagcacttatatttcatatctgcaaacatacatatatgcacaaatatatgtatgcatgcatatatatatacacctatataatacaagcatatatatgcacatatatatgtataagtttatgagaataaaattcacatatatgaagagagaatgagagagagagtgagagcgagcgagagagtataattttataataatggacaggtattggtcctgtctagctagtaagcggacagagtgaatgtagtgattttgtaaattgcctttatagcctaagaatcaagaaaatataggaaagcttttctgctgctttggccgaaagtggttctttgcttgatccatatcctatttcctttgaccccttcaatagggtggctcagctgttatttgctttcatgtcttatctcattttatcctaacaactctataaaggcacataatattctcgccaggttgtgggtgataaaaccaagggattgaatgacttatataatggcacactgctgttctttccacctttacagtgctttgatttccacagcatgttccatgtttgtcaatggaaagtgggactgagaaccatctgcatcagaatcaaatcacttgagattacttatttaaaaagtagattcctgataactgtccttgtcctttcaaatcagaatctataagagtagacactggaattttcattttttacaaacattctaggattaaaaaggccaaggttatggctaacagtaaatgaatcccgtatcctagacagctgagtcttttcccagattcttgctaatcaaaatgtggcccatgtatcagcagcattggcacaacctaagagcttgttagaaatgcagaatcacaggccccactgctgcattttaatatgatctccaggtgactttgtccacattaaagtggcgaagcattgtcttaaagatttttttataaattaccccatttggtgtttgccaaacttaactgataataaaaatgttctggaggcacttgtaaacagtcgctttgcttcatctctcgctggagattgtttctctaggtctggagaggtgtctggaatctgtatgtttattaagctccctaggtgatcattatcattggataagtttgaaaaacatggcatccattatctctaatacaaagtctctggtatattttatttgacttctgaagttggaggttggtgtttgagttattgagcagcagttttaacaactcatctgtatctgtgcagaggaagcacggtgtgggaatgataagtacctgacttcattgtgagcccagtggcctgagagtgaaactagcaaaggtacttcacttccctgtctctcagtttccccatttgtaaaatgaaaacaatcatcatatataattcatagggtggttgtgaagaacaaataaattttttatgaaagcactggaaacagttcctgtttagttattatgaatatatagcctcccccataaaactctttgtaatgagcccatgatttttatacttgcatcctctcaaaacgctgctgacaaagctggcttgataaaagtgagtgctgagactaaaggaactttgagtgtgacacagaaagagtctcactataacccagatgatggttggcgttggcagagtcaagccttcctgtgtctgggcaggatgaatcgccacttttggcaagcatccctcacaccttccttccagctttaaaaataagccatgtggcttagaacagacaagctctaaaataccagagaactggtctatactagtcacatataggtagggaattatattttaagacaagacgtgaacattgggtcatccttaggaatctacagagaggtaaggggaaacatgtataaaaatcattgttctcgttcttcctagcaaatgaattatcttctggctcgttagaaaattgaaacctagcctgtatgcattttgtttaattttagattttctgttcccttaccgtgacttttagaatctgggtccaacaaattaactttatctgagaagtctgcctcctccacggcctgggcagggttaatcatatgctgttacacatctagcattcatcctggttgtaaaacagttgcatgtctgcacctccttcattacaaatttgatattcatagaaagcagtgaccttcatttacttatatttttaaaaatcctcagtgccaagattaaagcttgacaaaaaaaaaatagataattgtcagttggaagatacatcattgaacaaatctttaaaaataatatgcccatttgtttttggcaaggcaaacacagagtatctgtcactaatgagcctcctattaactccatggataagataataagaattaggctgctatgccaaccacatgctccaagaaaccctgggagctcagctgtgactggttgtcttcctggctagtcggcttctggtggcataaagcaagttaagccctcacaactgaccattccaaaaagcgaatttgcttgtcaattccagaaacacaaaaaagcacttagggcaaaaggggaaatctggcatgcttcttcccttcaggtacctggatattcattggcctacccacattgttgtttattcacaattgatttaaaccaccatagtcaatcagtcaatcaggcctacatagcaaaatcatgtgaaaagaaagtacatctgctggacttagctgaaatgcgaaactgatagaaataaagaaaaatacactgcagctagtcttagtgtaccattgtctttatgtatgcaatctttccaaattctcgtgcttccaatatataaatgaagaaatgagcttggggaggctaaatgtgtctgccatcacagagctaagaagtagcagtgaaatttacttgcaggtttatttgattctagaacctataacctgtctgattataaaatccatgatatttttattacaacaaatttagaatgaaaagtagaaaacctacaagctcctactcattcaattgtcaaaattacctaagaaaggagtggttaaagaggaagaaaacttagaggagtcactgaagtggccaatattataataatacaactgaaccttctattggtataagaaactaaactggggccgggcgcggtggctcacgcctgtaatcccagcactttgggaggccgaggcgggcggatcacgaggtcaggagatcgagaccatcccggctaaaacggtgaaaccccgtctctactaaaaatacaaaaaattagctgggcgtagtggcgggcgcctgtagtcccagctacttgggaggctgaggcaggagaatggcatgaacccaggaggcggagcttgcagtgagccgagatcccgccactgcactccagcctgggcgacagagcgagactccgtctcaaaaaaaaaaaaaaaaaaaaaaaaaaagaaactaaactggaagcacacagattataaacaccattttcatttgcatagaattatttggaaaatgtcatggcattcattatctaattttattctaataaaatcttaaagcattgtattctcccctttttacaaataagttaaaagtggcacaggaactcaaagaatgtatataaagccatacagaaagtaaacagttctagaacccagcactctctcatgtgttgaatccagaaagacaattttatccccaaatcaaaaatcctcatacatcaaatacaaaataaatagcagtccagatcatgagggtctctttaaaaaaattcactaaaattcttgttaagctttagctagtttaaaagtcggctgcattagatattatgaaattaagtctcataataaattctacctaatatttaagaaaaggaggctgtcatatcctttctaactgttttttctctcaattagccaggagctatttctgtattaagtgactttcccacaataatttttgccaaccttttacggattggataggccaatgcccagtcagtaagctttcttttggcaagatatagcctttaactgaccttgcttaatttggcaagttgagacaaaattgctcttttcctccattttgaaacaatctcaggcaaccaaactttctcatgtttttgtttccccctttctcatctcattttcttttcaaattctttctctctgtgattcactttttcatttattagtgtttgttgttgggagaggaaggcagctgggctataatggagagctcatccctttagagtcagacagaaaaccaaatgtaaaagcactgtgacactgcttcttagtcatgcgatgttgaagaaaggaccgaacctaagacacagttttctcttcctacagaatgacagcaataataacaacttcacagggagatggtagagaatgaaattccaagtttgtgcaactagagcagagcctggaatgtaggagctacttcataatttgatttagtgctgtagatgaaagagagctgtctttctagatgaaagaattgcttttcaactttgtgtcaataagtacttagcagacggtttgtgtcagggtgttctgccctattatgaggaaatttaatctgtccttgaaattaataacaaacaataaattatagcatctacatttttcctcacacaatgcatcagatatgttgacatcatctttgagaaaagaaacttttcttcttctgctttttttttttctttttggcataaaacattggcatatatcaggaaacagctgaaaaatgctaggattttgacagtttggggctgcttgtccttgtctttttattcctgtcacaatctttcttgaaaatagtctccttgcaacaatgaaaaaaatatataaccagatagttcattttctagctcctatttttccccatgagtttcagaaaattggaccctagaggtctggctttatcaaccactagtaatactgccatggaaatactatcagacaccccatcactcaacccgttgtcaggtaccaataacagcagtgaacacattcacttaaatatgacttgggtcaaagaagatgaacataataatagttaggtagtcagcaccttagtagaaaatctgaaatagagttgcctgagtaaaagttgattattatatttgccctggtttatggttcccaaacttggtaaagaattagttcagaaggcatttatttaaagtagtaggtatctgataggatatttgagtacaataggatttggcaattatgtagtacatgcgattttattttacttcttacagcaaacaacttgacagcttttattaggaaaaattactttgttccccaaaatatctactagccagccaatttaacatcaaccgtttctttactgactgtaacatcactcatcagctttaataccagtcctcttctctgcatccgtatgagaatacagtagtcatctatcagaaacaaaacttcacagaagcaagaaataaaaatgcagtaacagaaagaacttgcttgtagaaaacctctttttagcctcctgtttagatttttaaggaatcaactttgctgactacttaaaaatatggcaacatgttcacattgtttctttttttatgctagttggtttctgatacagtagcctgttttagtgccttacctcattcttaaagtgtgaacgtgcaaatgatatgctagtcctagtgctactgaaggtgctgaggttttcaagcgagggaatctggaaaggactttctcaacaataggctgagtatagtattatattatggaataagttatgctgaagtaacaaaaaaaaaaaccctctttacgtgcctgacttaattcagttaacataatgtcctccaggtttatctgttcttatacaggacaggctttcctcttttttaaggatgaatagtatccctttgtgtgcaaataccacatttttttccattcattcactgatatacacttaagttgattccatagcttgactattgtgaataatgctgcagtaaatatgagagtgcagaaatctcttcaacatattgattttatatttttttggataaatacccagcagtaggattgcaggatcatatggcagttggattttttgattttttgagaagctcatttatatatggtacctcagaagttcaaatttatagaagcagagagtaggatcttgggtaccagaagctgggatggggtgggctggggattagagagatggtaaaaaaaaatacaaaatttcagttagacagaaggaattagttcaagagatctatcatacatcacagtgactatagttaataacaatatactgtacacttgaaaattgcaaagagagtagatttcaaagtgttctcgctacaaaaaaaatacgtttgtgaagttacgtatatgttaattggcttgatttagccagtctacaatgtatgtatatcgagacatcatgctgtctaccataaaactatgcaatttttattcttcaatttaaaaaataaagacaaaagaaaagaaaacaatataacaaattcctagtgttctaaagcagcaacaatgacttgactccaagaatcaggttgattggacacccacagatgtcacttattcccacaacatccatcctaagctagtcactcaccctctttcaaccacatggcagccaaaaagtacaatgctgccatttgcctccaagtgcagagaatcacccgtatctgaatgatcagaaccaatgacttttacactaaagaaattattaataatgccagatataaagtataatgtttgtgagtatgttgaactaaggaagttagtaatacctttaggccactgagaaaatgttttcagggaataatccaggaaggacaatgagtttaatcatattgcagttgacattgcagttctaatgtctatcttttcccagtccctaatgcaacaaatgtttatttagcacatactacatataagtcatttaccagatactgtggaaacaattagactaaaaagcaatgtatctggattaaacttatatttattgaacacttgttaggaatggtgccaggtactattacatgcattatgttgtgtatcctcataacaaacacgtgtacttagcatcatcattcatgctggacagatgagattgcttaagaacaggtagtaaacttgcctaggcttacacagccggtaagtggcaaagttaatcaataaactctgggggtcattctaacggcaattccagggctgcttctgtaaaattctatttacaacaaaaaaatgagtcatgtttatgcagcatgatctttataactaagatattccataccctgatttgattatttcatatttttgttggcgcctcctcttcctcacatctcccaaatgtggaccttcattagatttcttagattccatccatttctacaatgttgctggccacaactaagagagtgtgtgtgcatatccatctctgaccggtatttcatttaccgtttccatctgccaagtccactttcatttttgttatcccattagtcttaatgtttcaaaggtaaatttatatgttcttccatgaaacccacatattcccctcatttgtattttaagttagtgctctgcatattttctagttccccaggctcaagcccatagtgtcatcatcgatttcttcctcatcccttcattcagcttgttaatatctcatcctttacagtggctgttaccttttcctcttctctgccaacctccctactaaaatttttccccttatggcatcaattccaaactttggcagtagctttcactctccctttcctttctgtatgtcactgccaaaagtttcaatgaaacatatagacattttacatatttaagctgaccttaaattttctgtatattttagcctgatgttcttcctgctttttttctatgtctatttaaaaaagaaagagaaagacacgtttttattttagttcaaatggtcaatttttttttctaaatacatctcaacatttcttgtcactattcttctgatgatgttgattctatcatctagatggtcctctcataacccaatgccttttaaactttacttcttgttagaggctgagataaatccacttttgttttgtttcattttgtttagaactttctgtgtgtccgtcactttcacagctcagtaaattctttctttctttgtgttactatactttccctctttatgcataccatttcaataagcatgtcatattctgccttgaagccaaaacttccaggttaagttttatatacagtaggtacactataaacctcagcctgtaatgaataaattattaaattgatagactttctgcaggccaaatgtaaagaatcgatcaaaaaattaaatgtggattatctttgacatcaaaatgtcatttctaggaggtcctagaacaatatattgcagaatagaaaaataggaatcaaccttattttctgcatggagtagtggtagaggagagaacttgttaaaagatctgtggtctgttcacaaaattgaattcaaaaacttattgaattcaataagtgcaatatttttagtgccatggtatattatgcacaaattaggtcaggggaaaaggagtagttacaaaagaatgtccttttttttttttttttttttttttgaatatgtgatagatcaggattcttgttcttgttttgtctctttctgggcattcatccccttggtgatcatatgacttgctttggccaacaaaatgtgagtggaggtgattttgtgtttccaagtaaaaagcatattcaatgtcatgtaagacccttggctacctttccctattgcaggggtcctgaaatctgtgcctccatggtggcatcatgaaagagagactacactttcacttgtactgtttttgaaataaaaatagaacaggtttttcagaagcttcttatatacaataatatgaacacaagtagcatgttagtaattcagacatcttttggtattaaaaacctggatttttagaaaatagtaaactggtccaattcaggttggcagagggagtgagagatgggcaaattaccaattgttagaatcacagagctgcaaaaatttgagaagtcatctaactgaactgcttcatctcacagataaggaaatagaaattcgtagaaagtagaggtaaaagtggaggggcaagaatcatgctttcttaccttctaatcccatgcacttgccataaaacactgccactgcagaaataacattcctctctaaatgtagcttttctacctaactattcttattaaaaattatgttgcagcaatcataaaaacagtaccataaaaggaactaggtggttagacaattacttcaataatagatattaacttatacttcaagatgaattaatgtgattttcaaatatgggccgttgactaattttaatccctcaagactaattgaatttctaatgtggagagtactttagtagccattagaaaaaaaatcagtaaaataataaatgataataattcccatcctcaaagagtcctcattccaaaggtaaataatgctatttcagagttatggagaatgagacaaaggctagttcaggaaagatgtcccaaaggaggcattaatggactgaaatgtaaagcattatttggagtcttttcccagatatacaaagggagaaaaatgtgttgtgaaagcctagcatgtgcaaagacattgaaaagttgaaaactacaatacagctgccaagaaatgagagtagctggaatatgtagcaggaaacacgacaggagactaaggcaggagcaaatcatcgtctatgctaaggaccagtataaagctgttgcttcttaaatacttggattactccacctacatgttggattttaaatatttttgaacaaataattttgaccattttactgtattgactttgagtttaaaataatgattttcagataaatccacaaattaagctggtttataagtactggcgttttaatataaaataacttttaaatagcatacctgagagcaatcaaagaaaatattattacaaattgcattctaatgtaatgacataatatacacaattgctatgcaaaacaatcccattatagttattttcataattttggctatgagttacataatcatattgcatataattttaacttgtcatataccagataaaatttatgatttctattattatagacctgcattatgtgtgtgtgcatatgtgtgttcgtgtatataggaagttcaacagatatttttaaagaattcatcaagccattaaattctttttttaattataaaatgtatatatataacataaaatttatcaccttaaccatttgtaactatacagttccgtggcattaagtacattcacattcttgtgcaactatcaccaccatccatctccagaactctttttgtcttgtaaaacagaaattctgtacccattatacaatcactcctccttccctcctctcccagcccctggcacccaccattccactttctgtctctatgactttgactactctgggtacctcatataagtggaatcgaacagtatttgtccttttgtgactggcttatttcacttaacataatgtccttaagtttcctacacatggtggtatgtgtcagaatgtccttcctttctaaggtggaatgattttccgttgtatggatataccacattttatttattttgtttatccattcatccatcgatagacacttgggttgcttccacttcttggctattgtgaagaatggtgctgtcaacaagccattaaattctttaactccacttttaatttttctaaattcttgagaacaccaagcaagaacatgatatattggcctgtggaagagtgtctggaccagtcctgactctgctgcctgtaaggataagcatccctaagactccagagctccatttgggaggaaatagaaaatatctaatagaactcagtggtggggagggatcaaggagagacaatgaaccctcagaccttcacactgagtctcaaaatgaaacctaagacaaaagcacaaccataaaaccacaaagggctttagggggcttatattgtataattccctttctctaatgagactcttgggtagtttccattttgctccagatatttggggtgagcttttgtgactattttttgctaattaaaccatagtggaatgtggtttttattcatttttaaagttttcttactgcaatgctcttaaataaatatatatatatatataatatgcagtttaaaatgtcataactcaatggcaataatcttgtcaatgtctatcttacctcctggttttaggaagaaaattgtgataatcaagaaatatatagatagttatgaaaagggaactccagatttacttaaaaaggacaagctatataaagtaattaaaagcatgtgcagatattagtgctgtgtaagtaaaaattgtttgaaaaccattccaagatgcgtgctccttgttcagccattttctctccctcagctatactaggtctatagaccgactccctcagctcttcgtaatccctttaacatgttgtttacattattaaatttaacatgtttaattggtttctagacattaagtcctactcttattcttcctgaagtcggcataaagtgtgtgttttgaagaagagatattgaaggaatgaatgaagaaatgaatgtaattattatgataatgaatgtgaaatacattgggaaaattatcagaaaaatatagctttcattttgtgagcagttttccattgtaagaatttgactagaatgtaagtgtaatgtttctgatattttgtaaaggtaattttgaaaaccctttttatgaaatagaaaatttttctttatactcattttgaagcacttgggtaaactgaagacatatatcagagtgaattggcaaaagtgatagacagtgctactaacaatatcacctcaggagaaatatctaggggaatatctgaaatccagaggctaaaattgtgcataaattcaatatttgattagaatcttatgaatgttttactattttatttatgagtattttattaatataagtaatataataataatccagcaagggatggtagatgttgtgacatgttttgtttatctgagattaataggcaaaataataatattgacattagttctagggagttttaaaattaataataagtttagtgggtttttttatattgacatccttctagcaataatctggagctttctgtacctgatttttgtttacagttgtttttgttttctactcaggaggaatgtttcatcaaattcaataccccaggcaacagaatgtattgaaggatctatggcaaattttagatgaaatatcttgatccaatgtgagtctcaaaagataatgcatattataaaatgagagagaatgagtagtgattttataaggcatgaaaagccaactggtcatgtaatcaatgtgggggaacaaccgatttataaaagctctcaaatatgttattatatgcatttgtatttattaaaacaaaatgggtaaaaatttaacatatctgtgattaatcaacattaaaatataaattacaaatgtgcctcctttttagaatttctataaaacgtgggatgtgtatggctggccaattgacatatggcttttcttcttgtagctaaggagttagcagtgtatccttaaatacatgtttccaatgctgtcccttacagcacctaaaaccaggtcactcagcactgtccccagaatggatttgcaattgtttacaaatgtaatgtgtggcctctaatataccgcagctgtggctaggatttatgattttatatcactcttactgagtacagttgaggtcacctttccattgcacaatacaccttccaatataaaattagcttttatttgtatgtggttgtttcacccttaaaatataccgtataggtgtagtaataggacctgtgcaaagcatctgtggaaaaagctgactatatgccctgaaatggaggtaagaactgtttctatcattgaaggtgatccttctatggtaaaagccttagtgggctcacctttaaattttaagttggctcctcatgtccagtggcactcttgtcattgctaagtttgtgccctgttcaaaggtatctagcagaggatggaaggtgagaaactagccatactctacttacctgatactacatcctaggatgacactatattagcagtgaaaggactgtcatattgcaatttatgcttctgcaaattgggtgactttttgcattttatctgcttgaggaggcatttttaaaatttcacacctacatcaatttccacaccttcattccttactttcagcgagtcccatagtaaatctacttttacttgctttctaggctaacacctcctctgcttcttggggttcctctcagtcatgagccaagcagtttcccatatgccccactttctcacctgtgttataggagaaactttcagtcagtcccatctgaatgtaaaacttgcaattaagtgaaattatttgaggtttctggccaggctgtctagaaacaaataaactttggaatatttatttaatattaattataatgccaacttgaaaagcccatcctaaggaaatgaggaagcaacaatgaagaccaagttaaaataatctcactgacctttttcgttatctcagtatgctgcctgctcttttagtatttgtttctttattattatttgattcattgacaagtttcctaatagatttaagcttcaattttctcttctacaaaacaaggaggatcgtccccagcttataggatcaataggtaaagtaagacaatgcatgtcagtgaggaacagaacatgacacttacgaggtgctcaatatatattcattcttcttacttcccaatctgtaacgctccaacatgtatatatttgaaaatttttatttctgttaccattagtattaaaactataaataataacaaaaagagtcttacagtaataaaactcctatgaaattctcattgttgcatattccctgtggttgctgacttctttgtaaatgacttccagtggctctgagatcatcctcctttctaaatgtatttccgagtgtctagtttgtcagatatttttgattcttgcaattgccttctctacctggagaaataatagagatcagtctaagagagtaggctttgcaactagactgctttggttcaaattccacttctttctacccatttgaacttgggatggatatttaaattttctctatagattgaggataatatggtatttagacttcatattgttctaactattaaatgagatggatggaaagtgcttagtgaaatgctatgtactaaacattctcagtttgttgctgttaccatttttctacctcattcctcagaaaaacccatctgttcaattgtggaattaagtctaaactaagaaataatacttggtgtaaactaggtgacaagcatttctcaaaacatatcctatggaagaacagttaataatgttactcattaaggtttacccatatgcatactcacaccgaaaacacatatacatttgggagaaggtgaatttataaaatcacacatgtttatatatgctggatgaatttcaaatcctttaaaatgttaatgtgcattcatagattatagaggatgcagtatgtcttatactagtttagttgtgataccattttttcttctaaactatctttcataaaatgtctccgaatcttttttttaaatttctaatcttacccaatcttcttttaacaatcaggatttagtaaacttgaatctttaagataagtttgctccacttccacactcttttattactaaaaaaagcagacccaacatacgatgatagcgaaaaagctctatgggctgtgagatcattttaacttggccttcattgttgctacctcattgcttaggatggccttttcaagtgagcataataattaatatgaaatacatcaaagttttatttgtttctagatagcatggtcagaaacctcaaataattcagttaattgcaaatttcacaaaatagaaaataataatatcaaccacttaaattgtatttactatatgctgggaatttacatatattaactcgtataatttactataactcatatagtagtgcagtatttaatttttattcctacattaatttgcttaggaaaatggactctattatattaactcatgtgattctcaccaacccttttggaggatgttattttattccgattttacaggtgaaaaaaactgaatcatagagaggttaggtaatttgctgaaggtcacacactgctcttaatgtagtttttctgggtttgtacccatgaagtctgattttagaccccaggctcttaataagtacacttatgctgactttcaaaaaataatcttgaaattaaaaccataacaaaaactactagtctcaatgagcttctatggaactcaagagcaatgtcatttattaatgaaattatgacagggctaccacatatttctgtaactgagcgcagcttagaatgttccaaaagatgatattgtcaaaagagggtacacccattgttctattttggtcagttttgctgtctatgaaattctatttgacttcttgctccaatttttaacctgtagaaatgagaaaaatattgtatactgggaactgaaatggtgaagtgcagtgatctttaatcatatgaacagagttcagatttcaaattccagtaccgcagttaaccacctgcatgtctttgccattcaactggttttatgtgcagtttcttcatccataaagttaggataataggtcagctcttggacattctaaaggcttgaatttagaacattaaaaactgactgaagtaggaaagttacttgaagtaactaatgtttttctccaaaaacaaaactgtgttctgctcttttactctgctagtctgagaaaaatatggctcagaaagatacctctacctctttccactgaaatatgagagtgtgcgctcaagtaggaaagaagtagcattttttatttttatttttattttattttattattattatactttaagttttagggtacatgtgcacaacgtgcaggtttgttacatacgtatacatgtgccatgttggtgtgctgcacacattaactcgtcatttagcattaggtatatctcctaatgctatccctcccccctcccccaaccccacaaccatccctggtgtgtgatgttccccttcctgtgtccatgtgttctcattgttcaattcccacctgtgagtgagaacacgcggtgtttggttttttgtccttgcgatagtttgctgagaatgacggtttccagcttcatccatgtccctacaaaggacatgaactcatcattttttatggctccatagtattccatggtgtatatatgccacattttcttaatccagtctatcattgttggacatttggattggttccaagtctttgctattgtgaatagtgccgcaataaacatacgtgtgcatgtgtctttatagcagcatgatttataatcctttgggtatgtaccccgtaatgggatggctgggtcaaatggtatttcaagttctagatccctgaggaatcgctacaccgacttccacaatggttgaactagtttgcagtctcgccaacagtgtgaaagtgttcctacagccaatatcatactgaatggacaaaagctggaagcattccctttgaaaactggcacaacacagggatgccctctctcaccactcctattcaacatagtgttggaagttctggccagggcaatcaggcaggagaaggaaataaagggcattcaattaggaaaagaggaagtcaaattgtccctgtttgcagacgacatgattgtatatctagaaaaccccatcgtctcagcccaaaatctccttaagctgataagcaacttcagcaaagtctcaggatacaaaatcaatgtgcaaaaatcacaagcgttcttatacaccaataacagacaaacagagagccaaatcatgagtgaactcccattcacaattgcttcaaagagaataaaatacctaggaattcaacttacaagggatgtgaaggacctcttcaaggagaactacaaaacactgctcaaggaaataaaagaggatacaaacaaatggaagaacattccatgctcatgggtaggaagaatcaatgttgtgaaaatggccatactgcccaacgtaatttatagattcaatgccatcctcatcaagctaccaatgactttcttcacagaattggaaaaaactactttaaagttcatatggaaccaaaaaagagcccgcattaccaagtcaatcctaagccaaaagaacaaagctggaggcatcctgttacctgacttcaaactatactacaaggctacagtaaccaaaacagcatggtactggtaccaaaacagagatatagatcaatggaacagaacagagccctcagaaataatgctgcatatctacaactatctgatctttgacaaacctgaccaaaacaagcaatgaggaaaggattccctatttaataaatggtgctgggaaaattggctagccatatgtagaaagctgaaactggatcccttccttacatcttaaaaaaattaattcaagatggattaaagacttcagtgttagacctaaaagcataaaaaccctagaagaaaacctaggcattaccattcaggacataggcatgggcaaggacttcatgtctaaaacaccaaaagcaatggcaacaaaagccaaaattgataaatgggatctaattaaactaaagagcttctgcacagcaaaagaaactaccatcagagtgaacaggcaacctaccgaatgggagagaatttttgcaacctactcatctgacaaagggctaatatccagaatctaccatgaattcaaacaaatttacaagaaaaaaacaaaaaaccccatcaaaaagtgggcattggacatgaacagacacttctcaaaagaagacatttatgcagccaaaagacacatgaaaaaatgctcatcatcactggccatcagagaaatgcaaatcaaaaccacaatgagataccatctcacgccagttagaatggcgatcattaaaaagtcaggaaacaacaggtgctggagacgatgtggagaagtagcattttttaaacagtttctgtcagccagttagataaaaggggtgatgtatagagaatgtttcacaccactttggttgttctacagattcagttttaaaagatagctatgaaagagaattgcagatatgtatctcaatttatatcttagtaacttttcctgttctatatgtcagaccagtgcccaattctagtagtgtaccgtagaagaaataacattattgcctgtatgatatttcctccattgttcaagatggtgtttacgctcgtatgtaatcagaatggtcaatccaaactctaatgcggtaagcctactgaatattagttgtgtttcaaagtctcctcagatgtggatatagggcaaaggaatatacagaattcacatagaatgggaacagatgagttcaccccagcaatgtcaacacctaagcatgagagattggatataatggcaagagaaccactgactttttaataggaaaaagtacatatgacccttgtgctttaatatattcaatgtcagaggtctgggtagatagagataatggcagtttaaatcattcaaactattatgtatacatgtatttatccatgaagtaggatgcattttggttgtataaattaatgccattgataataactcatgtaaagagtaattatggctaattatcatgtaacacataatgactttgaagtttaactgtttcagattaatattgatatgttttgtgcattaggttaataaaatctatgcatattatctcagtcttcattattttatcaaatatcatgtttgttattcacgctgtctggtatatagagaaggcaccactgtctagtcttctgtattgaaatgcagttgttgattatgagtaatcagaagggataagactgcattcatgtcagtagggctgatctattttctgtaatgttgcattgtcagtatcagagatgacatgcaggtatgttgtggataatgcattcatagattctgaagtaaaatatggaacaactatggattcctgacaggcatttccagactcctggaaaaagtaatgaagtagtctatattatgctccatctatgggatattgggtacttttatcttatttatatttaactgtgtttttcagatttagcattgaaaaaagaaagagaatatataaagttaaatccattaaagtgaaagaatttctctactatttgaggtatcattgtgagacttcatatatacaggatttttttttgaacagcaaaatgacaaaatatctcacctatgcctctttcctctttgaaaattgtgcatagttttctattttttaaaaaaattctatgctgacaccttaaggttgtaataccccgcttagaagtttattattattgtaatgaatcctaaaacagcatataggacattttaaagtgtgagaaacctttatgtgagaatggaaaacaaatcagtaatgctaatattcttgcttttgaagtagtccacgattactaatgcataaaaacctggcacttagtgtaagagtgaaacaaggatgaaagcttttcactgttggttgtcaaaacattttttgaaattcttaggcctggaaaattagcttactgtcatcacagcagtattttgccatgagagccattattttaattccttacttcaattcctgttgagaagtcaagctctgcagcatcttgttttacataaactaaacatgattatagatatgctatgtctccatatgacagatgtgggtaatgtccgaaatgggaaataagataacgggtttctctgaacagttactctgccccatttcagaaaaaaaaaaaaaaaagaaagaaagaaaaaaaaaaccatactgttgtttatttatttctaatgattttaatgttgctctggtttcttagatctattaattaagacataaatgattgtttaggaaagaaggagcatggaattgattttcaatgccttttcttcaagtggctctatgaatctggaaaatcatgtcaaatttatattaaggacattctcttctcattcaacatccagtgactctgacttgtgagtaattttacattaaagccatcataataggtctcttaggggttggaatttactatgaatatttatatataaagaaagaaggaaaaattattttaaataaataggataaataggaggatagacagagtaaaatattaaaaccaagacagcggtcagctaatcctacaattctggaagctttaaacatatattttattttattttatttttaacgttgattttggattcaacaggtacatgtgcagatttgttatgtggatatattgcatgatgctgaggttttggggtacagatgatcctatcacccaggtagtgagcatagtaccctatagggattttttagcccactcatccacttctctctccctgctctagtagtcccccgtgtctactgttcctatctttatattcatgcatactcaatgtttagctcccatttacaagtgagaacatgcagtatttatttttctgttgctgcattaatttgcttatggtaatggtctccagctgcatccatgttactgcaaaggacacgattttgttctttttatggctgcatagtattccaagatgtatcaaattttgtttatccgatccaccatagatgggcacctgggttgattccatgtgtttgttattgtaaatggtgttgtaatgaacttatgaatacatatgtctttttgatagaacaatgtattttcctttggatatatacccagtaatgggattactaggtcaaaaagtacttttaagttctttgcgaaatctccaaacagttttccatagtggctgaactaatttggattcccaccaacagagtataagcattcccgtttttctgctgccatgccaggatctatcaattttggactttttaggaatcgccattctgactggtagtataagaaactgtcgcattgtgagtttgatttgcatttctctgataattcatcatgatgaggatttttttcatgtttgttggccatttgtatgtcatcttatgaaatgtgtctgttcctgtcttttactcattttttaatttgattatttaattttgcttgttgatttaagtttcttgtagattccagattttagacttttcttgatgcatagtttgcttatattttctctcattttgtaggttttctgtttactcttttccttttcttttcgtgtgcagaagggctttagtttaattagatcctatttttcaatttttgtttttgttgcaattgcttttggggacttgatcataaattatttgccaaagccaatgttgagacaggtatgtcctaggttttcttctagaatttttacagtttgaagttttacatctaaatcttcagtctatcttgagttaatttttgtacatggtaaaaggcaggagtccagtttcattcgtctgtatatggcgggccagttatcccagcaccattaattgaatagggagtctttttcccattgcttattttgtcaactttgttgcagatcaggtggttgtaggtatgtgactttattgctgggctctctagtctgttctgttggtctgtatgtgtgcttttgtaccaatactatgctgttttggttactatatctttatagtatagtgtaaaatcaggtaatatgatgcctcgggtttgttctttttgcataggattgacttggctatttgggctcttttttgaattttagaataatttcatttttctatttctgttgaaagtggcattgtattttgaaaggaataatgtaatattttatacaaaatttaaaatttgcagtttttgtaggacacattttggcaaataatgattacaggtaattttgaccataatataatatgacttaaaccatttccaaattttctcagcagaaatatcacatcagtgatgcttttagaggagtgtttgggggcagctgtataattaatggattggtctacaatgttctgtcaagttaggcattatcaccttttctgaattcagtgcttatatgtatgatacctaaaatttattaaggaataacagaagcatatctgcaattatatatctaaatgggcattttgctcagaaatgtgtgcttatttattgcttgacacacagcaagctagtgtttcttaggtcaatatttacatgaggcataggtggtttggtagacacagctattcccttaagttctactgtcaactttttacctcgttgcatggaactctggcagaaaatacattatatggtttcttcctttaatcattacttccttcatttttaagcttgtggacaggagtcaagtgtaggccaaaatgtacaatctcattataaaccctaagttatctatgctcatacacaccttgtactgtactactactctgaagccgaggtcatctggagtcgtcctttaaaggatccattaataatttccgggagagaaaaaggacaggttctggtaaccaacttcttttgaacttgtttcttaatgatgatgctattttttaataaactggatgcctgccttgcttctaagaaaaatgagatacatattcttatttatgaagaatatatggatttgcaatcatgatctgtaacagtcttattaataaatgaccctgctttctaacctttgcaagaaaatgtccaaatcaagattctaaaaatgtattatttggggaaacatttcctgtcgtttaattgacatgcagttgacaattccaaacaacaattattttgaactaacttgaaaatgtttagacttaagactttgtgataccaatccaaaggaacaaatatttaaaatttctattttaggaagtagtatttataatctcatttgaaatgtatatttttatatttttgacatataactctacttgctaatattttcagaacaatttaaaaatcagttttcagtactggatagttcagtaatgaattggtcagtagagggatgtattttaaatatagtaacaaaaataattaactcttctcaatgatacattttcaaataattctccttttactattgggacatcccaatcttgccagagagacataaatgattattttatgaaagaagagagttaaaagattatctcaaattatgccataattaatactagtacttgaatacctctgataatttctaaattccagttcaaatcttacatattttataatctatgcatttttaaaattgctcattaattttttcctgttaagaagtcaagctctgccattatttgttttacatataccaggtataattatggaaatgatgtatgacagcagcgactaatgtcagaaatggaaaatgaggcaacatttgcctctggacagttactctaccacatgcatgtgtgtgtgtgtgtgtgtgtgtgtgtgtgtgtgtgtgtgtatatttcatttatatacacaaatgtcctttggtgtagatttttgtaagacaaaagttaccgtttaagatattacatggtgattgatacactaatattttatagttcactaagaaaaatgctgccgatcaaaatatgtcattgattgtaatatgctattctatttctgagttaacatgtaaataagtttgcatactagattcaactaaatgtagcatgataaatcctgctttctacattaaaaaaaatcatttactttatttattctggttcttagttggtggtttttttatttatgtatactttaatcttttgggctgcaagtgagtattttgccctttaccataaaatacattaaaatacattaaaaatatgtatcaaatgaaaatatttgactaaaatcaaccaaaataaagttgttaaaatcatggtgaatggctttatttttcccagaggttttaaagaattaccattgcagattttgccctttaagaattgccatgaatcaatatacgtccctcactgcagtgtttgagacctgaataattataattctatattttgatgatcaaattctactgaatgactaaggtacttggtgaataagctagtctggctaattccacattgtctcaggttcttgatagtagaatgaataaacactaaatcataagtcagtcaaatttagatttttgacactgttgtttagaacaaccctaaaatgttttaaatatggaaagtaataagcagattttaaaaagtgaaataacagttactgggatggaaattcctgctatgctatatggatatgcttagttttagtgagaagtatattttgaactgtccataattcccagataaagcaatcaagcaatttcttatacagtcttgtagatagtgtccttcactctctgcatgtgttggaatatcttgccttatgaaaaatagatctaaataatagactatttcattaatcaccttaaattctaaatgctttcccaggatatttttaattacatcatacatttgaatcagaaggttagtagctcacacagtcaggtgtctgatggttctacccttgaactaaaagattttacaagttttctggttgccccgatgcccgtcacctagttcatttaatatatgtagagaagttagaatttggccagagtacaatctgaattccagatattgggaattatttaaattactaacttctcaatggtgactttttaaatagtagttcaattggcttggaagttataccttattctgttgtatgactcttcagtattgcctacttttagcaatatgcaggtatacttaatcacctagatcatgatcatgaaatcacagcaaatctttttaactcagtttacctcaacattattatgacattcttctaatccttcctgttgctaatcccactcaccattattacattttatggtattactacaataattcaatcttatgatagccattactgtgtcagaacatttttttacatgccatacttttttaaaacaaaaagaaggcaaaataagtctattccatatacaagatcttttgcattactaacttgtattatcataaatactatcataactaaacattttttatttttacttgggatataataaacaaaattttgcataaaatgaaattcatcattttatttctatttatttatttatttatttatttatttattttgagactgattctcattctgtcacccaggctgtgatgcttggcactatcatagctcactgcaacctcaaactcctaggcttaagcaatccttccacctcagcctcctaagtagctgggactacatgggcaccatgatgcctggctaattttttaaatctttatagagatggggtcttgtctctgatgggttcaagcttgtctctgattcctagcctcaattggtccttttctcttggcccctaaattcaccactttaaaacatacaatctattgttagtagtatattcagaaggctgtgcagccatcaccaccagaatatttccatcaccccaaaaattccagaatttttccatcacccaacaaagaaatacgatatccattcatagctaaactttagtgagtatattttgtgattagctattatgctggccagcttatgtatattacaccagactgataacatccaaagatgtagataggaaacatgtttctgtctattttataaacaaggaaactaaaataaagagagactgattagttttgctaaacgtcagtaatacttgactactgcccccacattgcagacattttgtgttcagtaaaactccagttcctttatcttcctgaagatgaaatggacctagcatcaccttcttccatatagacagaaaagagactaataaactataggactcatatctgcctttcttcatctttatacttgaagagtgtatatcttgaattttctaagaggatcctaacactaaatcatttgtcctattatctgatcataagtcagaagatgtgtacttggggtccatagacatgaaagtcttatatattgaagaattgtttctaatagaggcatattcagttctttcagcacagctggaaattccaattacattttcctatgaaaagccatggtgtttaggtaaagaagaaatttcctactggtacaatacactttggtaggtataaagttcattttgtggattgtcatgaagatataatctagcctgatgctattgcaatagaaaaagatggctgtctctaacagcaagtttgctaataatgttttttcttactacaaactagacaataaatattagttgaataagtaaattcgtgaatggatgaatacataaataagaagttgaagttgtactgtcataaagtaattcatgctaagtattgcaagcatattaggacacatacatgaaatatgcttgatttcatcttgggaaaaatttatgctttgccaaaaactagaccctgtattagtagtctgcaaaatgattatgcttacatgagaagtattacattgaatcatataaactttccataaggacaagtttacacttttagataaagaagttaccgtgatactttctattttccctcacagtaaatgtctttttgtttgtatagtggtgccaagtgcttcccataataattgttgcaatattaagcactcatattctattagtatattcagttataaaacattgaatcacccggttccaccttcaaagcaagatgaatgcttaatttcctttgggtgctctgtgaagggatgttttggagagttctcatagcactccggaagatcagttattataatattagtctcttagtgttaccagatttcttcctggtcccactctgcctgagaacactttgctcgggtttgataggaggctgtagttgtagtgatataatggataaactacactctgaaggatcaatattgagaacagaagttgcccacatcttcaatagatagtgtaaaaacatacttagcattattggaacatctagtaataatacttgtaggtattacttttatgtaaattcaaaattttagtggcttaaaattgagtcctaatgctatctttgtgccaaagtgaagatgagcatttccatttgggagaagaattttaaatataaaatgagtgcaatatgcatatgtgtatgtataaagtttagtttaagaaaagtgtaactttttgcgaagtctttattatacatattacatactacttttcagtttctaaaaaaaaaaaaactctaaaacatatttgagaaaaatcaagcattgtttgattctttgttttttgttttcttttcttaaaaatatttatcccagaaatttgtaaaaggcttatagcagattagttcaatcgtcagcaaatgatattgctgaatcctaaattaagtttgagtccttttggaagtccaaaatcacagtcttaatatttcctaaaagtggagactgctataaactttttatgtgtattaattcattaaattgtatagatcagttttatagatggatgcacatatacacaaaaggcatttaaattgtaaatagtggagcagagatttgaactcatctcctgaaatgaaagcaaattatgaaagaaaagttgcaacagcgaagttgtgtttgcatttttgtttcatttatcttaaacaagatataataatgaatggattagggagctcttcctagggctgcagttgatcctttcagcattgcctatataattagacataggacctgcacacttgaacttaaccttaatcctcacaatcaggaaggaacactttgcttgcctaaaatgaggatcacagcattaaaagtatttgtccaagtttataacagctagaaagggacagagatttcaagtcaagcacagacctatctaatgtgaaatagattcgctttccacttcataccactgagacaggcaatagtttgaactaggacttaagggactgagctccatattatgggaaattttccttcagtagcaatcacagtggctgaaaaggagaggatagttgggttgttctactgttgataaattttacggcactgtaaggaaacagactcccagacagcatagtactgatgggggatcagtcgtatactattttttatggaggatcacatctaaaattgcaaataagtctacagcgctgttacacaaatgatatatttaggatttttactattagactttgcattttcactatgaaatacacccatttttagccctcattacgtgcccccaatatgctaaaacctttatcaattcttacacatttatagtcagatcatttttaaagtgtttttcagttatcctcgcaactaatttctatatattgaattgaattggtcatatagtcattaaattgcaccaccactggttgcttaatatactgctaggattttatgttgtttttatctatttagcctcatatcatattagatttcatggatcagagactttcatagagtagggttggcagttcatcacactgccctgaaatatactgaaaaacatttaccaacgttacaggtgacctctaaggaaactgatgaggcagaatgttttacctgaaaaataaatggcaaaatgatggtttcacctacttgtgtttcacctggggagttgttgctaagcaaatagccatctttgcctttgtgcgtgtgtgtgtgtgtcatgtatgtgtctatgaatgtgtgtgatggtgatgggaggcatgcacaggcaggcgccagtattcttcctgagtctctcacttttcttctctgtgtctcatttcctgagatttagcttatgaccagcatctctttcccttttccacttacatctcttatgacatattgtgctggctggagtcttatttctcaacacaaaaagatgaaatgaccaacagaaacaaggtttctcagtgaagaactcaatctttctgtcacaggtttaggatcctgaaagctattcctattgcttaaaaatatctccagcagttataaataaatttattacctcttatattcaaaattattttggccaggttcaccatgatgtcaatgttaatcaggaacttaaaaataatcggttatcttggccccactgatgtagttttttaaaaaattctcgccacgtcagttgagaaggcgtgttgtcaaaattggtatatacttatttataaattacacaaatattatgcatataatactgtactaaatggtttttacattattttacttacacaaatagaaatattaaaagagaatgaaggagaaattcaaatattttgtaaccattcctaatgaatgttcatgtaccagcccaccatactacacacccagaggacatcctttactttaaaagacattgatatttatttctctggactacttcaaatcatgatatggtttatatctgtgcaccttcatgctatcatcctgtgtgtttttatctacgagagttgagactcctattgagatcttctatgtatgctagggtttctgtaagatttatgtattatgttctaagcatgctgtgttgaactaaataggaaccaggaaactacagcttgtgaactaaatttggtctactattgaattttgtaaataaagatgtaaacacaaccatgactgatgttttacatattatctaaggctattttcacaccacaaggcagagttgcgaagttgtgtgtcttgtaaaacctaaaaaaaaatattatttaaacttttacagaaagtgtttgttgactcccaaatgcaataatcaagtgttctttccaactagtgacacttataaggaaattaatatcaatatctaagaactccagtaaacactgccatagctactcatgcagaataatgtgtgagtgggttacaattctggcatagttataaataatatatgataaacaaaaactggtttaatcatggattttattttttcccttctatcattttattcatagtatagattcctatattttcttcagttcttctcacaatttaacagatatacagtttggcgtacctcattatttgaaagttagctatagatttccaacatagtaactaacattacagaaggatttatattatctttggagaaacaaaattttaaaatatgctttctgtacttcagaaaagatagctatgcatacaaatattatagctcatataatcactcatcattttttctaacaaaacaacacttaaaatattgtggaacattataatgtattactattttaacttatgtcacttagtacttataacctaggagatagttacaatgcctattattaactgtgtttctaaaattgggatatagaggcttaggagattttaggaagtttaaatgatctatctaaagtcacatggtcattaagtgaccaagtatgaccttgagcctagttctctattcaggtgtccccaactccagtgctgtggactagtgcagacagggactggtctgttaggaactgggccaaatagcaagaggtgagcattattgcttgagctccacctcctatcagatcagctgtggcattagattatcaaggaagcatgaactctattgtaaactgcacatgtgagggatctaggtcgcgtgctccttatgagaatctaaagcctgatgatcctcatccacccccgactcctaccatagaaaaaattatcttccacaaagctcatctctggtgccaaaaagattggtaaccactgctctagatgactgtagattactgttggctgtgagggcttcttctattgtgtcatcttccactgttaaataacctgaatttgcatttatatattaagttctcattaaaactttatgcttttattaaaatgtgttttatagacatgaatttgctgataaaaattagctcactaactgtttatccaggctttgagaagcaaatgattcagaagtatatctatttctctttacaacaagcattgtgtatcatgtcatgcccttttcatacagccacattttgaaaatctaatctgtgtatatgaaaacctacataggcattgagaatgcttaagacttataagactaggcaactgcttataaaaggacttctaatccaaatggagaccgaatttaatatgatgtaaaaagacaagctattactgtaagatatcatgtatgagtgagttagataggctctatcataagaaataataagagaacaatttctggggactaagagggtcagggaaatctttaaggatagggtatattttatagggtatagaatatcatcataaataaagaagcagagagaagaaggaaaaatgcattatagatatgggatttatttatataggttcaaaaaatcaaataagaaaattaaagagggagaaagtctttaatgttgacttttgagtctttgttgtggctgttgttttcttaaagtaagaactgtcgtttagtttccttttgaataatcatcaatgtaaacaaataatggagttttaccattgacaaccccaaaataaatctagggtgtgtgtgtgtgtgtgtgtgtgtttgtgtgtgtgtgtgtgtgtgtgtgtgtaggaggagtagaagaaaggggtgtgctttccttcctagtacagattcccttctttaataaaatactctctctctcatcatttaataaacatgaagcaacatatttagtttgtcagctgttcttaagttcatgtatttaagtgcactactagggatcaggcatcatttttgagttactttttggccttataacttctcaaatgctcaaacttgagatgcatatgaagtttctacataacttcacctctctgcctttccctctctttctttttctgtcttgtaatttgtaattcacagtacttgctaatttccagttgatagaattgtttgctgtcaaatcctgtagccatatacataaatcagtacatccacatcctacagcataatcagtgcacacgccttgtcaatgtcaaagcagcaactcttatgtaggatgattgctcttatgatatgctgtacatcttgaccgtgtttgggacatccccaagtcacaggtcaaatgtgtcaattcatttgataagtgtgaaaaaggtgatgagagataattctaaacctgtaccaactaatcaatcaaacactatgtttgcatcctttaacgtttattattctaacttaattcagtaattgattccaggaaagtagatttgtgaaattgcttagaagatctgtgctatcattgaattttggattataatgaagaggttcattttgtatggagccaacacatttgcatcttccaaaccaagtcacctacacacagatttattgttgatattttaatgaggtataacccttatattcagtccaattaaagtagaataaacttagcttctcctaaatctctctgtggcctaagtgtaaattttttagttaattacaaaacactggttatgactgtattatgctgtaaatgatcagatgagaggtgtatgactgcatcataccgtaatcaaatgattaataagcactcagctattttcatgactaagaaaaaatttaaaacccgaataaaattggtggatttagaaactccatctatttgcaacaccaaaacgtgaaaaccaatgctatttccttatatcaaaaatataataacacccctgtcttactttacccattgcttggggtgctatcacaaagcaccatagactgggtggttcataaacaacagaaatttctttcttatagttatgaaggctgaaagtctcagatcagggccctagcatggtcaggttgcggtgagggccctctcttggctggcagaaggctgtctactcactttgtagaaagacagcaagagaactgtgaaggtctcttttattagggcactaattccagttacgtgggctccaccttcatgacctaattgcctcccaaacgctccacctcctagtatcatcacactaggggttaggatatcaacatacaaaattggaggggatacaagcgttcagtccaattgtaacccccattgcctttttctttataattgattataatctttaaaacaaagtcttcaatatctaggtaactaattattgatgtgtatcagaatcttgaacaagcacactgctatattacagtagtattattttgaaagttattaacttcataatatttaaaataatgtctgtgaatttaagaattaatatttatttcaaagaattatctagaagcatgcttatttatccttatgccttaactataagatggaaatagcaggtttaaaaaaaggagaaagagaaatattcttagtagatattccatacaagttatttgggtgttataaattaagaaatattataatttactcaaatgatgtacctacagtctcttaaaataagagataattgttcctgagagtaggcaagaaacaaatatatggtcataatttattttaattatcagatgtatttgttccaatatttacgtaatgtttttagaatattcataccaataactgtatgtctcagtatgtctagcttgccagaaatttaattttcaaaatggtagctttttaatggtcaagagcataaaatagtattttatcacttctctttgcctccctagctaaggagtaggagtccctataaagaaaagaaagggagttattttcattttttgaaatatatacaatgtgtgtgataatggattttatctagcattttatattgagataaggcaaagccttttatgttaactgtactgttatttgcatgtagaacatgtttcttaatggtttcaaataaatatgagtcttctgcgaggccagggctaggagtttaagcagtttaagcttgtcacccttcacattcccaattttcttgtttcttctaatgcatttctaatttctctacttttctccttgtgtcatgattggattacagtgtagcaatgacaagtggtttgaataccaatgcctccctatcacatgtactctgcatacagtgttaacatttcacatttagtctaataaaggagatacagcattttgtcctctggtgaaattgtcattatttctatttctattttgggtttgcctgctcctgtctgattttcctttagtgtgaactgttttgctactctgtgctaccagctataatggtgatgatttgtagctagtttcctttagaggatatgctgtcaggctgttacagagagcttccttcacttatcatttaaatgtatgctgttctctttgcatttaggttttacttagaccattagtggaattttccccttcttctctatttgtgtttgttgtctcttaagttatgttctctgctgttacaaaattccttgtttattctgtccacacatttgacagtgacatgtgttgggaaggggttgtacataccaagctggaaaaaaaaaaaaaaaagcaagatttaattaccttggatactctgaagttttattcatgtatttgctgacaattattcatagcaaacatctaactatgtgcacttcatatcctttagggtcggtgacaatagacctattttgcagtagatttcagaatgactttgcatttgctgagtatacatcacaaaggtgaggaaaacgaaccttaatgtatccaaagccaactcgcagaatgactagcacgaagatttacagctgtgaaagatcttggggtttaacagatgaaacaactgaagtgagagaaatcagggttagtttcaaggtaccatatttaattcaatatcatagaattagcagcagggcctgaattaaaatccaaatctctatccttgatgcccacactcaaacatgtggcagtgcagtggcatggtgaaaaagagccatgtgaaaaacaaagggtcttgattctggagtgcctcctgcctggatgcttcaggggaggggaaaaatacagcaacaaaaacacaacaacccaggggtggcctcgggatttcattcctgccaatacatattttagtttaaaaagcgtattaccatttcttttaatgaaatccctgcatacgtggccaacagtgaatttgccatctggaagagtaaagccatcagaatagctgcaatggcacgcccgtctggatcagatcagcctagattagacagtcaggcacaaccttaacctggaaacatggagttcggaagcttgccagtaccatttttaccttcccagaatgggtatttgaaatcagcttagagggagggatagcaataaaagaatttggtctcttaagaggacattttaagttttaaaatacaggtacacccaggtgtaaaggacaaagatctgaaagttatgtgcacataattgtttaaatttcaacccaaaaaaaagaaaaagaaaaaaaagttctactcatgttaacgattgaaagtagatttaagctggataatgttcaaccagaaaagtttcagaagaaggcaaccagatggtgaggagtctgaaaaccatgtcttatatttaatgttgttaggaggaaatgtgtagggggaaaacactaaaacaatctctaaaatatttgaagaattatcacctgaaagaggaagcagacatttcacagaagaaagaataggaaacattgaatataaattcctaggaggcacattttgaaacagcaatcagaagagaactgtggagatttgttatacaggttattttatgaagttggtaaataatgattaactcactgtctgaaaagtgaaggagagactagatgaccaaacaccccctgattgggatatttaatgatgccaacaatgagtagagggctacataggattatatgggtgggttctttcttttttttttttttttttttttttagatggagtcttggtctgtcgcccaggctggagtgcagtggcatgatcttggctcactacgagctccacctcccaggttcaagcaattctccttcctcagcctcctgagtagctgggattataggggcacaccaccacacccagctaattttttttttttttttttggaagagatggggtttcaccatgttggttaggctggtctcgaacttctgacctcgcaatctgcccacctcagcctcccaaagtgctgggattacatgcgtaagccactgtgcccggccctaggtgggttctttctaaccctgagatctatgattttgcataattattggtataagatatttgattatatttagaaatgtatgtatgtttaaagattttttttctttcttattttggagttactaagttattttctaatatttctcagggtccttggaattattccatctccagccacttgtctgtagataattcattccaatcaaaattgagaatttacatatatcaattactatttttaaagtgtagaggagatacaaatatgaatgtggtgtccacaagttacttagagtatagtaatactaacattatggtaggtggattaccaaaaccagaatgaacagagaaggctatttaaaaatgccgattccactgtgcaaccttttaaaaaaaaaaaaagagagatcatgtcctttgcagcaacatggttggagctgaaggccattatcctaagtgaactaacttgagaacagaaaaacaaataccaaaggttcttacttattaagtgggagctaaatattgagtacatatggacacaaagaagggaacaacagacatgggtgcctacttgagagaggaggaacggaggacggtgaagattgaaaaattacctattggatactatgcttattacctggatagcaaaataatctgtacaccaaaccccagtgacatgcaacttatctgtataataaacctgcacatatacctctgaacctaaaagttaaaaaaagtaataaatactccaaacacagtgtttaaatacagattctgagccctaatctagctctaattttagaatctctagaggtaaatttgaaaagtacatttctaaaagcttcacaagtgaatcttaagcaaatgaattttgagaaccacaagttaggaagctagagtacatttgcatgaattactggaaatatgtgaaatctctgatacattttacagaaaagtaacatgtttagatgtggatgttagggataatgggagaaaggggtgagcaggcaaaggatgataaagtattacaaaaaaagctacaggtattgctaggttgataattcattcacataattgttacataacattttatcaagcactatgtataaggagtgggaaataaataaaatgaacgtgaagttttattcgaaccacaatttgtttggtgtctgtagtaagtctccggatgtaatgtgttttaccttcagctatggacatcagattttgttttgcaaggaaaagggaaataatgttgaagtcaggttgtacatagtgtgtaccaagctatatggctaagcaatgaaagaatcattggtgctgcaacatctactctacaaatacagcaatggtcttggtttcaaattgaccttcatgttcgtagagcaccattagctgtaatgtgcgctaggtttatttagctgtgaggaaggatataagattggaaagagagcatgtcagcgtgattttctcaaatacattttcctctggagttcttactgccatcttggcactgctccccaggcagcacaaggggcatgctcagttttaagggttgggaccccatgagtacatgatggtcacttcagcctaggcaaggctcatatatgacagcccgtgagaggagctgacagacctgctcaggggccatgctttttccaagaagcaccaaacagtgaggttaaggcttctcatttactgcatgtttttatagagttttatcatatggaccttcagggtctatatatccattcagggtcctcccagtacagatgcagtcctccagtcagagttaataagcaatgatgcctagtaacacagtttccttttcctacatttccaaagaaacagagctgaggaaggtaaatctgagaaaatcttcccacagagataaggtttacacccgctcttaaacctttctccccagctggtttttgagcagtataggatgatgagtaccgtggttcaagaagatagcttgcagcatgtacgtggaagtactggaaataaaactggagatgagggagatagaggcggcaggcagtgcaagacgtagaccctcaaacctgcactcaagaagccagagggccacatacagtactttaaatgacaaataatgggaatatgaagatgttggcagtgaaaatgggaagagggaatagatcaggtaaccattatggaggtactgaggccagaatttaataacctttgtcaggaactcaaaatagattattagtttaactgattcagggcgtactctgagtagaatatttttgctactccatggaaagaaaactgtgagtgtgaagacttctttaaagcatttatgtagaagaaaatatattcataacatatcgttatagaagatgaagcagatatcttggatagatgcttctagaaatgaaaagaacctcagcccttggttatttgaaaaattagtgtgtttaaaatttaaggtagactctaaagcttcaattttacaaagatcctggaattgtatgtctaatataataactcacttttatccagagcacaaccaattttccccctcccccccagaaaatgagagaaacaaagatgaaaaaaatgatgtattcattgagcaaatatatactgagtgccttctatgcacaaagtactgtctagacacttgtgatttatcagtgaacaaaactgattaaaatcccccataatcataacaataaatacatgatggattaatataaaatattatttatttcataaaataataaagtatataaatcaaataagttataaaaagttatatcaataacaagatgagaaatactgtggaaaatgaatgagcatgccataaagtaagtaaattactttcatagttggcttagatatgttttgaatctgttttttcacaattatcctggagactataaaaataaaatgtggaaaaaagtagatgtcaaataatgtactaagtttttgctttgtagttaataataattatgcaccttcggggggtctcatttttagcaagtaggttttcagtaataaaaatgaatgtaggttattgcaagtactcagcaaaagatacaagccttatttcactgtattttattcgttgacagaaatgaatataatccactgaaaatcttcatgtgatgcccatatcaatatttgcatcaataacttattactccatgaaatccacacagaatgaatttataaatttgggatttattcaaattttatttttctctctcttcccctatctcctcacttattgaaaggaaaggacacctaaatcgtttgactaagtaatatttctcaaaaacttctggagaaataaaaatctttcataaagaggtttagggaagcaatgcttccatcattactagaggcctgaaatggtggctatattacaacatttcagatggcttcggattgatgctatatatactgtgtgtgcttcagcagagcttatcatttccttcccactactctggtttggaaacataagctgaatgcacaacatgtgcaggaagttcacaggagcccactctttcctctaaatcagagctggtacagaggaatttctgaataacctcaaaaactggtgacattaactgctatccatgggctttagtgggatcagagaaagcatcatgaaatcaagtgaaaatagaatgtgtctgtgcattatttttttctgaaaagagcatccaaaacattaatcagatcctctaatgttctcacaccttttaaaaataataaatactactcctctgtcagctttagaagttccagagatccaaactgagccaataacaccctgagtacattgatgcatgatgagggactggaatagagccatattcttttatttctgtgtttctagacatggcagtggctttggatttggtctcacaaactgcaagctattttgcattgctgtggatattatagttatctaaacattctcaggccactataggagcctgcagagatgagaaataaagccaactggcccatggtcttaaatggcacataagcaggccaatgagaggagccaaatattgtatgatgccatgattctatccagtaaacatcggcagaattgagtaggccatttgaataactgaaattgtggtgggtatctgaaatacctccacgcaaattctgtgacagcttacacaaggtaatgtttcaccctggagcatatttatttggtgattataagcatcacagtattttatgtgcactttacctcttatcaagaatacttgaaatttctctttaattcaattttctagctatgctggtttcaaaagttatgtcagtccatacaatttataaactattaatgtatattttaagaaaattagtcactttttgaaaaatctttcaaaaattctcagaacccagtatagtagttcactcacaacagggagtagaggataaatgtgacataatctagttgaataatctggcccttgtcaataagaggcttttagttcctcaactattggcacatgtcaacgatgtagaaatgagtcattgtccaatgcatgctgatgagacctctttcctcatagtaggaagaccactggactcaaaggcaaaggaactagacaggggaactagtcaccaaccatcttccaactgccatctttcagctttgggatttttagcaaatcaaatatttctttctcttttattaactaaagtgcatgcttactgggatttatttaatttttacctaatgttatttctttattctactatcacatccagaataccgtttttcattatcatgtctctgtaggctcctcttggctgtgacagtgacagacaactttatcaactatagtatagtatttatgtgaaatttcctttgcttttagttttagagacaacattcatttccaaagttacttatggcagccccttctgctcaccctactccctttaatgagattgtttcctgaatttgtaatacagagtcttatgttacagcctgcattccatcctggtatcccacaactatatatatatcccattacagtatcataaggtaaagtttcactgccctaaaaccttgtgggcttcatctattcaacgttctcctctccactaaaccccatataaccactgatttctttactatctctatagttttacctgtcaccattttggactggtttggctcacttagcaaaatgtattaatcgatattttgtatggcttaatagctcattcattttaagttgaagtattctactctatggatataccacaatttgcttgtctattcacctactgaaggacatcttggttgcttccagtttaaggaagttattaataaaactgctataaacattttatgtggctatatattttcaaatcagtttagtaaataactagaaagtgataattggatcgtatgataagacttcatgtagctttgcagaaaactacacaactatcttccaaagtgcaccaatcagtgctctgtaaaaacgccccaatcagcgctatgtagctagcaagaggattgtaaaatgcaccaatcagtgctctgtaaaatgcaacaataagcacgatcctaaaagcagtcaattgcagggaggattggaaaaagggcactctgataggacaaaaatggaacatgggaggggacaaataaggtaataaaagctggccaccccagccagcagtggcaacccgctcatgtccccttccatgctgtggaagctgtgttctttcgaccttcacaataaatcttgttgctgctctctctttgggttcgtgccatcttgaagagctataacgctcactgcgaaggtccatggctccattcttgaagtcggcaagatcacgaacccactggaaggaaccaactctggacacactatatactcactgacaattgacatgatcagttttttattttattttattttagctactctgctagatatgtagtgatggctcattgttgctttaatttgcattcctctgatgcgaaatattgagcatattttcatatacttaacttgccacctatatcttttgcttatgttttgaatggctttattttcttattgatgagttttaagaattattgtatatttcatatacaagtatattattagatatgtaatttgcaaatatattctcccagtctatgtttaatctttttcttctcttttacagagtataattaattttaattaagtaaaccttaccaattttttcatcatttatactatgtgtgctaagtagcaaatacacaggatctcttcatttacagaatatataatttagtagataataattattttaaaaaaacgaaaaaaattgaagcaagatacagaaacatatcaacatatatcagcttgttcattttataattctcataattgtcaaggtgtatgatttctggtcattgattatctctgttttttttccctgaaactaagaatatgagtcattactcatatgcaccattcttatggtgttatacctaaacactcatcaccaaatcaagtcacataaatttttctcatgttttattctagaatttttagagttttagacttatttttagacctacaatccttgtttgagttaatttttgagttttgagttataaaagttattagctctatgtctagtttctttcctttttttgcatatagacatacacatttcagcaccatttctggtaatgattttctccactgaagtggctttactcttttttcaaagatgggttgactatatttgtgtaggtctatttctgaactctgtattctgtttcattgatatgcatgtattcttccaccaatatcccactgacttggttactgtagctctacggtaagtcttgaaatcaagtagagtgagtcatataactttgttcctcatgtccactattgttctggatatcctatgccttctccctttccacataaattttacaatcaagaatcaggttatccatatatacaaaatatcttgcttggatttgaatgaaaattgtgttagatctatattcatgtagggaaaaattgacatcttggcaatattgtttgagtcttccaatctgtaatcatgaaatctctctccatgtatttagattttctttgatttctttcatcagagttttgtagtttttcacatacagattctgtacatcatttgttaaatttataccacgtatttgatttttgtactatcataatcttttcttacatttgaaattcaaattgttcatttctcatatggaagaaagaagttgatgtttccctaattaccatttgtcctgaaacttgctgtactcacttgctcattctagggatttttgtggactcatgactctatttttttaatctacaaaataaggtaatcataatctcttcctgatagaatagcttagaaattaactgtaatatatatgatagtggccggtggagagtcttacacataataaaacttactaaatagtcattgaaaatttcattttaacaagaaacattgatgtaaagactgactgcataattttttgaaaaatcctaagcaaaatattttttctgattaaatacttctgttattaattaaaatgtaatcaaagaagtatatagtaatgtgattttatgatctccataaatgactcttttaattttattcaaatataatgttgttaatttatgcatgttttaattattcctagtgttactttctgttgcagcatttcttatgtaaagagctgaaaatctttcatagaaatgcataaattattgtgctaaatattactctcaatgctacaaagatgctgaacccaacttaaagaaattacaatctgtaattaattttattgaacaagaggtacatacaaaggttagagaaaaactttataatcctctatctttgactttgtcatttctttgaatactgtttaagtaattaagataaacagtaatgagggaatggaagagcttgaaaagctgcagggtcaaaaatggtgcaatggacaaaaaagtggacaaaacagacagtttattgcctaagccagaaaagccaacataaaaaccaatttcctctctgtgcccaactggcccatatattagtcctatgttggtaatttccacttctactgagcaagggaattaccttttttgttgttattaatctttgacattcccctgcttcacaccaaaaatttggaatcagtaggtcttggtttcaccccaagaatatgtgttttaacaataatcagtgtgttcatggcacatattttgaaatagtatcctagagcatcatttatactatgtgtgctaaatagcaaatacataggatctcttcttttatagtatatataatttagtagatattaattattttaaaaagcaggaaaaattgaagcaagatacagaaacatgtcaacacatatcagtttgttcatttcataattgtcataattgtcaaagtgtatgacttctgattcacaattatctctgttttttccctaaaactaagaatatgagtcattactcatatgcactacttctttttaattttaaaattgaaatctttttgtattggggtcaaagtcaagtctcagtggctaattatgttgagtgttaagctaactgatcaaacaccagacttgtgcaccataattctgaataactgtatctggttttgtgagagaaagaaaaagcattattttctctagagaaatcctgggagcaactccactggagctattcacaattaaaaaatggtcaggcagtttggaaaggtatgtagaggagaaaatccagctccaatagggagcctggcatagtatagcactacaaaccagcaaggggctaatgttcacagcctgattcctgcaggtgctcacactcctggaactgtaatggagtatcacaaagggaacaacttcttgtttgcactctgcttagtaatgagactcattgaccttgttgccttcttatattctgggattcttgtagtctgggttaccatctccagcctgtgtctattcagaagattgggggaaatgtcttatctcccttccctgtcagatagatggaagctgcacaatgccacagggataggcagaatgatgaaagccattttgtgaagaaaccatgggttgacacaataaaaccaagctgccagatccaaaaggctgaataggatctggcagccaaaagaggacaaagaactaattttgctgaagggcaaagattataatgataaacaaactgtttaatatggtgggaataaactgaacctgaaagaagtctgaaggcagtctacgaatgcacaggatggcttttatttcaaatattgcttattctttatggatatgtagggtgcatttaaaagggccaaaaatacaaagacaacatgtgtactaaacagagtgaaaaaaagggagagtatatttctgtgctcattcttcttggcattccactcttttttcactgttagtggccttccacctgctccaacttggaaatagaaatgctgattcagtcctagcagaggcaataggcacagagtaaaggtacatcaaaagctcttgtggttacaccagtttctaagtattaacttagagaagctgaaaaaaaaaagagggacaaatatggtttggtggttgaaaacacagtccccactattgtatacctcgcatcttcaaagtctatgttatttctgacatattcccatattacgtagatgaaattaagtagtttgtgtgtgaaagggcatggaatgtgtagcagaccaatccaaaggaccaggagagtatcactggtatcatttacactctatatcttcttcacatttttatatataaaatacttcaggatggattatcttatatgatactcaccttgaaggcaattcatataggggttattatattcattttcatgatgaaaaggccaagttcctgaaagataaaggcttttcaccaccttttccacattcggttatccagcaaatggcagatttggaatgtaagctcagatcaattattcttactctttgtctgatatgctttctcctgcaaccagttgtctttcttgtaaagcaaaaacaactctataaactcagtgttcctagatgtgttggtaatttcaatagacctgttgaatccattatttttttaccagaactggaagacctagagcgaaggaactcaggattgtatcagaaatatagaaggaaaagtttaaattgtgattcagtgtggcgctggagtcagctagcacaaaatcccaagagccatctcttcccaacttcaggttcagtaacatcacatgggtagattgaaattgaccataatgggagtatttcaccagaaaaattggcaagtgctacaatctaggctttttcatccagagagatagttattaaacatttattaggtcatcactgcatctaactcgtttgtgctgttggggtgggagatagggatatgagtaatgaataatggaaaaagcatggtctttagagtaaaaaagactttggtttgaactctagctttaccattataatggggtgaccttggccaaattacctacccttctttgcctgtaatccttcgtaagtataataatacttagctgttaataagagataataatacctcctcgcagagtctcaggattaataatcatgtatgtaagtgcaaagcagtcaattttagatgctagtattagaattgttagatatctcactgctttttatccttctgtgtctaagtttccacatgagtaaactgaaaattatgttagtgctctgtgaaagatgtataacattggaaaaacaatatctttgaaaactgatgacagttttaaaactgatgacatttcttagaatctgtaagaccctttggaaacacgtgccattataattgtagctatttactgttagtacacaatacagtaaaatatcaaatccagctaagggagagctacatttgccgaactgaagtaacaggagataaatggtactgctctcctccaaaggacctgtggatttataaattggtaggaacataggattttgattattttgttttatatgattcacaatgccaagcactgcaatcccaattttatcctggaccatccattagtacttacttggagagaatagtgccaccaacatcaccctcataagcacggccaaatgcccaagtttctttttcctgtttggagaggaatgcactctagagaacatcttctgaaacctagcctattttttttttttccagaaggacaaccaactcttacatcaaagcaacagtttagacaaggagtgagatttctgtaagatatgttttactctagcattcagagacttaagaaacacgagacagtacaaatattgtgagaatatatgagtacacatagtagtattgaaaccagcaacaatccagaagcaaaaacaagcacacaacaataaaataataaaaaatgcttttgtttagtgaaagtgtcaaagagtgtgtactgctctgagtatctcagacttagggaaatctagcatcgttttggtccttcaggcatattgcattgaagaagtttaaaggaagctgtggtgcatgccaatgtcatggagaataagctatgcagtaggaagtccccccatggaggcatgattttatgctaaaaataacagcttttgagctactccatttcagcttattccatgaaaagagctactaagtgtcatacatgttgaaatgagtcatatgtgtgattatgtatacattttttgaaacctggtaatgaaattataaataaaattataattaatagcttcaattagtgaagtggttaaagggcctctcctcaagagaaggaaccatggttgtaaatcaggaatccattgaaacgggtgttaaatttgccactgctttttttaatgcaaatagataaacatattttcaggatagtggttaaagttcagaattgtgaagctttattggtaatgataaacttgtttattgtttattcataacaataaacataacaaagtatgctttattttgcctgtgccaaaattgttgccttaaaaataaaaaaaaagtatcctgcagaattggcaaaaagaccaaccatccactaaataagccattcactttactagggacaaatatttcacttcaagttccatgtgaaatggcattttgctagaagatattagtatcaaataatctgaacatttgtgaatgataaaatttagctacttttgtgctatcttcaaaatgatgtcttaaggaaattttgcagttgcttaatttgctttgtgataccagtaacatcaaagaaatactaataaagaagaaattggttggaaatagacaccagttgtctcagcccactccccccagtataactggtcatgattgatttcctttattttcttaatcaccggaaaatacttttcttccccgtttctttgggaaaacatttaaggagcaataacagggctactaccttgctttgtttcttgactggattttgcagtccttctatctgaaccttccagctcttccacatattggttgatatttagggtttgcctttgtaactaaagcaatctgtagctaagaaaattttttaaaagaacatttcctttcaggccctagggaacacaaatgtatcagaccaaaaatttgattttatttgtactgaaaatggttgagcactataacaaaaatcaaatggtctagtggtgcaagcaaataaaataggccttctcccaagaaaaaaaataaaaaaaaagcctaatggagttcttgcttcaaagcatgaaaagtaaagccatctgaccacaacaaagctgcatggtgttttgtttttgtcaaaaattttgacttttatggggctggtggctaataacagaaagcaaccatggatccactgactaacatcgtgcaactctgcgccaactaccttgggttagagttgtcttctcaggcaataaatacatgtactggaaatgataagtttctggacctctgcaaagcatccttttctttctttctttctttctttctttctttctttctttctttctttctttctaatccaagtcacaacaaagtattaggcagaagattttatttgataatttccagagacagcgtagcaatctaggcaaggcaaattactatgtatgctttgaaacatctttttatacctagttcgatttccctggttcttaattaaatgttaaaattcaaatcactattgactgaatagactggaaattttaggaaagtcactgtggagcagtcaaatttagtgcagcattctcctttaatatgtaagacactggccaaggccataaaatagcaactctagttttcttttaagtaattcaaacaattatttatttattttataatttcaacttttattttagattcagggagtacatgtgcaagttttttttatacaagtttataacattatgctgaggtttagggtgtaaatgattctgtccctcaggttgggggtgacatatggctttggtcatatggtttttgtgggttaattgcttaatgtctctcaaatacatctccccttttgtaagagggaggatgtttgggaaataataagaccaaacatactctgagcttcttggagaggttcaggcttgtagaatttgtgatgatggtgcttaaaatgatagaccattaaccacaatcccctgatggaaaggagtttgatttcactggaagagaaaagtagatatcagagataaatatattttcctgcctccagatacatgaaataataggaagcctatatagatttgatttatagtcttctcatgtttttcatcttttttgaggtaatctgggtattagaatatctattattcaaatttagcaaacatttgttgtacagctaattaagattctagtactctgttggacattaaggttttaagttaatacagcattgtcatgcccctcaaaacaattcaccatactgtaatgcagaattaaataaaagctaacttgaggtatacagaatttttaagagaaacaaagaggaataattctggtaaagataagacagaaaaagtgaaaaaaaattgtcttttaagttacacattgaagacaaaaaaagacctaaataaatgaagaacaaaggaaggatattcattacaagctgagaaaagtactctgaaaaaaaaacagaaaatatatgaagggttagggaacacatttggtgtgtttttactattgtgttccattaatagctgtgagggaaggtttttagtcataatactggctaatagtcatgctctttgaactttgtaatttgaggactatccactgggagctagagattctgaggtgttgtttttgttttttgtttttgtttttccccagtactgctacctgcaatagatgtttcacagtccagttacctctgaactagctggtattgctacattgcaagaaatgtggagtacttttcacctaccctcatatacctcagattctatatctgaatattatagggctttcacaccgtaatttaccaaattgtgtatatttgtaatcaagtacatatgacactaatgtgttttgtattagaactgatgattcttttattacatatgcggtattctgccatagagtagctatctgttcagttcaaagatgtgaaagctaagactgaaggaagttaaaatatttccaaggtttaccaactaggtatttagatatctagatcataaaccccaagatttctctttttgctcttcataacgctttttttcttactatactatatgttattactcttttttatcaatagatactttaaatgtataattgaacccaatttgatattgacaactgatatgtatagtgggacatttatttcttaagaaaggatgagaaatgctttattttctctggtattgacagattcagttttataacttgagtagctatgtcagtatgaattggttaaaacgttgacagaagtggaacagttgaattttgctgaatttacacaattcttctttgcagaacttgaccttgttacatagaataacatattagtgtacttgctgtatttggtacagtcgattcctactgctaattaagcagaatttcactcccatgcacatgatctgcaaatgacatcaatttattggctatactaaaaattcaatatattggtgttctgtttccacagtcttttcttaacatattaattcttagggcaataaaatgttctcatggtacctacaaaataagacaaactatttcatctctctcattctcatgttgtctcaactaattcattaacagaggtaaattgggagcaagactgagtcacaggcttaaaattagtatgttgagctggcatgactcagaaattccaagatgaaagatgtttaaccataattagcctttgggaagcatgagttacatagattttcaggggaaaaaaaatgtgaaagatgttgaaatgggcaagagagagaaaaaaaatattactttcctaagtagggtacctctccctaagtgctatcggctacttaacaactctgttgtagaagaccagtttttatcttttatcttttattttcttgagactgagtttcactcttttcgcccaggctggaatacgatggagtgatcttggctaactgcaacctctgccttgcgggtttaagtgattctcctgcctcagcctaccaaatagctgtgattacaggctgctgccaccacgcccagctattttttgtatttttagtagagacggggtttcaccatgttggccaggctggttttgaactcctgaccttaggtaatcctcccaccttggcctcccaaaatgctgggattacaggcatcgagccactgcacctggctgaaaaccaataattttataaatgctccatagaaaggctaatggattgtgcttggtggaatacaattacttatcacgctgtggatagaaaagtcttacatcttatgtaaatttatttcagcatcttttaatgcctagatatatgtagttatttgagttctcctttgagctggttgtaacatcctaccaccctcctcattagtgagttgagtaaattgaaatacgattgttgaaaattgtatgagagtcacgattttagttttttattcaatcttttaacagtatcaatcaatcaatggttctcgaattctagtgtgcgttataatcccctggagggcttgttaaggcttagatcaccagactccatttccagagtttccgattcagtatttgtgggtggggcctaataatttgctgcatttctagcgagttccgggtgataataaagctgcaggtccagagactatactgttagaaccactggtataaattgtagtcacttaggctgatcattacaatccccaaaaaccttcattttacataagtgaaaagatgttcattctaacatctattccgcagccctaaactattttcagattcctctgtgaaaaagaatgtttcttgtcctttcatttttccctttctggctggataaatcagcctcttaaatttcctaatttgggcattagaaatagtggcagcttttattaaatgacatggtggggaataggaaggtatcatagaagacaatataagattcactctagactaattatgtagttaattactctagtgtgtgaacttagtcttcaaagcaatctcatttgagctgagaaaaaagctaccacagacaattatgagatgtgtgtgatgtgagaaggcgaaagagagagctgttgttggaagaacagtataaatgctaagcaatgtaatctgaaataaacataagtggaactgtgttttccctaagttatagtcttcaatgcataataggtcctttccattctatttctgtgattcatttgctcattggaacaagttatatatttttcttctttctcctttcctgttgcaggatatgcattgtctttccctattatggctgttgaacttgttatgcattttcattgttacataggagggtagcagtggagagtaacttaaatgagcaagtatttcttttctatttaaatcaaaaggaatatatcatacccttggctgaacaccatatacctgaccccaaaatgtgaccattgtttttcttttgtattctcatgttctgagagatagtcagagagaaaagaaagagagagagacagaaagagaggaaagaaagaaagcaagaagacagaaaggaagaaaggaagagagagaaagaaagaaagaaagaaagaaagaaagaaagaaagaaagaaagaaagaaagaaggaaggaaggaaggaaggaaggaaggaaagaaggaaggaagaaagaaaggaaaggaaggaaggaaggaagaaagaaagaaagaaagaaagaaaggaagaaagaaagaaagaaagaaagaaaagcaagacctgtgattggtatgctgatggtgggaaaatagaaactgaactttcaaatataatactttttaaaaagccttttgtgaacctataaaacataagataaattaaatctaatttgcatgcaatttgtcatgtatttagaggttggtggcaattaaaaatgcaatttgcttttaacactgtatttcccttttatgtacattaaaaaaatactttgacacatttctgtcatgttcatgagattacaatagtgccctctagtggacaaatgaaattatacctcatatatttgtagggttttcgtaattttacacacatgagctgacctatatttaattcaaataagaaggcagtaatgacactttgagtaggtagaaagcgttgtgttattttaacgggaaagagtttgtggatgggacaatgtatctgagtgaatttgcatttagaaagtagttttctttctccccattcttttctttccctctctttccttctattttttaaaaatattcttttaaccaataaaccttcaatttaacgttataacgcatatatgaaattgggacttgaaagctgaggacagaaatgaaatgtgttattatcatcaagtttaaggccactttaggaggttttgctttggtagacaaagctattttagcaaacacattatgcagtcgtacctccttatattctttgaatattggttgtcagggaaatagaatatcggaagcatctaacctagaaattcataaagattttttcattggttgatagtcaacactaatattagaaggagtaaaaatatctgtgcaatataataatcttacttacatttttatctctgaatgcagcaatattttgagaataacatttttgccattgtcattccaattatgtgctaatgaagcatatttattttgaattttccaaagtaaccttattttccatactcttaaaatatccacaggtaaagcttagtgttttttttttaatttcttaaatattttattattgttctcaaccaataagatatttttatgtttatgacgcttacaaattaaaaacgatttgagatgtagtaatttgttaatcctcatatctaattttgtatctatagctaaaatatgagaaaaagaaatagagaaaataataaaagacaagagttttacaatctgttcaaatgctaagcacctaaattctctaattcaaagtaaggtcatagtccataaataaaacctctttctcttgagcctttaatatataccaaagtatgctggcaagaagtaaactacaccctaagtgatttacccctttgcatattactgtaagaaatggttagtaccagcaactgccttgtaaaatagaatggtccaatggatgctgcaattgtgactgtggcctcccaggaatacaggttgccatatgtttctcttaaatttacccgaggttgctatgcaaatccttgaggagaagcccatgagtattgcgcaacatggaagttgtaaatattggctgaactgctgagcaggagtatgtgaagaacatgtctaaactaatccccttttccagttcaggctcactcttgagactcagctggcactaaaataatcttaaatttgaacttactgcttcaggccaacacataatgctgttagcaagggagacgagactgaagtagttgcctctacacattctcactgatccactttcatggaattttgtcaaattcaacttagcatgtacatacatgttcaaagtaaatgaatttatttatatattttattttgttggttttaaaaaagctccaatactgagacaaaaaaagaaattctacctatttcagagaaccagatattatcctatgtgctgtctcagttaaggttattttatttcaaacgatagaaacaaagcaacaggcatgttaaatatttacaactaaaatgtggtgcataactccaaaattggaaaaaaacaatggtgcctatccagcgcctgggaaatataggtgctgtgactgagcaggggatgtcagtattgcaaacttatggaccttcttttgaatgttccattaaataactcaatatgagaagctattgtctctggaaatgttttaaattcccataagagagaatctaattggcccatattgcatcaaacactaccaccttagtctaatcctcatgactcagttgatagcaggatccatgatattcaggttcatggtatcaatcttaaagaaagaaattgaggcaaaattaacataagtagagagtttatttgggataacttgaagattgtaacctgggagcatagatttaaattgtctggagtatacattttgataagtagcaattgcaagtggtttttttaaagggaagtgagggccaattcttgagttgtttaccaagaatttacattaaaataacatagctatcgattggctatacattgttaaactataacatatgggttgcagtgtctggtgtggcattactaggttaacttatagttacttgtgttaatatcaagcagttttaagatgtgaatacataactcaaaagggggagaataagacatgagtttttgttttgttttctcaatgagaatcactagaacgaaggtaatggaaaagagataccttcacaggagagaaagggtgttgagtagccaaaacaatcaaacatttattacatttccactcttgtcttctcagcactacacacatacccgtatactggcattttaagaatactctcctttaacaaaatgcaatcatcttacgtgttacccaaaataaactctccctttccaaaacagactaaagtcattcttatttaatatccatgtcactgtcatgagccagtggtgtgcttcttcaagtcctgaattattccactactcactttttttttgttttttttttgtttttttttgagacggagtctcactctgttgcccaggctggagggcagttgtatgatctcctctcactgcaacctctgtctcctggttcaagcaactcccctccctcagattcccaagtagctgggactacagacacgtgcaccacgcccagctaatttttttgtattttagtagagatggggtttcaccatgttggtcaggatggtctgtaactcctgacctcgtgatccacccgccttgacctcccaagtgctgggattacaggcgtgagccacactacttaccttttaatcttactgatattaagcaacttacgaagaatactccaaatgtttagggaggatttttttcttctttaatgtccttaggtctatgaaagaaagagtgcgaatgtttggaagtttacttcaactgatgctggtacaaaacagctaatgctgctgttaaactctgggcttctttccataccctggtggcttttcacctcctcaacatctttgtgactatttccttcattaaatttcctctgttaaattatctttcatggcctttgtgatcctgactatactcagactgatagtagtgcaccagtagtttactatgtttgtagataatgtttgatatcaatgcaaatgtgcagattctttataaatattgtacagccttccagaactttatgattcacagccacagcatctcagaaatgataaattaaatccaggaaaatttaggagaaccatccaaggttagatatttggggaataagatgggactaggaaccagctttgctgacttgcaatttggtatcctttaatttctactttgccttgtatttatgaacattatatttctgcttatgtttacaattctctacttgatacaaattcacctatttttataaccaaaaataacaatcccaaagtgaatatgtaggcagaattttcaaggttgaacaatttataaattttaagatggattgtctgcaagtccctgcttctgtgcaataaataatactcaagtgacctgtaagagttaatacagcttgcaaaagagcttaatttattcccatgatataacccatacatagggagaatgtggctcattaaattcctttcaatgactcccggtagagaagtttgtttttggatcaatattatgcccctcttgacttaactgaatcacagttactcttgggaacatgctagcttttacttttggatgtgggcctctttgcaaagatggatattgttcctatggttattcataattctgttttaaaagcaaactgacttactattaaaaacactaaggcgatttaaaaacaaagaacagagtaaaatgtttgtttttttaattaaatacaaaataaaaagactgacttctttattcaatagtttttttttttctttccagcagctaataaaagaggttatcctcctgtgggtatcttttattgatactttttgcacctgaagaaaggtgcatcttcagaaagtcagattttttaatagacacttttttttttttttgagatggagtctctctctgtcacccaggttggaatgcagtggcgtgatctcagctcactgcaatctccgcctcccaggtttaagcaattatcctgcctcagcctgctgactagctgggataacaggcacatgccaccatgtctacctaatttttgtatttttagtagagacagtgctttaccatgttggtcaggctggtctcaaactcctgacctcatggtccgctcacctcggcctccccaagtgctagaattacaggtgtgagccactgcgcccggctctttaatgacatattcttaagaagtactttcagaaatcatagactacagtgcagaaacaagtgtgcttcattagatgctactttatcttatttctctttccttcacattaatcagatgttgcagtaagtacacacacactcatttatacattatacatttatatatatatacacacacataatgtatacatttgtatatacataatgtataatgtatacattatacattatatttatatataatgttcctctggacttaactgaatcacaatttctcttgggaacatgctagctttttcttctgggtgcagccctctttgcaaagatgggtattgttcctatggttattcataattcagtatatatacacatactgcaaaataaaactgtgtttaatgatgttggacagttgaatgaaatctcagatattgtgataattgcccccatatatcataatgaagtgattaagagtgaggaccctaaagtcagattcctgtgtttaaatcctggatcgaccatttgctagatttgtggcctcaggaaagctattttgagtttccaagtctcagtttccttatctatatactgagcttaaaaatagtaactactccattagaacacagatgagaggactaaattaagtgaaagagtatatggaaaatgtctcctattcgtaagtattcaatggatagtaactatatttatcatgccgatctttgtaaactccattactttaaatacacaagtagaagatcattagtatagtgagtgtcaaagaaaagtcgcaccagaccagtaaagcaggcaagtgtcttggtcagcatgtatttctataacaaaataccatgtactaggtggcgtaaacaatagacatttatttcttagggtctggagggtggaaagtcaaagatcaaagattaggaagattcaattcctggtgaaggccctcttcaacttgcagagggccaccttcttgctgggtcctcacatggcagagagatagaaaaagagagggaaagagagaaaacactgatctttctttctttttttctttcttttaatatggacacgaatcccatgatgaagacccagcactcatgacatcgtctaaacctaattatctcctaaagaccccacccccaaataccatcacacagggtatgaggacttcaacatatggattttgaggggacaaaaacattcagtttataagggccaggatgactttctttaagactattccagtaggaaaaagactgtattcaactttactaaaacaaaaggtaggaggatttttaaatgcttgctgacattagtgaaagcctggtcagtgtgattaggccacctgtgtttgctaattcctgcatattgaagttagactcctactctcccagtgaaacagaaaaacaggggccctatcttgataccatttcaaaggaatggctcccacgtccttgaaaaagacctttctgggttgtgggagattcacatctcaaaaggtccaggaaaggatttacaattacaagttttctaaagtaagtgctctaagaaaatggacagcaggggaattagttagaaggaagcctttctacagtgtagtcaactaagggaaactttaagggcatcttggttctaggcaaatattaatatcctagcaatcccatctttaaaaacaaatcttgcaaattttatagattatgtagtcctcatgaatgagagacgcataaaatttctctgctggtatctgttattgcctcttcaaattacagatattataaatacaaatagtatctatagtttattaagcacaatatcatttgtgtcattaccacatatctgtcaaatattttgtttccatcattggccattggggattttttgttatgattctgactagttttaaatagagtagacaggtgacaagtttttatatttggaaagtttaataaacaaagaaaatatttgaatcaaagttttaaagtcgcagggtgtggtggctcatgcctgtaatcccagtgctttgggatgctgaggtgggtgtatcacttgaggtcaggagttcaaaaccagcctggccaacatgatgaaacctcgtctttactaaaaacacaaaaattagccgggtgtgttggcgtacacctgtaatccccgctactcagtaggatgaggcacgagactctcttgaacccgtgaggcggaggttgcagtgagccaagatcataccacttaactccagcctgggctacagagtgagactgttgccaaaaaaaaagttgcgaagtcatcctatgtcctatacagaatgaagacagaactaatatcatagctttctagtatcttcataaattagaatggtaaaatgtatcaagcattctgtgatgattacaagatacaagatattgcctgaaaacctcaatgagctataaagagttgccagggttcaactgctgttcatttatgaggtcattgtttcttgatgggattcattatctatagtaggtataggaatatatgcttccagtatttacccactgagaagatccatagctttttcttctctctgtagttacaatacatcacatttcacgttcctcatgaaatatttaaactcctgaccaaatgcctcagtcaagttccctcacttgtaaaacctactgatatccatgaggggcaaaaactcagactacctcatcttggaatactaagaacaaaagagaatatgattgcagaaataaggcattgggcttctttgtgttttctaattgttgcagctaaaatattaaacttcaaacagctttcaatgcttattgtacacttaaaagtcaggtcatctttgtttattaacaataaatcatccttttaagcatacatggatcataagtcaatctttctggaatttcatgtagttaatctctatattttgcttacatcagcatctcaagggcaaaacatttgccttatctattttcctcatgagaaaatgtattaatatgacatatatgtttgttcattatatgcattatgcacatcttacattagaatgccacttagatagttatttacaagtaaatacatgtaaagaattattgaaatataatataaaaaatatactcttcacagtgagttcctgatatttaatgtagtaactggtacagagtaaatgttaagtatgtctttgccataggaatggaggtgagatgggaaatagagagggaaaggtaaaaagaaagaatgagtagagtagatgaatagttggatagatggatacattttgaagaaagaaagaatttcgatagaaagaagaaagtttgtgatgtttcaggaggaaaagcatagactttgaatgagaaactcatgtttgagcctggatcttttttagctgtgtgaccttagccttagttttacacctgtaaaaaaatataaatagagatggtaataaccatctcatgtgttttcagaattaaatcagagaatgtgtgaaaaatacccagttttacaatacctgaaatataataggtgctccataaatgtcagtttctccttttttgcatagcttggcctgattttaccttaaaggcaggtttctcagtattttcaagttacagttgaacagatgatttgaaggtggggaatgacacaattccaactcttagcacatctccctcctgtgctgcttcttttgggagtttgccactaagcaggcgccttttttaacctcagtgtttgaatgagctcatccttagagaaagtttccttcttgtactctactttattctgttagtaggcagtattgatttgtaaaggcaggtgaagcagcccttgaggcatatgatggtgctatatgaagatcagattacaatgtaaataataacagtttgtgatcagcctgggaaacatggtgaaaatctgtcactacaaaaaatagaaaaatagctgagcatggtggcacctgcctgtggtcccagctactcggaagcctgagacaggaggtttgcttgagcccaggaggttgacactgcaatgagctgtgatcacaacactgtactccagcctgggtaacagagcaaaaccttgtctcaaaaacaaaaacaaaaagagaggagcctaaataattaattaagtaaaacatgtggttgctgtggtatatttttaactaatatgtgaatttgaaaattaaatttgtgtagcatttcttatctgaataaaaagagaattaaaacataaccatatttgaaagagaagagtaattgtgtccgtcgaagaagataatattcttttttgactacagaaaaggggtacagggtgcctggcacagaagaagcaatacaccattccttgacataagaatgttctcactcacaggtgggaattgaacaatgagaacacatggacacaggaaggggaacatcacacaccggggactgttgtggggtggggggagtggggagggatagcattaggagatatacctaatgctaaatgacgagttaatgggtgcagcacaccaacatggcacacgtatacatatgtaacaaacctgcatgttgtgcacatgaaccctaaaacttaaagtataataataataaaatgtaaaaaaactgaaaaaaaagattgtaatatcacagatatcatggaggaaaaaactggagatgactaacagcaggagaagaggaattaaaatgtgctagctgcaagagggctcacagtaggagaagaatgagtactggttactatttctaatactttaaaaaatagtactgagcaataattaccaaatgatagctaagtcatgttttcccgaaacaactcttttcttcaaaattatggatattcttttctttttcttctctaacatacaaaatgagccctttgcttaaaaataaaaatgacttcattctatgcttgtagaaagtaatatattaggtacccagaattcagtggcttctgcatttttttcttttttatgtgggtgtcaaatctgttgtgagaatataacaacttttattatgcttaaagtacatttagcatagcatgggataatatatattttacactatttaggaagttttaatatttatgaaaaataagcattacatatgcttacccttttcacaatgtttaaacaggaaagtgaatcaacatttgattttatgtaattttctaatagatagttagatagagaattaatttttggagtccagtatgtatggagacccacaactcacccaaaattggacaggaaatttagggttaagaatgaaagatacgataaaataaaataaggtaaggatatacatttgggagagttccatggatatttgtcttattgttggtttattagataatcatttactgaaaatacaattttacatattttgaacatttccttaagttttgttagttttattgccccaaatcaagttagagttagtttttaaattgacatagtctttttttttttttttttttttttttttttttgagacagactctctctttattgcccaggctggagtgcagtggcactatttcggctcactgcaacctccacctcctgggttcaagcaattctcctgcctcagcctcccaagtagctgggactacagacgcgcgccaccacgcctggctagtttttttgtatttttagtaaagatgatgtttcaccatattggccaggctggtctccaactcctgaccttgtgatcagccctcctcagcctcccaaagtgctaggattacagggtgagccaccgagcccggccgagtcataatttctttaaggtcattgcatcagcctgcaagtatggccaagcacatccccacctactgcccctgaaacataattgctttgtcttcctcttttcttagtcaccctcattcttggggatctgctcaggccccatgccacaatcttctctaattcccattggtcctttaattcgacagatatttattttgaacctattattccaggtgctggtaatagggaatggcactaacagatgagatctcaggcttcacagaaccttcttcctgatgaaaaagtaaataagcacataaaaaagtttgtgataagtgctatgattagattgtgataaatgacaaaataattgactagattctgagacaggtcatgctaccctacaatgaaacttgactaactgtctcacaccaaagtcccttgtcaggtgtaaatgttttgctattttagataagtacaaggacttggcctacaagcatttctactcatcaagcatgaagttgtcactagaatatttacaggtagcactgctataaaggttttatttaaaaatatttgaaataaaatcagccctacttggtatacactcgtctttctttactgaagattcttataaactgcagagcattactgttggaaaactatgaatatccctcacatagtatatatagcaaattaactttctcttcaaaagattcccttataactttattaacaatgacctcaaatcttttgcagcattacatcactggatgtaaaaaagggaaactgacttgaagtggaaaaaggaacagatggcaaagtgtgttctacacacatatagaagggtttttttttttcttttctttctttctttctttctttctttcttttttttttttaaccagagaagctgcttctccttttaatccagttcagtatgttctaaagaagctactatttctgaaagtattgaagatgcagggccagtttctaagtatggacccacaagaagcaggaaaataatgatgtatgttaaatgtctgtcctggaaaaatgaggaggctgcgctagatgattgcagggatcccttccagcctgaacactccatgcctcctttttccgcaaacgccacattgaagtggtatcagtgtctgctctagctgccaattgacatcactgctttttttctctaatgctctgcttttctcatttcttttatgccacttacattttaaacatctccatcttttttctcaaacctcatctttatccagttcaaggactgcagctctcttttgctcttgaactacccgagtgtcagggctcctccctaatcactcaaataccttataattccaggcatcctaatcctgcgtaatcatcctaccaccacctttctgctctttctgcttgctaaatttgactctgttaaaattcagatatctttggggagtttaccatttaagttactatgaattgttagcattttagtgaaagaaacacttgataataggatttgttttggggaagggtgggagttgatggtcaacgttagttttctgggttgataaggagctaagaggattaaatatatgaatgaaaagttataggaaactactttccttgccttgcatgctgaggtcataaatcctacctcctcgaagatttttttcccccagcagtttctagagtggttttagagtattaatgaaattagtagtaaaaaatatgggaatctatcactggaagagtagggattaaagatatgtaataaaactggaaaccaaaatgaatcagtgaatataaaaacaagtagacagctggaatgaatccagatagcaatggtcagaagcacaggtcaaagattatataagaagccagtacccagcatttacaccgaagttgaaggtcaccatgaaatcatgggtataaacaatataaggggtcagtaagcagacctgaagtactgggggctagtgagtcttgagtacttattgaccagaactgaaacagagatcgaagtaagaatttaagaagaaaaggttagcaaggcagaacaaggagtacaaaggacatgagggctgaggttaagacaagcaataaagcaatgcagaagatcaaggaactagtccctgctagatgctagaaaaccaggcaataaaaatgtggcaaatatctgtctcacgtaggaaaccttgtatatgttttctgctttgcagcgagaaatagatggctggattcaagagcagagctagcatacaactcagagacagctaatgcttatttaggaaactggaaagttcactctgttataatgggaactatcagaaatgaggattatttggtaatcctgttggaaagacaggaaaagaaatagagtaaggtgggtagtgagaggagctaatatttctgtgctaggctttttacctctattagcccatttaaccacacttgcaccaattttgagaagttagtagttgtctttggtagatgaaataattatgtctgagtcaaattaaatgaattgcctatggtcacccacctgatttttcaaggaagtaaacaaattaacactgtgagaataaaacttaatttcccagtgttttcctattgcagtgatgcaccataagaaaaaatgaaatttcaatgtttacatagttatagagtcaacacaaattttggcaggggtataaatgttggagccatagaggtgggaacaaaaaagtatgtgggcagtgttgaaacaaaagttgagggatgctaaattgcaaacacaaggaagatattttccttggctacattttgtagagcctgatttgctcttcagaattttatttattcaaactaataaaatgaaataaataattgtaacatatatctaacaatcattgtgtgttcagcaaatgccagatatgctaaaatatctacaggcattatcacacaagcacacacacacacgcacacacacacacacacacacacacagttagttgattttatcttcattttacctatgaggaaactaaaatatagatagattaggatacaatcctagatcaatatatttattaaaggtttggagcagagatttgcacaccagtgccactccttcatattgtagtcttcaaacattgtaattttatgttcacaaaataataattttaacttacgtatgctataggtggaaatattcaaactataggtgagctgactcttaaaaatcattctttgtcatacaagatagaaaaagatgtttatgtagtaaaacactcatgggaacaaaatgtccttggcatttaaaattgaatatacaatttccatgcatatttgatctacttattatcaataaaatatttcactttggatgtctgtaattgttgttcactgagtgtgcaaaacacatttttatatgacaggtgtcgtgatgttttgagactagctcagttttcgtggtatttccatttttaaacaaggaaggcatttgcctaaactaacttgtcttcactatagaaatattattcagaataacagcatatacttgtgaatctttattaattgagtgaggaatattaattgctctctgagtgcaatcatccatcttatcatttcaagtaagtggtccatgtttaattgaatgtatttttctctaaaacaaaccattgcatagttgcaagtaaataacatctatatttagatatgccttgttttgtgagaaacattgaagcatccgaggcaacttctgataatctttaatatttttcattctgtttttcagagtgacatgtgcctagaaaaatcaatgtagggaattttgaaaaataattttttaaaggtaaaaaaagattacaggattagttttggttttaaacgtccatatttttctaaatccctgaaacaactttgaatattgtggctataatttaagtttctcaaattcctcagtgaactataagaaatttttctaagataaaatgttagaagttcaaagatgcagttgtgttttacccagggaaatcttaaaaattgtatggataactgagaaaataattagataaagcagaatataatattgaaattatctctaatgctttgtacttttgtgtgtttatctattgtcactaatgaagtcatctggaaaagccgcttaatgatgatttgttagtaatgtgtgcaaagtagttgatcattagcaaaatccagctgctagaatatttctgtatatcaaattaaaggaaggtattattttgtagcttatcatgcctcatattttctagtttaacaataagtattaaaaatgccatctttcttggatttagaaacaaaaaggaccattgatagatttatatttagttttaattgacgattttccccaatattatagaaaattgaaaacatcatgaggtatcatacaattgtgattcttaacacagaataaatgcagctagctccttttaaaaaaatcatttgatgaaaataaatgtttctgatacaacagcacagactagtggcaaagcatttgtagcaaacgtttgctttgttatgagatatgttatctgaggtagtcatctttatatattatggaattatatcaaataagctatatatttaaaataggaatgattatcatacagtatggttttgtggatcttaagagtatattagctaaatgtattttattcattccattttacatttactccaaataacctagaaattattctcaaaatgatagctgaaacatatacacctaaaggcagatagtgaatataaaaaatatcttattgtttagatggatacttctgaggtcacatttgttgttttaaagttgcaatataaacaatccttgataatcaaggctatttttcattcagattaagtacagatatagaaaatacggtagccactttatacagatgctaatttgcttgtcccaagactttcaatttatatgaattcagttctatgtcactgttctaatatgtaaacattattttcccattttaagtgttttgctaattgttaaaatgtttttccaaaaaaatattatttttatttaagaaacttctgaacaaatttgcctgttaataaagggatactactttggccaaagaaaagttaaaatagatattttctgaactgtctgctaataattcaaatttaaaaacaggatgagcaaattagttcatagatgattaccagacctcattttgacctctgaatcttgaataaatgttctttcccaaaatacatagtgagcaatttctgcattgactatgcataccatctggaacagcatagagagtagcctctatatgctgcaatatgaaagagattctggaactgtaattattagttgactctcattgaaatgactcataaactgatagtgaaagggagagataatattgaattgtcccaaaatgtcagtgtaatggatactgagcccatgataactaaaatcatgtcttgtctattccaatgaagttgcaaaatctatcccatagcttctgaaggtttgtgctgctgtgtgattataataataacaattttaatttgggttccagtctcagctctattacttactctctctgaaaacttcagaaaacttcccagcctccctgagctttaatttcttagtctgtgtattgtgtatgatattaatgatctaatatggttctagcgacaattaaatgagataatgtttgagaacactgagaaatgaaaaatgagagcaaattatttgataattctcaaatctagattccctgtatttgtggctactttgtacatttgttcagatagcaatgattttaacacctctgtttgttctctttttatgaagaaatataactatcaactaagtctgatccaatttttacatctgaaaacatattatcctggggtatagagccagcacagtaaatcagaacaaaggcttcatcgctgaacaatttttaaatataaagaaaaatttagtagcataatttatatcctctaaaatttgatgataatctattatgtcctctgtattattcaatcagaaagtattattttagagaaaaactcatagaccttattctcttactcatgttgaaaatactcagaaacacaattatagggagaatatccattctacacattcacagttccagtgaattatagatgtcttcaacagtagatggccagggtgttgaacaagaaacaacttcccctggtatctttcatgacattcctgagacagacctcctctctctcatgttagaccctctacaaagggaacttgaaggctctaaatatttgttacaaattctgagcttttgtctctgtgttacaaataataaaaaatagccagtaatcagaatagaagagttaatataaatcacaattctcacagcttatgatcaaaatacttgttttggaactgcaagtcattttgtatactcactaatttggatatttatcttactaaagataaaatagactttggaattttgcagctgtgtgcaggtagatcctacatgaaataatcaagggatgattctgcagcaccagtggcttcatccttacctagaatgtctccttggcaacatcatatttcttcttgtttctttatatcattttgatctttaggtgtgaaccatcatctcaccttttttgcatcataaaacactctgaattgtggacctaaactataaaacatcttagaaaaatgtacatatgcacctcacacaaaattttacagacagttttagaaggctcataggaactccaaatttacctctgaatcccatagagtttcattgagagaaggcaaagatctctaagctataggattttactcctttaccaggagtaatagccagcctttgttttctgcaatactccccatagataaaacatcacatttaaagagagggctttatagttggaatatgaaaatggctttctttatcaagcatcattttgatctctaagtaaagcaatggatatgctacctttcaaacccatgtgattttattcactttgattatttaactaataagatactagttttacatataaattgcaggttttataaaaactgatgcctaagtgtatcagagaggcaatatcacatttgtatttttaattcacaaccagaaaacattttattttctatagctttgtgtctttagagctttattatatcctagagattacctgctcttactgccctctgtttgtgtagatgagaaatttaattcagaaatatccaatgaatgactacatttgatttgtgttagaactcagattagaactcaagtattctcagttaaaattcagtgttctttctttactgatctcttagattaaactcttcaactgtttacatgttatagggattcaaagactttttcacaaatacattcatattaggtaaagaaataatttcctggaaattttctttccatttgcaataaattattgtcaagatttttaaaattctggataattacttgtcatttagatttatttgaatgaggtctggtggggaaaaggacagtgtatgctagtgttggtgccaagctacacctaccaatgtagccttcagtctttctatttgcatctccctcatctggtggtcctccaattttctcagttctttgtattttaccttccacaatcagcatcatctctgtcagtttcttcaccaacactaatgtgttagtagtcctgctagtagctctgcttgttacctttcctgagggtaactgcatcttaataaggatcccagcatatggcaatagtctaaaagtgctgagggtggaattctaccctagagcagggctagcagaattctgggttctcaggaaatggtctggacaggtaggtttcttttctgcagctctatagagctacctttgtgtaagttggcaatctatggtgctttaatagattgcatttaatagattaatctactttgaggattcatctctgagtcttctatctccgcatgcctctttttgctgattcctcagaactgcataatagtatggcagaaatggaacaaattttaaattacacatagagaaatgacccctgtggcagctgaacaggtgaaaagggggttaaatttgctcttatcttttatatgcctacagggccttatttgccagtgtttaaatctctggaaaaaagcagtcgaaagttttagcattttgctacctctgctgctgtgttcccacaggggcagtgccctatttcttaacattattcattgtcattctgcttccaaacagcaatacttctgaggacgattgtgtagtactgcagatgctgctttacttcagctaggaatacattccagaaattctgtcactgaagatgtgcttctaaggaggatgttattttgccatgagcagatgagatcatatgttatatttaggattcacagggaaggcaactcctaatgggatacagcatagatctaaagtttatatcttatttaagttacattaactttaagaaatgaattttttctttgtccaaagcaatgcaattttgtaaaagtgcttaatcattttctgtatatgattgtgcaaagaaaattataatttcagtaaaattaaataagttagtgacattttcataacattgatacctagactgatgagattttttatgtttcttgctcatattacactttttaaatgaatctagtaaagtctctaatataacaaggtaattgaaggattttgcaccttctccactccttgattttatacagtagaaaataaaaaaaaaattgaaatagttgctctaaaacataatatgcttatttcagtagtcctatcttattttaggtccttaaaaagtgggttattgacctactcagaaaactactttctgtaaataagatctaaaagtctgtttctttttaggccttattttcctagaaatcagttccactgaatttcacatttctatttatttactttctagcacattcaaaataaaaattgaaacctcttcaaggatatagtcagtctttcacataatttcaaactacctcaatatacaactacacatgtctcaaatgacaaatttttgtgtgggcatgaaaaaacaaaatatcatttacaatagttatatttaaaagctgttttctttcactactgcataatgtgcttttgtgagttgtttaaatatatttttcttttagagaaagcatatgcttttatgaaaaattatgtttttacattcttgtttttcaaaaacagtgaaatacatttactttaagcaaatgaaaaacatttaaaaatgtatcactcttcaaaacaacaaatagaaattgtgaaagaaaaagcagtctcacccacattacagtaaatttggttagcaagagggtggagttgcccaataatagctcttaagcagattatctaattttcaaatagcacatattgcactttgtgtgaaactgagatggaagaacacatttcaatttgataaagtacctttaaaagtgaggtttatcagtgctcaatttaattttgcatttaatacatttttactagattctttcattgtttctctctcatttttaaaagaatcttttcttgctagggaagaaaatgtttaagccattttagcccatgaccactgatttaggaagaagttaactatgtgagttccataaacaagtctgcagaaaccaaatatagcctctcgttgctaagtagcttgctgctgattctccctacatagctggatagtctgttgagaggatcactaatggttatttggaaaaacaagggtgaataagcagtgattgcatcccacactcagggtagtggcaattaggttatagtaatttggctgcctgtataattggaattctcagtatgtagtttgggcagaagcacatctgctcctcgtaccccttattaggtgtatctaaaatgtttcgaccgattgttgaatgtgctggatggctatccatttattcaaagctacatccagcatgcataaaaactgtcagtgttcctaattcaataacatcaaacgacaacaaaatgggaagacttttgggttctctggtcaacagcacattcatttttatgaatccgtttaaccaaaaaaagcttgctcaccttacttctttctctaatttgagcttatttttctagatagagtattacctaccaaacactgattttgctgctgtctttcactattttcattccagtcctatcctcactttgcagcaaagccatgcattgctgaaaacaacgtgcatgcctttgaaattctgactgctatgcccttgaactaaaggcaatttaggagaatggcatttaagcttctgaatattttccttagaaattagaataattaaaattgtgaagctcaaattttaaatcatagatgtctcatattctttgtttgccaaacagacataatattgttttattgattgttttcatctttaaattttgtcctctctatgattcacatgatgataccaaagcagtcgtatccaatttgataaatatatctcaatcagaaggggttaaagcagaataataaaaaaaagtcttagaattcatgtagtacaatcatacccctttgtttttttttcccccagaaaagaaaactgagggccatacttagtgactttccttagaacacagatagctaggacattttaacccaggagttttagttcataagctaagtgttctttatataaggaaaatgtttttcaggtggaaattaaagtgtgtttgaatacatagtagtaatctagcttacttgtgtaactttcaccattttaattgcaacttctattgtatatatgtaaacatacacagataatagagatttatataccttacattttggtcgagaaaactcatataggtcctttttcctcaaaactttattttgacatagcattcaaataattggctatagggacatggacaattgggatttttcagtctttacctgacaaataaattatggtctttctttgtattcattttctgttgattcaaattaaagttttaaattgtcacagtagaaataggatgatcacttttatttcataatttttgtagatgatttcaagtttttcaggaattcaattataattttgatgatttgaatttaattctataggaaattgagttatagggataggaagagttttgtgaacaacaaacctacgtacatgcctgtacatctttttcatgtagccaattaaaaactaagatggcatttagggtaacttttttcatagtcatacatttttgtacctagactcactgtaagcaacaaaagaataaagtgtttggaatcaaggtcagagattaaagtttatcgtcagcgttagaggctagtgtaaagggcaataattgttaaaacaatctgggagagaaatgaggatataaaccaaggtcagggccatagggattgaggggagggaatagatacaataataatacaacattttatacccataatctagagaactaagtgattacagttctctgagaatagatgaataaaagaaaaatataaagtgagtccaaattatctgatttgtgcaactgggcaaatattttcaaggtgtaatgttgaagtgtgcaggcagtctgttcaggtcccaactctaataattattagctgtgtgaattcaggcaagtaactttacctctttgaggatcagttctgtgattttcaaaatggtgataatattagtatctccaatatgaggttgtggagtaactacataagatatcagaagtgtaagatacattataagtgcttaatcaatgttatctattgttattgttcactgagatagagaacacaaaatcaaattaatagaataaaggtaattggatattttcacaagttgaatcaaaggtgtctttgggatactgatgtaaaaatgtccaatttgggggctatatatttgggatttatcagtaataggttattattcaagctatggctttgtattaggccatcatgagagatgttgtagaatgataagggcaaaatgttaaagatgaagtcctgagaagaaatttcatgagatatacatggtcaataattaagaaggaataaatagagttacaggaagaaaacaagagaaaagtagcatcatggaaatcaggagataagttgtaaaatggtactcatgttcagtagaaccaaatatgagatgtgacagataaaataaattcaagtctgcatttggaattataaatatgagggtcattggcaatttcagacatatcaatgtctgtagatagactctcatatacaaggtgtgatgaaaggtttggaaatagaggtagtgaaattaaactactttttgagagaacattactgaaaataaaatgaagaacataataactatgtaggatgcaaagcctataagagcttcatttgtttcatttttctttctcatttaagatgagatatttgagctctctttaaagctaccttcaatggaattattttctagatattaaagttgcaggttaacaaaacgtctttttgcatgtaagataaatgacatcttttccaagaaaacgaagattgatcctctctcaaatattagtagtcaattcccatggagaacttgtcttggttaaaccaccccttaaatgtaaagtgaatgtgtcagtttctgaattagcttgtttttttttttttttttttccactgctataaagaaatactcaagactgggtaatttataaataaaagaggtttaattagtttacatttccacaatataccaaagcatggctggggagccctcagggagcttttactcatggcagaaggtgaagctggagcaggcatcttcatatggccgcaacaggaggaagggtgcagagaggtgctgcacacttttaaacaaccagatctcattgttactcactcctgctgcaacaccaccaagggggatggtgttaaaacattagaaactgccctcctgatacaatcacctcccaccaggccccacctccaacattgaggattatgatttgatatgagatttgggtggggacaaagatccaagccatatcggttttctattttaaatattattttgtggtgcatggtgctgtaatcccagcactttgggaggctgaggcagaaggactgcttgagtccaggagtccgagaccattctgggcaacatagtgaatctctgtctcttcaaaacaaaacattaaaaaattagctaggcatggtgggacatacctgtagtcccagctacttcaaggagactggggtggtaggatcacttaagcctgggagattgaagctgcagtaaaccatgatcatgccactgcactcaccttgagcaacagagtgaggtgctatctaaataaataaataaataaataaataataaaaatttggctcaggcctgtaatcccagcactttgggaggccgaggcgggcagatcacaaggtcaagagatcgagaccatcctggccaacatgatgaaaccctgtctctactaaaaatacaaaaattagtggggtgtggtggcacgtgcctgtaatccagcttcttgggaggctgaggtaggagaatcacttgaacccaggaggtggaggttgtagtgagccgagattgcaccactgcactccagcctggtgacagaaccaggctccgtttcaaaaatataataaaatgaaataaaataaaaaaaaatgtatttgtgctgtttgtggaatcctggcaaaattgtgtgtgtgtgtgtgtgtgtgtgtgtgcatgagtgtgtgtatgtgtgccttgctgctatttgttttgatatctaagtgatcagttttcattttatggtgggctatgatctgagtatgatgcttaaatgctgataaacttgatgcttaataagcaaaagggctttagaatgtttatccaggcttaacagggaaatacatcagggaattaagcatgcgggtaacacattgatgatcatttacctgtcaacaatctaccatttgtatgtcttagatgtcaaggagaaagggattaaaataggcctgagaaagcagagattccactagtgtatgtagactgtcagtcctaacctgttctgacttttattaaaataattattaaatttgtatctttctttgaaatacctaatactgcgtttatttggaagatatgcagtataagtatcagtgggtatactgccagataccaatgttgaatatccaagagtgaagtttattttagacctacagaccagtgggaatctgaagtgatcattggtcaggtatgttccaccccatgatttagacactcacctatgtcctcctaagttttaaacacaaacaaatgaagatatagatttccgcttcctgaacaagggccaaagttagttgtcagaagcatgctgtcttgctggtatttactcacttatcttttcatgcctatttttttttttaatgaagtaaacttttattattgagcaggaaaccactaataaggaatttcatgaataaggaactcaagctatcatatttgggcaccataacatttgggttgggggaaatggactgtaagattggtctggagttgttaattagcagggtggtgagactgaaggaaggctgaaatgatgagggtgtggagaggtagaccaagcgtcaacctagatagggaagtaagaagagccagaaattaaagacttaaatgtaaaacctaaaactataaaaaaccctggaagataacctaggcaacaccattcaggacataggcgtgggcaaagatttcatgacgaagatgccaaaagcaattgcaacagaagtaaaaatcaacagatgagatcaaattaaactacagagcttctgcacagcaaaagaaattatcaacagatagacgacttacagaatgggagaaaatttttgcaaactattcctatgacaaaggtctaatatccagtatgtataaggaacataaacaaatttacaagaaaaaaaaataccccattaaaaagtgggcaaagggcacttctcaaaagaagacctacatgcggccaacaaccatattgaaaaaaagctcatcattgatcattagagaaatgcaaattaaagtcacaatgagacactatctcacactagtcaaaatggctattattaaaagtcaaaaataatacatgctggcaaggttgtggagaaaaaggaatgcttatacactgttggtagtagtgtaaattagttcaaccacagtggaagacagtgtggagactactcaaagaccttaagacaaaaataaaattgacccagcaatcctattactagcaatcctattactagcaatcctattaccatatactcaaaggaatatgaattgttctattataaagacacatgcacgtgtatgttcactgcagcactattcacaatagcaaaaacgtgtaatcaacctaaatgaccatcaataatagactgcataaagaaaatgtgttacatatatatcatggaatactatgcagccataaaaaagaacaaaatcatttcctgtgcaggactttgttggatgcagccggagaccattatccttagaaaactaaagcaggaacagaaagccaaatactgcatgttctcacttataagtgggagctaaatggtgagaacatatggacacacagatggtaataacatacactggggcctattggagggtggaggttgagaggagggagaggatcatgaaaaataactaatggatattaggcttaataccccggtaatgaaataataggcacaacaaacgcctatgacacgtttccctatgtaacaaaactgcacatgtacccctgaacttaaaagttcttaaaaaaaaaaaaaaaaaaaaaaaagtagagccaggagctgagacagagtgcgagaagaagaaatagtaaaaggcaggaatttatgtgcaagaaatgatttagcagaaggaatagaggttaaataatcagagattatcgtaagaaagaatgtcagtatgataaatttagttttaactttctttgtgaattgaagacaattgtttggcattaaaaaagtgggtttgtggttaatcaacaaattagtgtcctacagcatgaacttttatatcagagcaatatttttttccatatgaattttagaatagttttttcttattctgtgaagaatgacattagtagtgaaataggaatagcatttaatctgtagattgctttgggcagtatagccattttaatgatattgattcttctaaaagattctgtatattctttaaatattataggctacaatactttacatcaaagaaataatatagactctcattttaaggtatcatttcttagccctaatttgttaatttcatttatctacaaggcagtttttcctgttttccttttttatctgatcaattgacttaaatgtgacataatacaactgccagagaatgtgaattaaagcgatctctcacttttcctttcagggaaatcttgaggagtctgatacttttcatcctccagctataaaatcatcttgtagggggaagctgtacattggtaagtctcactcattctaatttttctttttaatgctcaatttaatacagtctttggcttggctgtaaggtaaaactagcatgattcaaaagatgtcaacatcattgcttgactaattacagaataattcttttttaaaaataattataatatgattttacttttgtttttaattactctagtaataggagtgatattaaaacttatagatataaaacaaaaattatgtgctggaataaaaagcagtatttttaattttaaagttgtgctagtattacttttagctaatttttagaatattatatatattgacaccttggctcacaagcaatagctgagtgaggatccacgaagagatctgaagctatgacttgtaaaaagctaatacactatacttattatatatacattttatgccataaagtcaaatatgtagctattatgtttcaatgcattgtttctctcttaccagtatatagcattagtatttcttggtatcatgtttctcagcaacacgcctccccatttgccaactctctctctctcataaatattttaagagcatgtaggtttgtgtgtgtatgagtgtgtttctgtaggtacatgtacagaaacacactcatacacacacacacttacatgctccttaaaatatttatcgcatccaggttgccattagttaatttcaactttcccaattcatgtaaactacagactcagcagcacttctcatgccctcactttctgattagtggaggtttgggtggaatacttcatcagttaaaaatactcaatcttcactcaagttcatatacattgctataaaatcatgcaaatttactgctatctttatagataaataatagtaaaaaaatataaattgcatacagttgaaatgtaaaaagatataacaaaaaagtcatgtatggaaattaatagaataaaattttgggaatcccaatcaatcctaaaaatcctcgccttctcctgatttttatcaacttccagaagttctatttgacactaaatgattcttcaaaaatactaattctaagcattagattgaatagatatactgcatgttgcaaggtagcaagtgtgtttttacatttatacatacaagtaagcttgtacatgtggctgatgtggaaaaaattcactatatcaggagtttgaggagacatagaagagtccccagggatctcatctgaatattactgttctggaaagtttagggagtgaaagaatttcagggaggtagttatagagaattgaagagtcaaacaatagggaagaataacttgtgtcccatagaatatctccaaagatatcttggcaagttgccatctgttggcacacatcatttatgatcactgtattgtagaatcccttagtcatggataagcttactaatttttttcttagtaatgtctttagttttgggctacaagatgttacactatgaagagaaaaggggaaaattaaatggctatagtaagaaaccatttaacccaagttatttctgcatgtgtgaaccaccaattctataaaacagttgtttttcacagtgtatcagataacttcctttgagtgttgagtattaatcgagatcttcccattcctactccttccaatagtagctcacatttaattaatcctcagttcaactccaaaactaggcaggtaggatgttaagtgacaaattcaagacattccagactaggcagcctacattaaatctttaatatgaaagcattcctaattcctgattccacttatttgggacttctcattcaaaacctaatactgctgaaccaattcaaaatccttttaaattttctgttatccaggggccaattcaccatctcttgtcttcaaaaaatatgcatacctttctgaaatacagatacattgtgtctacatcattcctttgatctacgaatctagtaaactccataaaaaaaataggctctgctggcacaactctgtgaatccttaaagacgtatttgtagtagggacagaactaataggatatgtgtgtgtgtgtgtatgtgtgtgtgtgtgtgtgtatatatatatatatatatatatggagttttttaagtattattaatgtacatgatcacaaggtcccacaatatgctgtctgcaagcttgaggaggaggagagccagtccgagtctcacaactgaagaacctggcatccgatgttccagggcaggaagcatccagcactggagaaagatgtaggctgggaggctgggacagtctcgccttttcacatttttctgcctgctttatattcactggcagctacttagatggtgcctgccagattaagggtgggtctgccttccccagcccactgactcaaatgttaatctcctttggcaacacccatacagacacacccaggatcaatacttgcatccttcaatccaatcgagttaacagtattaaccagtaaagtattgattatggcgtttttcacaggtcacccagctgttagataattcacttaaattcagctatattttagggatcaatttctgcctaaccaagtcatagtgcatattattagcttgtcttaaaagaaaattactacctggcgctacagtatctatacttggaccctggaatttgtccatatttttcctctacagaaagacaagcacagatagattaatcaattttgctctttcattttgcattgggttttttctgagtagtcattcacttcacaaaggtatctgtgttatctactatctaccaaacacttaaatagggaaaagttggtttgctactttcccagaacacaatgaagatttaagcagctttgtactcaaagttcaaggttgcttgtgaataaaatgacaaaccatagagtccgaaggtgaagatgaagcgggatgggagtatgacaaattacctggtttgtatcttcactaaataatccatgggcagtgttcaggacacaggataccattgatcaaaaccaagattttctcaactggaatttttctatgggatagattctccacgtggaatccagtctttttctcacccatcaccaggcccctcatatatttgacccttcttatttccctgagcctttccttctcccaggtatccctcctaggagttaacattagtctagtcactcatgtttcttctcttttcagtctatagctttcatgatagaactcatctactcttgtagcttcaagggtcatttctatctcgtgatactcaaaccaacaggtactcctaaggccttatttctgagaaacaaatcaacatatctattcgatagcacattagctgcttaccttaaaatatgtgaaaattgaattcatattatcacaaacaccttttcttttgttttctcatttctgtgaattaaagggtatctacccagtttccccaaaagaaacctagaaatatatttgactcctttctcaccttctcacctatcttatcatttaactcgaaaaaccttgtcaaacccactgtgttagtccattttcatgctgctgataaagacatacctgtgactgtggcaatttacaaaagaaagcggtttcagagacttacagtgccacatgtctggggaggcctcacaatcatggcggaaggtgaaaggcacatcttatatggtggcagacaggagaagaaagctttttcagtgaaatcccactctttcaaaaaccatcagatcttatgagacttatttactatcaggagaacagcacagaaaagacccgcccccatgattaattacctcccacctggtccctcccacaacacatggaaattcaagatgaaatttgagtggggacacagccaaaccacatctttctgtccctggcccctcccaaatcttatgttctcatatttcaaaaccaatcatgtcttcctaacagaccctcgaagtcttaactcatttcagcattaactcaaaactccacagtccaaagtctcatctgagacaaggcaagttccttctgcctatgagcctgtaaaatcaaaagcaaattagttacttcctaggtacaatagggatacaggcactggggaaatacagccgttccaaatgggagacattgaccaaaacaaaggggctacaggccccatgcaaatccaaaatccagcagggcagtcaaatcttaaagctccaaaatgatctcctttgactccatgtctcacatcctggtcatgctgatggaaaagatgggttcccatggctgcccctgtggctttgcagggtatagcctccctcccagctgctttcacaagctgccattgagtgtctgtggcttttccaagtgcacagtataaggtgtcagtggatctaccattctggggtctggaggatggtggctctcttctcacagctccactagacagcgccccagtggggactctgtatgggggctccaaccccacatttcccttccacactgccctagcagaggttctccatgagcaccccacccctgcagcaaacttctttctggacatccaggtatttctgtacatcctctgaaatctaggcagaggttcccaaactccagttcttgacttctgtgtagtcacaggctcaacaccacatggaagctgccaagacttgggccttgcaccctctgaagccatggcctgagctctatgttggcccctttcagccacaactggagcagctgggacacagggcaccaagtccctaggcggcacacagcccagggaccctgggccccaccctgccatctcctaggcttctgggcctgtgatggcaggagttgctgtgaagacctctgacatgccctggagacattttcctcattgtcttggtgattagaatttgaatcctcattacttatgcaaatgtctgcagccgacttgaatttctcctcgaaaatgggattttcttttatgctttgctttccttataaaactgaatgcctttaacagcacccaagtcacctcttgaatgctttactgcttagaaatttcttccgccagatagcctaaatcatccccctcaagttcaaagttccacaaatatctagggcatggacaaaatgctgccagtctctttggtaagaaatagcaaaagtcacctttgctccagttcccaacaagtccctcatctccatctgagaccacctcagtctggatttcattatccatatcattatcagcattttggtcaaagccatgcaacaagtctctagggagttccaaactttcctacattttcttgtcttcttctgagccctccaaactgttgcaacctctgcctgttacacagttctgaagtcagttccacatttttgggtatcttttcagcagcgctccactctactggtaccaatttactctattagtccattttcacactggtgataaagagatccccaagactgagcaatttacaaaagaaaaaggtttaatagacttacagttccacatggctggggaggcctcacgatcatggcagaaggtgaaacgcatgtctcacatggcagcagataagagaagagagcttgtgaagggaaacttcattttttaaaaaacatcagatcttgtgagacttatcacaatcataagaacagcacaagaaagacccgccctcatgattcatttacctcccaccaggtccctcccacaacacatgggaattcaacatgagatttgcatggggacaaagtcaaaccatatgacccatcaatggacaggtgggagatattacaggaataataaaaacttaatccaatatacttttaagccatgtttaaaattcatcagtggaaacaaaatccattaggaaaaacaaaataatcaccctcatctaaaggagaaaaaggcaattcatatcaaagtaagaggtaatgctgttatattttaccatttagttcaatgccttttactggaaacttcaatctgtatgattttatttcattaatactttagtagtttctattacatatatgtgcatatatttttatataaatatttttagaaaaaatgtattttttgccataaccatgacaagttcaatgctcaaaatttttcaataggcagtataaaggagaataaccttatgtgccatatattgttataacaaatgcttccacatatattgactgaacatgtatattcttctcttatcctgttatattttataatacacatgacatgcttacacttgaccaaatattaatcatgttttggcacttttgtacagaaacttagcagacccaaaatactgttggaaggaggtacctatgtatctctccatgatagtgggccatgtttgtgaactagggaatctttgtttccctgacagcttggaaaaggtcaaattctgtctacctcttttccccccagctttattgcctgtgcttttatctcaaacaactatttttaacaacatgatgaaaagttcccatttattcactaaacatatattttaattactggaagaagaaattttggttacctacagatatatgatataatatattcattcacattgtatttcactttctatttatttatagcagacatttccccccaagtgtaagattttcaggaatctgactctaattcctatcaatggccagagtgaactgaattaatagaaagaattgcccctttttatttattttaccaaggccaagtctctagagaaatgctttattattgcagacaatacattctctggtttgctggctgcctttaatgggatgttaaaatcgattggagctatttctctgtcacctgagaagcactgcaggtttagtggtgtgttgcaattttatatccttctcacgtcttttttttttttttgaaagacactcactaaaccaagtgtcttacttgcttgtgagaccgcaacttcctttttctgaggaaataattcttgtaaatgtataacatacatggaatccagtccccaccgtgatggttgtgtcaaagtcatgatacataatattgtctattgtgaaaactacactgaaattgtggggaggttcagattttgctgtttacaattactgacagtgctcctctattgagaaaacaatgcccccttgtgatggcaggtgtattattgtaactgtactgtgactgctccaaaggatgagcacagattatgggctaagataaacaaaaattattttttgtccatcgttgtcttttttgtttcactctattaaaacagttatttccatgactcttgagaaacttaggcaggcaacttgacttttctagtaatttttagatgctaaaaaatatgttcacaatcatttcagatcttttaaacaatgtcagtttatttccagtcccatggttatttaatgttgagacttctcttctctgccaagtttgtgccatttgtaggctagtagtctaagaaagatggagtcatcagcttctttccatctccttgttcaatctttgtactatttctcctcctccagctagccaaaggcagttttagaatgtttggctttgggacatggtgaaagaactgtatgaggagcactcaaatttttagttaactggcattggcttggactggtcgttatttaaagctggcactttctcatcagtacatttgtggtttctccagaaacaccatcaattgcaagagacatattagagcagcactggttatgcaagtggtgaactctactgagatccattgcttaacccttccttagccttgaagtatcctgagttaatctctagtttctctttcttgagatctgttcatgcctgcctggtcttcctttggttaggatcttttcttaccctttatatttctcaagtggtgaggttgaaatgttccgtgaactgtagcacaggtgtttatttaatcatccacatggtttcctcagagtctttcaatcttgacttgggatgaataggttacacctcaaatttctttaaagtcagtggaggcggcacagctctctccaaggaaatcgtcttcaaatatcatccaatttcttattttctaaaagtgggtgagggatttaaaggttatctaattttttaaaaagtttctcagatttctctaaaatttgcatcgtatttgaaatgtgctcagccaaacacccattctaaatctcttttatatgtaccaagagagtctgaaagaaatgtgaattctcctatgatgaaagttggcaaaatctggtaaaaccagcttaaatctggctgtctaatggtttgtattatggttatgtacatctacacatatttttataattatcattctcaggcaaaattgcttaagaatcataaaatttctaaatttcttgaaggatttggacaaaattggacattggaaatgtgtaagcagttcagataccatctcgcaccagttagaatggcgatcattaaaatgtcaggaaacaacagatgctggagaggatgtggagaaataggaacacttttacactgttggtgggactgtaaagtagttcaaccattgtggaagtcagtgtggcgattcctcagggatctagaactagaaataccatttgacctagccatcccattactgggtatatacccaaaggattgtaaatcatgctgctataaagacacatgcacacgtatgtttattgcggcactattcacaatagcaaagacttggaaccaacccaaatgtccaacaatgatagactggattaagaaaatgtggcacatatacaccatggaatactatgcatccataaaaaatgatgagttcatgtcctttgtagggacatggatgaagctggaaaccaccattctcagcaaactatcgcacggacagaaaaccaaacaccgcatgttctcactcataggtgggaattgaacaatgagaacacatggacacaggaaggggaacatcacacactggggcctgttgtggggtggggggaggggggagggatagcattaggagatatacctaatgctaaatgacgagttaatgggtgcagcacaccaacatggcacatgtatacgtatgtaacaaacctgcacgttgtgcacatgtaccctaaaacttaaagtataataataataaaatttaaaaaaaagaatcataaaatttctaaatttcttgaaggatttggacaaaattggaaatgtgtaaggagttcagaaatgaaacacttgagactagtgaattaggacatgactacagtgctgaatataacacagcatgtcatatttttccttaaagtatcacattatgaaagttaattatacaattactataaaagtgttgagtctgtcacaaaagacttatataataaggggttccattttctcaagacaccaggcattcacactgagcaataaaacaaaataaacaacaaataaaaattcctttcaggagaaaattgccttcctggttcagaagcagctagaatttataagtctctatttaggtaatagtgcataaacttactttagaataaattaaattcattacttaaataaaatactaatactgtaaccaacaaggataaaaatgcttatcataattaaattatacattactgaaacatttgttatcccacattaaaaatacatcttatgacactgacaaagcaaatattactttcacatgacatttggaaatatatctaaaaatgattgaaaatatatctagtgttaatataaaaatatagaaagtactcatgattggaaataataagctatttaatttaaaccaaaataattagagcatatcaattaaagctgtcattgtgaaaaatatgtacttgaagtaattcataatcattatattgtaaaccactgaagtcattttgaagcataagaacaaagaagcatttttgagaagaaacactgctatgtctatcatgaatgtgaagaatgttaacctttattaaacctttattaaatgaagttttttttcccaaagcttttttttttggacttaacacttctgtagcatttgtacttaggccctaaattgcaattcaatatataattgaatggctgaggctaataagaaagtaaaatttcccataattctgtagtaactctcacactttattagaaaaaaaaaaatagttccatgtaagttctggcaaataaaatgcatgagagatcatgatcatgtgaagaaaataaaagaaaaaaacaagtgaatataaagatttgtgaaatatttgatggtacaaacacagaagttaactttatatacagaaaagatgtagaactttactttctcaagtacgtggaagaaatcatgtgcagaattgaattttgttttcacaaaaggacggacaggagtccttgcttttcagtttataataccccattattcaggcatacatgtctgtggcatggctggagaggcccaggttcctttcccaatggaagccctgaattctccattattagaaaagtttgaagataaattgttgtctgttaatttataatgattggttatacacttaaaatgattaattctaatttgattagtcgtaacagtgatacatttatgtatatacacacgtgtacatagaaacatatttaatgatttacagaaatctaaataagttttgcttataatcaatgtgtcaaaaatcttcctttcatttgagaatttgtagtatacatataaaaataggtaaaatattattttaattttaacagttggacaaagaatatatgcgtctagtacaatattttctgaggcaaaatacaattccatttaaagacagctttatataaagccagtataagatgtttctggaagcataaaaatactgaggcataaaacatgctaaaggaacaacctaattacaaccatataattcaatgggctatctgctctataatgttgaattattgagaacaggaaaacaattaatggaagaaatcatttttaaaatgggaattcagcattttggctcccctttatagcattttattcattctagtggctaaaataaaacttagtcaatgtaaatcttaactgctacccaatctacataaaccacaataaattaatttaatgatttttttcctatagtttagaatgaaatactcactgtgtaaaaattgtgtagtttgttttttattctgtgcactacaagtgccttttggccttattttctttccagttacttgctgaaatgtaatgccattactttcaatggcaaaaaccgtgattacttttgcatcaacctaatactaataatcttgtggggtagcacctgaatatgaaagggaaagtgattctctgttgctttcattcaacaaacatttattcattgctcactgtgtgtgccaataaattagaaaggtatgtatgagagcagtgtatcagaaataagtaacagatatgagacccaaactgccttatgttagaggggtttatcatcgaacataacaaggaagaaagttcaaatttccaggtttggttattcctgtgacacacatgtcatggaggattcaggaaaagtcctaattgtatgtaactctgctttcctcggatttccgttcttgggtttatttacccacggtcacaaggtgactgcaagatgactgcttcaaaggctttgattttctcatgcctgaacaccttctacagaaatgtacaggcaggctctcttaagtgccactgaccacatttgaaagcagcattacaagatcaagcatctcacattttcatattctatgatggaaggcagatctattagaagggaatgcaagtgtatgtatgtgggagtcggttggctgttgatgagcaaccagaaatgtttaacgtaagtgatctacacaattgtgtttttacagagtttagaacaaccatactggtgtgtataagtctagcaaatcttcacagagaaggtaatgtttgccgtacagaggatgagtaagagttttcagatgaagcaagggattcataagtgggcagggatgatgagaattataggattttccagtcacattgatattaagtggctagcatgtatttctaagaatattctagtggcataataaatgtgaaaaaggatcatgaagtcaagccatctagaccatcctgggcaacgtggtgaaaccccgtctctactaaaaaaacaaaaattagctgggtgtgatggcggcacacctgtagtcccagctactcgggaggctgaggcaagagaatcgcttgaacccgagaagtggaggtcgcagtgagccgagatcatgccactgcactccagcctggtgacagagcaagactccgtcaaagaaaaaagaaaaagaaactaatattgtattgatatacacctaagctacaccgtgattacttttgcatcaacctaatactaataatcttgtggggtagcacctgaatatgaaagggaaagtgattctctgttgctttcattcaacaaacatttattcattgctcactgtgtgtgccaataaattagaaaggtatgtatgagagcagtgtatcagaaataagtaacagatatgagacccaaactgccttatgttagaggggtttatcatcgaacataacaaggaagaaagttcaaatttccaggtttggttattcctgtgacacacatgtcatggaggattcaggaaaagtcctaattgtatgtaactctgctttcctcggatttccgttcttgggtttatttacccacggtcacaaggtgactgcaagatgactgcttcaaaggctttgattttctcatgcctgaacaccttctacagaaatgtacaggcaggctctcttaagtgccactgaccacatttgaaagcagcattacaagatcaagcatctcacattttcatattctatgatggaaggcagatctattagaagggaatgcaagtgtatgtatgtgggagtcggttggctgttgatgagcaaccagaaatgtttaacgtaagtgatctacacaattgtgtttttacagagtttagaacaaccatactggtgtgtataagtctagcaaatcttcacagagaaggtaatgtttgccgtacagaggatgagtaagagttttcagatgaagcaagggattcataagtgggcagggatgatgagaattataggattttccagtcacattgatattaagtggctagcatgtatttctaagaatattctagtggcataataaatgtgaaaaaggatcatgaagtcaagccatctagaccatcctgggcaacgtggtgaaaccccgtctctactaaaaaaacaaaaattagctgggtgtgatggcggcacacctgtagtcccagctactcgggaggctgaggcaagagaatcgcttgaacccgagaagtggaggtcgcagtgagccgagatcatgccactgcactccagcctggtgacagagcaagactccgtcaaagaaaaaagaaaaagaaaaagaaactaatattgtattgatatacacctaagctaggggatagtattgtgcggtgccaaattgttggttcattttaagcacagagaaaacaatgtccaaataaaatagtaacttttaaaaatactgtttggttataaaatggttcctgtttcaaaatagaagatagtattcttattaataataaatatttaacttcttcaaatcacaaaagtaaggttattaataacttccgtctttcttcaacatctgaaactgagttatataaaacaagagtaaaattattgtgccaaacattgtaataaaccgtttatatacattaacctgtatatgaattaactcacaatgccactaagaaagcactataattttttttattatactttaagttctagggtacatgtgcacaacatgcatgttagttacatatgtatacatatgccatgttggtgtgctgcacccagtaactcgtcatttaacattaggtataactcctaatgctatccctcccagctcccccccaccccacaacaggccccagtgtgtgatgttccccttcctgtgtccgtgtgttctcattgttcaattcccacctatgagtgagaacatgcggtgtttagttttttgtccttgcgatagtttgctgagaatgacggtttccagcttcatccatgtccctacaaaggacatgaactcatccttttttatgaatgcatagtattccatggtgtatatgtgccacattttcttaatccagtctatcattgttggacttttggcttggttccaagtctttgctattgtgaatagtgccacaataaacatacgtgtgcatgtgtctttatagcagcatgatttataatcctttgggtatatacccagtaatgggatggctgggtcaaatggtatttctagttctagatccctaaggaatcgccacactgacttccacaatggttgaactagtttacagtcccaccaacagtgtaaaagtgttcctatttctccacatcctctccagcccctgttttttcctgactttttaatgatcgccattctaactgatgtgagatggtatctcactgtggttttgatttgcatttctctgatggccagtgatggtgagcattttttcatgtgtcttttggctgaataaatgtcttcttttgagaagtgtctgttcatatctttcgcccactttttgatggggttgtttgttttttcttgtaaatttatttgagttcattgtagattctggatattagccctttgtcagatgagtagattgcaaaaattttctcccattctgtaggttgcctgttcactctgatggtagtttcttttgctgcgcagaagctctttagtttaattagatcccatttgtaaatatttttgcagaaaaatacccttaaagtattgtgcatattaacaatgtgtgtattagaaatgtaattctggccgggcgcggtggctcacgcctgtaatcccagcactttgggaggccgaggcgggcggatcacgaggtcaggagatcgagaccatcccggctaaaacggtgaaaccccgtctctactaaaaatacaaaaaaaattagccgggcgtagtggcgggcgcctgtagtcccagctacttgggaggctgaggcaggagaatggcatgaacccgggaggcggagcttgcagtgagccgagatcccgccactgcactccagcctgggcgacagagcgagactccgtctcaaaaaaaaaaaaaaaaaaaaaaaaaaagaaatgtaattcttaaataaatcattttagcagagtaatggtatatttgagaacaaatatttttaaaagcttaaaaaataaaaattttatctgctatttgtatcacacgataaacatgaaatttataaggggacacagatctagacacttaagaaagctctgaaactgacagatacactgagaaagtctgcctgtatctgacggcttattgcttctgatttattggaatatataaaagagatagaaagggaaaaatcccaatcaaaacctctaaattccaagatttttttttcctttccttttcttttgtcttcctccccttcctcctactccttctctctctctcctcctcttcccctccctccctcacattcttcctctttctcatcagatcctggttctttatttttgtgtatttgtgtatgagaggggatttcataacctaataatctagtaatgaaattactaatcaaaagtaaagagtcagaaaaagacaataaataaaactaacttatgctgttaaaactaaaaataataactccacttgggtagaagctaagtcctagaatgtaccatgggggagatctctggggacccctgctgttctgggacttcatttgagtgttgttttaagtgagggtattcaaatgtttttaatcttcatttgagtgttggttacaattttacatgagggcattcaattggggaaagtttcatcaagacattcttgaaaaattaattctcccaaatatcaaaatattaaataaatataataagaaaatgtgtcattggtttagtaatacagaaataagtaaagaacagaatacagattccagaaagagatgcgattgccagagaaaagatggattatttaatatatgtactaagataattgatttttcatatggaaaaattaaaattggcctcctacttcacaccattcagtctaaatgaactaaagatttaaacctgaaaacaaggcttccagacttgaggaacatgaaaaataaaatatctgtatagttaagatgtggaggattctaagacaagctttgcttaaataaggtataatccatgaaggaaaagattaatacattttataccaataaaaataagaactgtttataaaacatgtttatagtccataaagaaaattagtaaagccaaaaaattaaatatatgcaacacatataacttaaacagtaaaacctacaaaaaggactcctgaacattgataaaaaaaaagataaaataaatggacaaagaaatggacaaattttacaagttaatagcttatacctttatgaaaatatgctatcaataagataaatgcaaattaaacacaataattaatattcgatgtccaccagactgtcaaaactaaaaacattgggcatattactacttgttagtaaacatgtgtatgattgggaactttattcacattactggtgggaatgtagattggaacagtttggaaaacaatttgatattttcttatgagactaaaggtgtttcaaccgtgacacaaacttctcattactatcctaaagaaatgcttacaaatgtacaataggagggcacaatggctcactcctgtaatcccagcactttgggaggccaaagcaggagaatctcttgagctcaggattttgagaccagcttgggaaacatagcgagaccctgtctctacaaaaaatcaaaagattagccagacatgatggtgcatgcatgtagtccctgctactttggaggccaaggtaggaagctggcttgagcccaagagatcgaggatgcagtgagccatcatcctgccactgcactccagcctggctgacagaacaaaattctgtggaaaaaaaaaacaacccacaggaggcattttcagtagtatttctagtagcattttcactagaaataaacagacaaacctggaaacaatctccacatttctccactttaaaattgcaattttcctttaataattaataagtaccctatagagacatgctttgagactattctgttctttctctaactttcacccacagttttagctttctttgatgatttacagacaccatcattttatctatatttcttggcatactgaaataagaaagaatttccctatctatctgtctatctatctatctatctatctatctatctatctatctaatctttctatcatctatctcatttccctggacacacggatggctactttattcaaatagttataactcactactgtaaatgggttactataaacaagtgtattttaaaagaaaacaatgtcattagcaaatttttaaaaacaagcatttttctaatacttgccgaaaagaagaaataacaaatgtacatatacaaacctcccaaaattgtatacatatttagggagatcacattagacctttaccaaccacatatgatttaattgagattgatagccagtatatttccaggttctgagggacaaagaccaataggagtcattgaaggtggttgtagcctggtacctgcctcaggagaagtcgattcaagtatattgtcttgtagacagagtgtggtgtcagtcaactggtaattagagagagaggtttatgggacacatggtacaaagtcttaagatcaggagagcagtacttctcaatgtgatcctgaaatgaaatgtttcaaaatgaccttgtagtatcttacattataaaacttgcttagtttctagatcctaccagaggagaaataaatttcttaagatactatgataatggtggcagctgctggctgctattgtggttcccccacctctttctcttctttctgctactcctcttccttctcgttctttttcttttagtaatatatcagaattacctggctttgtgttaaaggctttgcaagtaagtacacaatttaaatctcacagtgatccccattttaaagttgaggcttggattgactcctacttcttcagtatcctataaaatactaactgcctttatatttctactatgtcctatacagcctcagagctcaattgtcagttgattgcaacttcacctttaattgttcccaaagggtttctttcaaacgaggcatgagtaatttgagtgtaaattattttcacatagacacattgactttgtgctattgtggataatcttgtcttactgccatgattttcttaactacttaaatatttatttagtgtaataacaataattataaaatctaagtcagcagctgttattgcacatatttttgttgctgaaaaattcaattagcggcattgttagctaaaccaatgaaaaagctggtaactctgaaaaggtcaattctgagttattgttgcccataatcatttcccaagccattaagcctataaaatccaattgaaactgaaagccataaaagtaaattatagaaaagctgcccaggtaggtggtgagagttccatacctgtgagtaagacacttgtcttcagaaattacttcaagtggattacccataatagaactactctagtggatgccatgtggctattaccatttacagatcccatatattgaagacattttaattactcaatcccaaacaattcaatgaggggaagtgctaactgaagcggtttttaaatgccccataaagtggggcagtaagtctcttcaatttaaggatagaagaaaaaacacaattaaatatagaaataaccacgcacttagtcacatcaaaggtcttttgttgcaatacagatttatgccaaaataggtctatatcatataattttaatggataattaaaaatatgcatttgttccaaatcaaagtgtttctctcctttccttgttctattcttatttcacgtttcatttctcatctgtaaagtcagcttcctcttgtcatttatgacttgttgaggctgtgtcttttcaataaagtaaaatatactgaaagtgttaatgacatgtaaataaaatataattttgtaaggaaatgcattatttctagagtgaatacaattgtctttcatgttaccaagtcattagaaaacaaccatttgaatacagcaataactctcaaagtcaaaatgcacctagaatgcttcatggtcactggacttttatatatgcaattaacagtctacataataaaatgtgaaaagtaaatgtaacattccttcttggaagacaatggagaagtggaaagaatatgggctttgcaacctaattacctgaatgggaattgcagctcaaattacttagcctcactgagtcttagtttcctcatctgtgaagtgagaaaaacatttattttcctgctttaagggacatttcattatcattactgattgatgtcagtaaattggtttgtattatattcaggactgaaatgttatgtaactttaagcaaacaactctctagtcttttacgataccatttttctagttggcaactgaaaatggatgataggggctgacatgtgaagatttatttattcagaaactctaataaccttggagataactttagactaaggaataaaataaagaacacatgtttagaattacagatttgtcctttgtttcattcaatgctattaagcagaagggtacaaaacctaaattttgagagctatacacaaagaagaaacaaacaaaaaaacctatgagatgactctgcatattaaccaagaatatcaaattctagaacattattatgtgaaccaaaatataaaatagctagcagaaatttaaaacataaaagttgaatatatctttcattgaaacagcaccttgaaaaacaattctgaagttgtcagcatacctacatctatttttattaaaaactcagtgaagtatttcatccatgtgtactggagtctttgtaaaatttattacacttgtagtaattgccatcaattacttatctgtgttgaaattttttttttcagctactacattgtatctgaagtagatgatcttcagctttgtacactgactttacctctgaaattaattggtaaaaaattctgaggtgaatctctgtttcctgcccttttggtatggcttgttataagaggaaataaggagtacctatatagtcttaagtgtttaaaaaatatgcaaataacataaatcaggattgattatttatttacaaatggaatattcatttacttaaatttacatttgaatacaaatttaattttattctttgatttctgtgataactgtctttcgccagcattagcacagtaaaattctctaactagaggccagggacctgatgtctcctccagtgtccatctgtggccttgtaaaagtcactgaaaaacttctgaaggcttttattcttttacaaaatcatgacaataaagacttattgtaggtatactcggtatactcacaacataacatggtagaaataatactggctttgaatttgtgtaattgaagttcaaatcattgatttgccacttctcgtttcctgtgcttattctattctctagcggatatgcttttctaacagatcatggaaatgattattaaaatattgaagtattttatttatctattcatgatcttgaaaattacaaagatcatttccaggtaataatttaatctcatgctcattgatttgactgtgtttgctgggttgtatgtcttctgttattttgtgctttggagtttaccttctaagcagctatcccaattacatatgattcaatacctatgcaagcagtttggtccttggaaatctttctatcaagaacacactcggggttttccttttttctatatttaacacatgacccaaatattgagcattgcagtgttcttgtgataggtgtaaaaccttacactgaggaattatcatgttccaataacagtgctagtcttgggtaacgaaatagtgagtaaaatctgacattttcctatagcattcttgtctactagacttctctcttatagtttagtaatctaatgtatgtgattattttctttttaaaaataaatgccttcttagttataaggtgtggtgaaaggattgtggagaatgacttttttgagatgggaattgcttaaactttaaaaaatcatcttacacataagtgaaaagttgcaactgtgatagtactcaaaggaacagtggaaaacacgatttttttttccatctgcttttccacttttttagctaattttttttcttcttgtctgaatcttccaccgaccctaccccctttttgttatctctcacttcatcttgtgattaaaacctcatttcaatttggtcatatagatgattatccctttaatattctatgaggtacttttttacaattcttcaaaattcttgcaaagttccatttgtatacgtcttacaatgttaaacaactttcaataattaaataaatattaaaaatcatttgatgaagggaattcttacatatgttagtacttttcacaaatagttatacctacatgtttcctgtcaatatcaatatttataattgaaaaagaaggatttaatgtgataaaaagttaattagcaaaacaaaagcgagtttccggaacatacaaaggccaaaacaataccactggccagacacaatggaagggactctatgaaggtttatccccactgtctctgcatccttacctccaaaactgagggtactgattactgattaaatacaatccattttaggaggtgactgataagatataagaaatgcttctctaaattcaaattaatgttttaatagaaaactaagggactgaatgactctgaaattcttctcaaacttgtaatcataaattactatttcaaatccacaaatgtccagagttcaacatgttacaatgtatatttttttgaggaataagcttatacccatttttaagtaaaccaaaaacacaaatattatctaagccaatcttgcactgggtatttatcagcagggaaggcattatgttttgatgctagtctatttattattgtgccttggtttttgttaaataaagtagaggagtcaatgaaaactaatttaagatacttatgcattcgacagctaaaagcaaaaaatgagttagaataagttcttcttttatttgttttgttaaattttaagttccaaattgctaggaaatgccagcttcttgatatctctttagatatgtagtgacttaactaccaaggaaaagaaaattggaaacaatttaactaaattcaatccaacccaccaatattttacaattcaatgcttttctaatgatcagatcttcagtttttagtatttgaaataaaagttaacaacttggaacactgtcaaggttctgctgaaccttccaatccaagaaaaatagtctaatctgtgtgattatgttctttttaaaataattgccttctacaggtataaggtgtggtgaagggattgtggagaatgactttcttcttaaagcaattatttatgtattcatttaatatttgtatgaaatgaacaactttgtaggatttgcagtatatccatgtcctaaccagatgaaatactttggtattggcttcttgtccataattactttatgatctaattttcctgataacactagaatatttaaaatgttacctagatttttttttcttttgactagaacaattattgccttggtttgaatgcaaagacatatgtaataattgggaatgtgaaaaatgttattagtgttaagttagttttaacacagaagtttcatagcattcttttggtctcctcattaccataatgatctaaataaaattgttttcaaacctcgattttttattccattgatttctcaaaatatctctatttatgtgcatttgtgtgaaagagtagaagttgggacctaatggttacctctggcttggaaatccagccaccattaactgagttgagtatacaacttgcctgagtgctgtgcatggccacttgaaggtacactacactgacccaggtgtggaactcatcctatggaactcatcaatacctgaataagtcctccctcattttcctcatttttcaccaatcccctccctcattttccaccaaaagttaaattaaattaaattaaattaaattttaaatttaaaaatcaacacaagcagacattactgaaaatctgagaggcaaacaggcaattatataaacgcacatgttcgaacaattgtagacatcttgcttaatgcattttgagaaaattactatgtaaatgaattacattttaaaataatttaaaatctatactcagtctctttgccctgaggtcatggtgtttggagacatgtggattgcagtttcttttccaatttctagttgggtgaacatggacaagtgagttaatttcctaaatttgttttctcaacttaaaatgaagataataataccaaccgattagattgttctaaagattaaatgtgtaaatcaaaaataaaattccaagcctctcaaccaactgaatggacccctcctctcggccaaggggatttcaaagtaatcctgaaaagctaattcaggccatgatgggaagggagaattggatatgcttcattatactctcctccctttggaattcaggcacaactgaccagcattaccattaaaacagaggtcttaagactgacagaacagactgtagcaaaaatataccaaattccaagcagactctagtatagcgttacacgagagctttacaggccctgaaagaaattaaaatgttttatcccaaaatatactttgacatattttgaaacggccctgcaaagctgtcctttgcgggagaaactttcattccgtaaatccccttccctttccagatctttttctgatcttgaagagactagctgacagtctagcaccttttaaagatctcaacaggaaatatttacagtctgttgcctctaaggtaggcacctatgagacttcatctacataatgagaaccttggtctccacaactccttatcttaaaccagacactcctttctattgcttctaggtgtatagataattacttaactctttcaaccaattgctaatgaaaaaatctgtgaatccacctatgacctggaaacccctgctttgagttgtcctggctttctggaccgaacccgtgcacaccctacaggtattgactgatatctgtctgtctccctaaaatgtataaaatcaagctgtaacccaaccaccttggatacttgttttcagaacctcttgagactgtactttgagcctcggtcactcagatttggctcagaataaacctttttaaatatatcacagagtttgactctttattgttgacaaatgtatagcatacatcaagtgccaggcgaaagctttaagactctaaaagattttccttattgtcaacagaattgcattaatttaactttctatgacattaggtaattgattttttcaaagtaacttttcattaaataactttaaaacctgtttccatgcttcattattagagaacaagtttgatttgtcaataagcaatcagagaaaaaaagggaaaaaataaaatccaatcatttgttattttccattaactaatattgattattaattattatttatattattgttagtcaatttatttactcatttttaaccattttctgatttttcaccagaggcaagtgtggttctttattttggtctttcttgaatttgttatagagaattactgattgactggaaattaacccttgtcaattgaagtatcatgatctttttaaacttatagggaaagctttattcctaataccaggttacagcctataggctgtccatcctgcagactgggaagcttagcttctggcaaaaaccagaagcagacacttgaaataaggaaggatgagacaggaatttatgctgaatggattggctaagtatatatatatgctcacaggatatgggaggagctgtgaatatgcatgaaatggggcacacatatgcatgctaagcaaacatgcatgttacatatatcccatgttcactttggagtggagacttaacatttacatgcattaaaattaggctctatatgtcaaaatgtgaaacaaaggccacacaggcttcctatattcagactcttaagtcagacacagctggtccacagttggtggtctctcatcaggaaggaatgctggttgaatgtggttgaaaacacaaaaagggaggggaattcagcaaatcttttgagagggctggttttggttcaacttttaggaatgaaagtctactgacagggagggaggggatatagtgaggtatgtgtgacctcccatcccatcacaggtgagaactcagttttcaaggtttctctgaggttccctgggccaacagggaatttgttaagcgggttgaggtgcttaagattttattgttatttctcaccttttatcaaattggaaatgccagctcccccagatttgcaggtttgccttatgaatatttcctcaaattatagctggtttattactttataaacttactaagatttataagtgttaactagaactaagaacataatggttcttaagtatagaaatatgatgagaaaataaatatacttttctttaacatggcattgatcttaatagaataacctaaattttactaaagtaactattggctgataaataaaatttgattgttatgcatcaattgtaacagataatttatttctaacaagttctgattttggacaagcagttagtattttaaatatatatttttttaaatgctgaagctattcacaattttatttaacattttagccaaaacattcctcatgtgcatggggttgtaggtggcttatgaacaaaattttgcctctctcatatttctctcaaaagaacaattttgatgtggaagagataaacactgttgaaatggaaccatatgaccagaaggcattcgtgagatcatatggttcagctctttaatgctttgcaatttagtgcccaaaccatccaaacagatggccttctgtcttatttaactggcccccaaggacaagtaattcagaacgcctcttcgtatcgtattctcactgttataataagaaaattatttattcttccttggtattgcttttggtcgaattaaagccctttactgtttattagatcatcttctatagagttaaataaaattgccatttttaatgaattttaaaactctacttatgtcctttatttttcctctgatctatttttccaacatgataaagtaaaagtaataaaaatgaagcaaaatgatgtgcttgacagtgcactaaaggtttatatagtttagtgcagagataaacacctacatttgaatcctggaccatatcaattctgacttatgtccttaaataagttaaactctttgatctttaatgttttctttttaaaaacagagacaaacacttctgccttagagtggtgttgaggagctcaaagactataatgttatcatcaagagagttggtatatcatggggatttgttacattaaaattattgctattataccaatagtgataataccagcaataacattattattattggaaaataattttaaaagaaattttgactattgaaagtcaaaatgtaaaatgtcagaatagccttgttccatattttcataaggttattacaccagtagatagaatggaatggaagaaagttgtcaatagaatatatctagattgtagtaagtctttgaccagcattctttggtgtttcattgataggctggagcaatactggatgaatggtaagaaacatagaagaaatcctacctaatcaagtaaaaatattggctctgattattcgtccaatgtaaagggaactaaataatacctgacatagggacacaccctgctcagttatttgaagaaacaatattaattatactctgattatattcatgcatattctctcaactctgcagaaatgctaataccctgaattctgtaaaacgggaatatgatccaaatatagcttattctaacattgggaggatatatggactagatcataaagaataagtaacggtttgccaatataaaataattagaaagctataaaggaaaaataaattttaagtaagtgggatcagcatatagcataattttcaaagtggctatatatattaaatcaatgaaaaaattgtaataatgggactagagctgcacagactagtcacattgtcaaaggcttgtatcaaatgctaagtagttgagttatcctataactagcagggaactgatgtaaatcatcaatgtattaaaatgattaaattgtatgattatttttccaggttttactcttatttacatttttagtgcttctcttaaaaactttgaaatctaaaaatgaaaagcaataggaaatcattaactgcaatatttctttattgattctcatctcattttttgtataataccatcatatatttgcatatgtacatatgtgtatatgtttataattgcatgccctgccttgttcttatgtcataagcatttttgaaattcagtttagattttagaattttaattttattgccctgtaatatttcctcatttgactgattatttaattaagcatttaccataattttgtatattttagtacaattttgttcttttatatctaatactataatgaaatatctttatgaatttgtgtgcatttcagattgttaaatgaggagagggtctctctaagggcaataactgggttaaagactatgtatattttcattttatcaatatatattacgaggtacctttccagaaggttttatagtgtcatgccagagggacaagataggtgagggaaaagctgcatttgattaatgaaggcacataaccatctgcttatgcatttctgccctagacatttctactatttctttaggaagaattaagaaaggagataaagacacactcttaaattctcgactttctgataaccatttttgagctatctgaaaaagaaagaaaaaacagaaacaataataattttgacaatgttctgctacttgtccaggcttcctgccaaggagagagggagctgcaacttagccaagcagcagtccgcaggaactgagcacagtagaacctacaactgctttttgataatcttggtcttatctgttggcctcgaaaagaaatagccatcatgatacagaaataaagcctagtatcagaatcatcgagtggtagcatgttttaaggtctcttttactttaaaaagctgttggttgtgtgctttagaaacaccaaggttagctttgtgccttatctgctgccctaggacagtaacagttattataatcgcccaaaggttatacaatgacctttaaatgggctgaaaaataaaagacaaaaaaaaatcttataggaaatagtgtccacgttttacacttaggcatttatttttcattgcaaagaaatatgatcaagctaagaaaagtaaagtttttccattagtattaagcatggcatgaaactagcatttacagttggactacttttgagttagttaattttaagaccctctgctagaaaacaccaacttggaaaaatttgctagagccagtccttcgagggaatgagtgaatagtaaaccctgatctgcttttaaacagaactaaatctcagtgtgacaactttcagttgttgagttgcattatttattgaatacactactgtaaacttagtttgcttactgaaaggttgtacttgggaaccattgattttataaagtttggtgtttataaaattatgacactatttggtattttaaaaatagaattatctaaaaacgttatgtttacactgtgtgtgtgtgtgcggtgtgtgtgtgtgttaaaatgtaaaacttatcagagagctaaatggcaccttaaaattatttaattatttattgtataatatgtggcttaaaaatattttgttttctgcttatatacctattctcttgaccggtgggtaatgaatgattgcatatttttatgtgaaaagaaaagaaaatgatgtgaattatctgccatacacatatacattttggggattggggttctgcaaatattatttaaatataaaatgtattaatttgcttaattcctcaataaatagttttttgaaatgactttctcctttgtttccacatggcaaattccctcttatcattcaaaatgtggctttaatatagcctaatgattgcttttattctccaggtatacttaacaattttatcttctggaaaaacaacacccaatatatacaacctaaattttttttaatgtatttaggcacattttctccatcaaacttaaaacctttctatgtcaggggctatatatttcttttcttttttgtagccacatgctgagtataatatttgatgaatattagttcctccataaatacccattaaattattttttgaagactgttagtgtaccagggttaaataaaataacctttgaagtttctcaattccaatctttttttcctcttatttgtagagagcttaatcttgcaaggcaatatttatttcaaaattaattttgaataatttgtattagggtctgtaagcaaataaatcgggtatgtcggctttttaaaatttggccattagggtattaaaaaaatttagaatttgaaatttaattcaaattggggaaaataatagtacctgtttaataagcctgttgtgaggaccacatgagttgttataaataaagtacttaaaatagtattcacaaatggctatattatcattaaattgttttattgttgtcatatgttttatcagccttattgggttattaatattaacccaatattaatcttattgggttattttagtattaactttatctcttataaaaagatttatcattggaataagttgagattctatcttttaataatagcactttctcttctttagtttcactatctcttataccatctcggccctttttaatctaattcagaacacacaattgttcttataattggattcatatatattcaatcttaattcatctccaacccatttttcttaatatcccccaacttcaaattatcttctaaaatgtaattttgagtctatggttttattgcttaaaaattattcagtggtcctgcatcatctatttatgaaatctaagtatcttagtagtttgtcttcctttctaacctttatctcacttcctcattcctcatcatctccatagatccagtattctaggcatataactacatgtaattctgtggatgtgtcatatcctttcaattccataatttggctttattcttccttctgcctggaactcatttcttatgtcccttgactaacagaagactatctttcctttaagacacacttgatatgtcacctctttcatagtgcctttattttatttccaagtaattattaattattaactgtttctcttataattgatttgtaattttatctcattttagttggtggtctttcatttaaatttaaatttttaattattttaaatatgttgaggcttactataagatataattaataatgatacatcctgaagaatgttccatgtgcacttgagaagattgtgtattcggctagtgtatgaaatatcttctacagattttcattaggtctatttcgtagtgttattgaagtcttttttttttatcatctactttttcattttatctattattgaaagtgaagtatgacagtacctacatattgttaaattttctatttctctctttgtttctgtaagttttttttttcaagtattttgagactctgtcattaggtacatatgtgtttacagttcttatgtcttccttaaagagtgaccattttattattacaaaatattcttcttttgtgctagtaaaattttgtaggtttaagtctattttgtctgatagtagctgtagacactttagttttcttttggtaacagttttcatgacatgtatcttatcatccttttattttcaactgatttgtgtctttgaatttagtgtttcttttttagacaacatataggtagattaagtgttgatttttaaaaactaatctattctcccaacctcagcatttaaattggaattctttatataaatatatatatatatatttatatttaaagacaaattataaagtaacatttatgcatgccattttactttttttgtatgtcttgtgtcttttttttgttcctatgtttctttaatattgctcttttttgtgataaacatttttagtataccagtttggttcctatgttatttattctattttttaaaatcttattttcttagttattgtgcttgggattacaattaactgcttaatttaaaacaatctagttcagattaatacaacttaatttcaatagtttacagaaacattgctccaatgtagctcctttctttagcttcccttttgtattaacattgctataaaaattacatctttataattttaaacccattaataaaattcatgcagttatctcttaagtcaggtaggagtataaaagcgttttaaacaaaaatatatttacattatcttgtatatttccctatattgtttgtttgtctgtactctttattcctccatgtggactcaagttactgtctagagacttttcatttcaacctgaaggactctccagttagtatttctcatagggcagctgtactagtgacgaattcctttagtttttctcttaattagtatggtgagttacattaattaattttatgtgttaaaccatttattttattatttctcctatgttttaaaaaataattttgttaggtagagaattcttatgtgatagtctttttcttcagtgctttgaatacgttattccattgcctctggcttcagtgatttctgaagagaagtcaacttttaatcttattgacagtgacaagtatgtgataagttccttatctttctgcttttaagattatctttgtctactgataatttgactatgatgtttctacttgtggatctctttcagtttatccttataatttattaagcttcttggatatacagattgtcttcttaccaaatttgggaaacttttgactattatatcttcaaatattcttttggacccctttttctctcctcttcaaggagtttcattttatatgtgctgatatactttatcccacaggttttgggggctcggttcatttttctttattctttatctttctgctcttcggaatggatgatgtcaaattgatacagatccggtgactggaggaacaccagggtcattggtctcacgccaatttagataaatgacagagacacacgtggagtggttttaaggagtggagaatttaatagtcaagaaagaagaaaaaaaagctccccgctacagagatagagggagcggggttcccaagagagaaaccctgtgtgctgctgcgaaaaagtggtcggtaatattgggaagctggagaaagcagtgtctgatttgcatacggcccagtggattggtttgaccaggtgtgtatttcacatagcccagaaaaacctgaccctcccaccccaggctcttaatatgcaaatgcaggccaccagatgtcctgcacccgtggagatagctaggggtggccatgatgcctggcacacgtgctgacaagaaaagggtgagaatcaccaagctggccatgttggttagacctagtttctaatcaccagcattagcatgttaatacttgccagcctggctttccaaaccgcctttctgttagaaaagaaatgtttcgggagctgtttttattaaaagaaaaagtcttatcaagaacttttaccctctatatctgcctagaattatttcttaataactcctgtattattcccccctcaagagaagtaaacctaactgttgttagtgggtgttggacgacaattatttctggctacttcctgatgaaaaggggcgtcatgtcggggaacagcagttgggtcttctcctgaggtggatttaagggtacttggaagaatggcttgtccatgtggggctctgtttgcagcaccattttgagtttgatcgtttctaggtgaaaagagataaattttacaagaaggttaaaaatatagggttggattatgagtattaaaattatcactgttagtgggggtcctatagactataactaacagtgtaatttgactcttgttagttacacccatgtattgcaacaccagtttgcctccactagatgtttatgtacattaccagaaacattaatataaaagcaacattttccttgagaagagcatacatttcccccttgacttgccattggagaataactttaggcttaggcaatttttataacttgcagtatgattgggagagatacattattcggtggctaaataactttggcattaatcttgacaattcctttcctttaattattaaattttttcatgactttcacagaccctcttacaacagacttaaactttctgacttgtcctaaacattctttctctaaacaaccggtcatttccttttaggacaagaatttaccaaacaagatccttccttatataaaatctctttctctataaccttttcatagcttagagtgcatcacattagcaaccttcggtaaaaagtcccgtcaaacttaatgatagtaaaaactattactcctgctgtaagcaaaacaaccttgacgaaatctttcctgtaactacttatcctgctctaagtataatgaggcaaaatattacagcaattagaattttacaaccagaattccacatcgtgggtgtcatagtgtatagttctattgcaaatagtagcgtgactataacaattcccatgagagtgacgtagtaaataatttccatttaaaactttacttgccaagacaacatttctctttgggaagctacaaagttacaaatgcaatcccatgtataattaaattctccctgcaaatatgtgttaaaaagaagttctaatatttggtggcaaattttgagagggaagggcagaaataataaaaagtctggtgaggtagcagtgggactgagtaagatgagcagcccttccccagttacttatctttcatgattttcagcctaaggtcttctatttctccacattgagattcaggactttcctctgggctttcaggggttgctcccttagctttttaggctttgacttgagtgtggtgcatccaggagatgattcctgtaactgtcaaaagaacagtgtcgggcctttcccagcccgagcgtagggaagaaagcagaagtgagagttttcactaataccagatctcctgggttaaataaacgtggtttcatttcctggggttggccatttgctagttgtgctaatgccttgaggcttccttgctgctgacttagctgcctgattagctaatctatttcctttggctacctcatctgtttcctttcgatgtcccctgcaatgcatccctgctatttcttatagaaggaaaaaaaactgaggataataacctgttaatttcttggtgatatttcctggagatccattgatggtaagaaaatgtcttttcttccaaatggcagcatgagcatggagaatcaggaaagagtacttggagtcagtaaaaatgttagctacctttccctcgcttatctcaagtggtcttgttagagctattagctcagctaattgagcacttgtgcctggagagagacgttatttagagcaactactgcttatcttgccttgtgtacttcttgctttcctggctatttgttagcttagagctcccctagaggacagtgatcctgccacattatgttgagtgtaaacagctaaattacgtcctagggttaatttggagggattttttttttttgactagtagagctatcatgataatgtctgggaagtatgtgtcaactaaggttgagaaaaatattggattagagtttttcttgagatgccccttaaggtcatgctatgggaaggggagaggcctggattagagaggagaaaagagagactggctgtagtgcttagaaggaggtctactttttttccttcaatttccagaatcacctggggctcctgtgctataatggcagtttgagctgctggacccacggtttgagccccgggacccatcaatcctgctggaccatctgtgagactccacccagtgacctccacctccgagggcagttctgtctccagtggtcttcaccacaggctggacagggtcgaggtggcttcatcttgctgcctgggcattccttcttcttcttcttttatatatatatatatatttttttttttttttattatactttaagttctagggtacatgtgcacagcgtgcaggtttgtgttccaagaaagaaactctgtgtggggcagaaaagtggttggtaatattgagaggctggaggagaaggtgtctgatttgcatatggcccaggcgattggtatcaccaggtgtgtcattcatgtagcctgtgaaaaacctggccctcccatcctagccttttaaatatgcaaattatagctgtcatgtagtcctgcacatgtggagctatctgggggtggccatgatgcctggcatatgtggtgacaaggagaagagggtgggaattgccatgttggccatgttgggtgcacctactttctaatcacccacattagcatatcaatacttgccagcctggcttttcaagctgcctttctgctagaaaaaaacgtttcaggagctgtttctattaaaagaaaaagccttaccaagaactctttttactctctctatctgcctaaaattatttcttaataattcctttattaaaattgcatgttggccaggcacggtggctcacgcctgtaatcacagcactttgggaggctgaggtgggcagaccacctgagggtgggagttcaagaccagcctgaccaacttggaaaaaccccatctctactaaaaatacaaaattagctgggcatcatggcacatgcctgtctgtaatcccagctactcgggaggttgaggcaggagaatcgcttgaacccaggaggcagaggttgcggtgagctaagattgcatcattgcactccagactgggcaacaagagtgaaactctgtctcaaaaaaaaaaaaaaaaattgcttatcttcaagtttgctgattctttcttctgccatttcaaatgttaagtctccctagtgaatatctttttaatttcagttattttgctttcaattttagaatagctacttgactcacttttataatttctaactatttattgagattctctatttggcaagatattattcttaggttttccttaattatttggacattgttttctttaggtcttggattatgtttacaatagctaatttgaagtgtttgtctagtaaattcaatgcctgggcttcttcaaagatagtttctactgactgctctttttcctgtatacaggccatacttcctggtttgttaaatgtttccaaatgtatgtttttgataactggatatttaatctaatataaatatgccaactctgaaaatcagctcttctttctctcagggtttgttgttgaaggttgtcttgttgttcttcttaatattattttctttagtaaccttcctggatgaattctgtaaagtctgtattccttgccgtatgaagccactgaaatcacttctgaggaccttatagtggtcagctaataattagacaataattaccttaaatgctttgaattaataggtctcccaacctttgcagaaggcctctgtgttttaatacagcacaacttcaatacttagcaaggcagtttacatattttcctcagcttcactttctgctttcacaaaggctcaaggtcagctagaagtaagagattagggaccctcaggtcagtcctgggcattcacaccaccttgcccaggcataagtcttcctgattccaggcatgtttacattctctcagagctctctatggacatctcatttgccagtgttttgttttcttttattttatcagcctctcccatactgagagcttatcttatttatttaatatcctaattcactatggtaatattgtgtaacaaattactattttgtcttctgagaggcttttgaatcaatttaattaataattattagatatgaaaactctcttcatttactggagtaactcccaacttaagttatgaactaacaccatagtaggatatcagaccaatataaggatatcagtccttcatttatttctgggcaatacattctatgacatataatcacagtagaaagataatatttttaaatgatttaatacatgtgtcatgaatttcaaatgaaggaaagggaaatatctggaaaaaatgagactcgagctggaaatgtaggtaaaaatgaaatggcaaaatattatggtacagtagaataaaagaaaaaagaaatttatacaattaagatctggtagaaataaatggattgttttgggaaggggaagtagtgagctcccagtcactgataatgttcaagtggaatgtaaattaacagtaactgagtaataggggattgaattgtgggtttacagagcattttaccacctaaaaatataagaatataatctgggggcagaaaagtatcaaataaatagcaacaataaacatgtctgacagggtcccaacaagaaacacaatacactgtaattgggtaataggaagtaggtagagtaaaagagaatcattcagacgtggaaacagcagggagttacttctaaggcctaagagcaaaacaggaggaaacagctccttgaaccaggaggtttaggaaaaggcaatctgactaaagtggccactgccaagctactgcccagcaatctcaggatacagagtggggtggagaaaagggagaatggatctgaagaggcaagtaaaagtagcacatatgtccgtgagggagatttataaacttttatctcttagaccatttttaatatctccacaggacatgtacacctcatgaattagcatgacaaagctataaactttgtaatttatagcttacctttacaactgttgggggccttgtttttgtttgattgttctctttttagtttcaccatctgcaaatattgggaagacagaataccttagagaatgctataaaagccctattttacctaaagaaaagtgaagtatgctgccaaaccaatagctccatggtctttaaatttttctggaggcctttagcttttggtattagaaaatagaatgatagccttaggcaaaaagtagccagaataatatttttccctttaattgtatgtttctacatagtaaagagattagattaattcataaaaatctaaattcagtttacaaaaataagcttaaacttaataaactcattttgcttatatatgtaaatgtacctgtttttaagcttttaaattttaaatgtactaaaggaatattaatttaaaatacagtgaatatagttttattttaaaaacatggatgcagtatccaatattaacattatatataatatgctatttggagacttaactactctcacctaaaaatattttagacaaagcaagaagttttcatcattagtaaaacaaaaagttattgtttgccttctaaaattaaaatgtaatacaattgataaatattttagctaaacatttgttcaattgtaaatatgttttgtgattgtttaagatgcacatggtctttattgagtataaactcgacatttcatatatatccccactttctctcttttacttttgtaattttctgtttgttttttcttttatgcttttaggttttgttctttttgacaaaggacactgttctttgtcctttaacagattgtgttataacagctgagttcaaaacagtcatttattgggcatctatgatgtaccagacaatatcctagggagggagataaacaaacagataagacgtcagttctgaattttaatatacagtatgggagaagagataaacataaattattctagagaggtaagtgaagtttaagtaataaagtacattggtgctgaatgttatcttttttaaagaaactatcttacaaatttaatatccataagataaaagtattttcaaaagatggaacaaatgaggaaaaaggaaggatatagaaaggaagcatccaagagggtgagctctcaaaatgtgtgtaataaaatcccaaatccctgctagagcaacagattaggtccgtggttatggacaaagactttagagccagacttcctggtttcaagctctgactttacttactagctatcatctgaggcagttaaattaatctttctgtatctcagttttcttatttgtacaatggggataaattgtcccccactcaaaaaattgttgtattaaatgagtacacatgatttagaatcatgtctagtacgtattatacatatttacaagtagcagtagtagtactctaaaagatggtttatacatctagctctaagttttctttgccatgatcaccatgatcagttaacatgattcactgtgtctgtatgatttttaaaaatctcattggtggagaaaagcagattctgttttatttcttaattcaagtataacagaaaaattgcaaaaaatcacagatgtctaactcattaaatattcacaaaagtgaccagacgcatgtaattagtatttcagtcaaggagtaaatatcactcttgttatattagcccctgatacctctgctaatcacaaacccctgcttcctctccaaagttagtcttacttccagcgtcacagagcaattttttgtttctaaattatatataaaatgaatcaagtaaaatgtatttttcctactttggcatcctcaactttatattagagaatttatccatattgttatacatggttgtagcacatctattttcattgctgcttaatattttattataagatcatctcaccactacttatccctttaactactaatgaatgtttgtgttgtttccagtttgtgcctattacaaaaaaacatacgaccttgaacattcttgtacgcactttgatgtacatgtttatcgtttgctctttggagggagaggataatatatgtacctaagaatgaaattgctaggccattgtttatgcatatgtccatatttagtagatatagccaaatgatgtctaaagtaattagaccaatttatactcccaccaggagaatatgagaattccagttactccacatctttgccaactcatactagtgattatacacatgggaatgtaaaggctggaccagaaggaaaggattttcagctttagttgatacttttaaattttctaaagtatgtatttaaccaacaactatttatgaaagttcacattggcatctaactgtttttttttaactttgaaattctttttattttattttatttttttattattattttactttaagttctagggtacatgtgcacaacgtgcaggtttgtaacatatgtatacatgtgccatgttggtgtgctgcacccgttaactcgtcatttacattgggtttatctcctaatgctatccctcccccctctccccatcccccagcaggccccagtgtgtgatgttccccaccctgtgtccatgtgttctcatggttcaactcccaccaatgagtgagaacgtgcagtgtttggttttctgtccttgccatagtttgctcgtaatgatggtttccagcttcatccatgtccctacaaaggacatgaactcatccttttttatgtctgcgcagtattccatggtgtatatgtgccacattttcttaacccagtctatcattgatggacatttgggttggttccaagtctttgctattgtgaatagtgctgctataaacatacatgtgcatgtgtctttatagcagcatgatttataatcctctgagtatatgcccagtaatgggatggctgggtcaaatggaatttctagttctagatccttgaggaatcgccacactggcttccacaatggttgaactagtttccaatgatgactgataagctagaatacgttatttttctttaccacgaatttttattattataactttttattttcattccatctaacttttagtagctttattgagatataatttaaatcacatatagttcaatcattgaaaacacacaattcagtggttttcagtatattcacagtcatgcaaccattgtcactatctcattccagaatatcactccaagaaagaaacttttacccattagcagtctcgtccattctaccgcccacagcctccaggtctagacaatcacgaatctactttctaactctcatgggtttgcctatattgggcatttcatataatgactgactcctttcatttagcgtaatgtttttgaggttcgttatgttgtagcattgtgtcagtacttcactcctttttattgctgattattactctactgaatgtgtataccaccttttctttatgttaatggccatttggaactcgtgtgtgtgtgtgtgtgtgtgtgtgtgtgtgtgtgtggtgctgttgaagtccctcgcacatttgttattggaattgtctggtttttgacaatgacttgtggaagttctattcatcttgtgaatatgagacctttggtatatacatcatccctatcttttctttctctatgacttgactgtgcactgttttaaaagtatattttgggctgggccgggcacagtggctcatgcctgtagtcccaacacttcgggaggccaaggcaggtggatcacctgagttcaggagttcgagaccagcctgaccaacatggagaaaccccatctctactaaaaatacaaaattagctaggtgtggtggctcatgcctgtaatcccagctactcgggaggctgaggcaggagaattgcttgaacctgggaggcggtggttgcagtgagctgagatcacaacattgcactccagcctgggcaacaagaacaaaactccatttcaaaaaaagaaaaaaaaaagtatattttgataaagagaatctctgaattttaatgtttgttttttcactctctgtttgagttagtgctatttgtgttctgtataagaaatttttccaatccccaagtttatgagaatattttactcagccgggcatggtggctcatgcctgtaataccagcactttgggaggccgaagcagacagatcacatgaggtcaggagttcaggatcagcctgaccaacatggtgaaaccccgtttctactaaaagtacaaaattagccgagtgtggtggtgggtgcctgtaatctcagctactcaggaggctgaggccggagaattgcttgaacctgggaggcagaggttgttgtgagccgagatcacgccactgcactgcagcctgggcagcaaagtgaaattctgtcttaaaaaaaaaaaaaaagactattttactcatcttccctagaagattttacattttgattttacaaaactatgttgacactgagacaatatatctctcttgaggaccctcatagagtggacagtatctaatgtggtgagcacatcctctctaatgtatttagggtaacatgataataaatttaatggagatatttgtaataatgcccaatgtaagcaaatgccattttgccagagtaaactttaagaaaatcaatgcaacagggctgagttggtgggcagctcacccctcacagtcatcccagcccagggctaaactactttctattttctaagaagaagctacatttccagctgattgtgtaggggcctgggcctctgagatttccctaggacctgggcagtgtgcacagcttacttccgctctgcttggccactgggcacagtcatgcctggaatgggcacacccaggtgctaaagccgggaggggaggtggtaaggaggggagccgccaagccccctcactgacttgcagctgttggggtgaaaatgacacctccataaacagaaatcacattgttctgaactgcacatctgatggctgggccaaacgtacattgtacttagttacatttcagtagtttgcagcaaaacacttaacattatgaaagaagagataggaggcatttcaaaccatgagagaagaaaggaaagataccataggaaaacctgaggaccttggccaacaccttcagttgccccaggaccttgtcctggtcccacgtaatgactaaacctctgtgaagggaaactgaaccaacattcctttcatccatagaaagagagagatggttgaatcctctcccctgtaagtggcatagctcagaggaaagtccgaggacaaggagagacagatccccatgttactcacacatctgatgaatcctgggagagcccccagttgagatgggatagtccccttgacccctttgcgggacttgtgaaggggtggcttgctttctcagcccacagtgctcaaaccctttgcgtggtggaggtagcggggagggtgcagggagcatgcaggtgagcaggtgcaggagctggggcaagcaactttgggcaccagcaagaacgaaccccgtaggggcccatggcagtgcctaggcattgcccatgacccctggagccccagcgggtgtgtgtcacagtgcactcttttagctttgccatccatggattgcttaaatgttaaacagttcagtggagagtcaatgcgacagcctcttgcacccacacctgtgcccttttccagtgtccaggaggaatgaggtcgtgtgaaaaaattggagggtggtgaatatggaagattttagtgagcagaggaagtggctctcggcaagaaggggagctagaagggggatggaatgggaagataatggagttcggctgtcccaggctgaactcttctccaaagtcctgccatcaagccatccctctgaagtcaggctgcttctctccaacatccagctgcttcttctcttctcttcttttcttctctgccgctctgctcctctaccagtggagcttggggtttttatgggtacagaatgtgggggcagagaaggctagggtggttttggaaaaggcaacattcaagtgggaaaacaggaatgcatgctctcatttaaggccgtgggtccagacttgaggatggaccctcgccagggacccacatccacttctacccagtatttccctgattcctgtctgtatcaacacctttctatgttgatacatgtaagaaatatgaaaaaaatatagaatctacaaatgaacttcttaattttggcagaggacataactcctccccagagcaactctttgggtgcaactgtgtaaagtctgtggtttttttttttttttttttttttttttttggtcagtgaaactaagggctcttctgatgtttgggagagagagacattgacagtacatatgttgtacagtcattggtccagaaggtaattggtctcattttggttttctgtttatttctctagatttcaaaggtcaattgtttatttttcctgatggaagtagattaaaagatatcccttatataatgtgtggccataaaaagaaaataaaagccttccttttagaacaaagaaaataaatgtatgtatcttaaaaattacttaatacactttttagagtttttatatactgagctctactatacctagatatgtaacagcacttgttattaaaaattactctggggttttttaataaaataaaaagaactgacattatttgggctattttactttactaggcagaaaaaaagatttaaaattcagcactaatgatacatttatggttgacagatttaggtctggcactttatctttgagacttatgttctgcatgtccttaaaatgtaaacctaaaaatacagataccaaatctaatttaatagataataacatctgttgtcttcaaggaaatcagtttgagctgcatgcttggaggtcaaggaactcttgaactgatcaatttagtaaagactggaaagttggcattcataataaacagttttcaagtctgaacttctgatagagaaaacaaaacactaaataacagacaagaagaaattaaaaataactaacataatttcataaaatatgttttgaaaactgatcaatatgtgcaaaaatatttttgaaaagttttgctttatcatattgatgttcaataaataattatgtgttttgtagcagaatttaatcattatgtttgcataatcaatacaagcaatttactcttgaaataagagttatgataaatttagctatcaaacactcccaaataaatattcttgtattttcagacacctgtttaaaagcagacaagtgcataaattctttgttattgatatctcttagaagaaatgttttgactcgattataatgaaactgctgttacggcaaatatgtcagcttaatattaccctaaacctgcctgatagtattttattacttgtaatagtaaataacattccttctgcaaaaatgtaaaaaaacaaagagtttaaatgaactagttgtcttcatccaatttgcaactagcatactgaaaaagtcatataagaaagaatttattccatacattactatgctgctaggtaaactgagtatgaacaattaaatactattttgagatacatattaaatctttaaggtaaaccaaagttgcataactgaaggaattacttttggtaatgaatctttattaagaagtgataggtataattactttagcattagatatggtttggctaacatccccacccaaatctcatctcgtagctcccataattcccacatgttgtcggggcaggtctttcccgtgctgttctcgtgatagtgaattggtctcatgagattggatggttttagaaacaggagtttctctgcataagccttctctttgcctgctgccttccatgttagacgtgacttgctcctccttgccttctaccatgattgcaacgcctccccagccatgtggaactgtaagtccattaaacctctttcttctgtaaattgcccagtctccggcatgtcttatcagcagtgtgaaaatggacaacacagcatcacaaattctaatctatgaaattattatttgatgttaatatgtaagtactaatcatatatgtaaaaactgggttggagattcactacccatgtttattatttctattaatagtcagcctacccagagaaaaggttgttggttggagttcaaaaaacataattctattgagttacagtctaatctctgcttgattattgctatataacttcctccccagtcaagctctctcgatttcccttttttcatcttctctcttatacactagctactttcctgaattactctcacatctctgagactgaattcagctaaaagttattcctgttcaggaaataggggccagtttaaatattcagaattctagagagtatcttttaattacagtaaaaaaaaaatatgaaatctacactattaacatattttaagtgtacagtacagttaactatatgcccattgtacagtagatctcagaacttgttcatcttgtattattgaaactctatatccattgtatagtaactctagagagtatttcaatcacaaaagtgaattaattattttctaagtgataaattttaaaaagtaaatgtgttaacccagttgaatgccttcttccttaacataaatttgtcttttgtttattataaaagtaacttatattcaacctaaaaatttaggtaatatatgcacatattaagaaaacaatacaagcctctcattgccccacctgtgggagataactattgttaatcatttagagattatgctttgaggcttttgggtttacacatgcatacattttacttacagcagtgatattactttataattatagttcttaatcacatgtcatatcacctaaaaatattctacaatattacttcaataaatacatagtattccattatatcaataacctataatttatttaatttcctgttgatagacacttagtctatctcacttcatcactattatactaatactacaatgcaaaagtgatgtttacaccttttactattgtccagttatttcctagatgtggaatttttggatcagaagaaatacaacattttaaaactttcggcattctggagcgttctacagaactttgtaccaatttttatatctcagcagtgtaaaagaaggcttgttctccccaaccagctaacagttaataatcattctttgtaaattttgcttaatgaatacagttttaattagtgaaaagtgtagaagagagatttttgaattacaaaattcctgggtgcctgtagctgtcctccttattccccaaaccaaattaagtagtcttccaatgagtaaaatgaattttctttagttattttcagagttttcaactctacctatacattagttttcatggttagaaacaattatttccttgttctgacccagtgtttaggagagggagaataaagtttgaattgtacaatagtgttctttcaaatatgataactcattaataatataaaatattatttataaatgtttttcataatcaaaaaactgttattataaatgataatatcttatcaatttttctaatatcacttatatttatgccatgtggacataatattttaaaaatataattgtttcataaaataatgaaaggtggtgtatctatagaatctccaatacaataagtatttaaagttccttttattataaatcagttgtttggattatgaataagtctttaaatgtagatatcattttgaccatcatctgtatcactagcacatcatttgtttcaatatttgactactttctgtaaaagaatctttcccaaagattatatggcatggccccagcatgttgtaaataaaataatttaaaacagcatatctggcagagtagtaatggctacagttcaaagaatggagaggtctaaaaaaaacttaactgtattgtgtattgttaattattaaggattgcaaatacaaaaattataaaatcatgaaaaaagagtgattatagaatataagaaaacttttctatctctggtactctaggactggggaaaagtacgcacaagaggacaaatttggaaagagactcccttctcaaggctggggttcagaccttattggagaagacgtagttgtaacccactggttgtaacccacagaattgaagtagagaaagcataagtgttatttcatgatatttaacttttcagtttgtatttgcatgtgggtatatgtcttggttgccatgtgaaacatatttaaacccttaatatatgctgtgtgataatgaaattcctttaagcatctctcctttatagtgagcatgatgttaatcttcctcagtatccagctgtagggcacattgcaggaagaaggcactcccctttggtttttgggtgtgcatggttggtcaggagtgtgagagtgaggacactgatgatgcttgcccagccatgctcccagaatgcactgtcctcctgacatggacactgggtattccaggcctccgagagacagcagcagcagcaccctaattctctctgctgccccaggtttgtgtcccaaggtcttcaggacactgtggtcctcccagcagggatattgtatcaattcacctgctgtgcctgttcccctactcccattaagtgtaaatgcccatgtgcacctccactagctatagcttgcctgacatcacttgtattccagaaggtagccacggggcccaaagtcactctgtgtacccatacacccacctaccagttgtggctcacctgcgtccaatctgcactctgaatgttgcttactacttgcctcatgactacagaccatgtccagtctggcacaccgataaatttctctgtcatcctgtgggttacaactacatcttctccaataaggtctgaaccccagccttgagaagggagtctctttccaaatttgtccttctgtggctactttttcccagtcctagagtaccagagatagaaaagttttcttatattctataatcttttttcatgatttaataatttttgtattaaatgtcccctaacaaaatcactgtgtggtttctttctcatgatcagactcagactactccatgtaataatctttagtttgcagtttaattattaatgaatgctattttattatttttattcacttatatttaaaattttttgtaataatcatgattttttaaaatgagaaaaaacagtatgaataaaacaattaaaaagtcatttttccaatcactgctactgcttctcaatttttttgttttacttcgatatctgatcttcaattacaggttgacaaaggaataggcatactaaatcaagccttagttatgtctctaagagggcactagagagtaattgctgggaagagaatgatactataaattaatgaataaatcggtgaactgctacctgtgtcattaccctccaaagattagagttgttactccaatatcctagttttcagtaatgctcaattaggcatcaattaagaaattgaaattatgcgtggacattctatgacagtatttttcaaattgttgatcacattagttgtgaaatcacgtaagtatgttgcagttatttattttttaacttaaacagaattgaagtagagagagtgtaagtgtcatttcatgatattcaatttgtatttgtatgtgagtgtacgttttggttcccatgtgaaacatatttaaagaaatagctgcctaatggctctatacatagggcttacggtgtagctggtactaagtgctttgcctgtattttattgttggttgtaataaaggactttacaaaatacttgccagcttttggtgtttgactttgcatacttttacatacagagtgtttgttctgtttttcccatcttttggaatgacattttactatagtgtatttattccatagtttagagattctttggaaaggcagcagtgttgactctgcactaagattccaagaactctggcagaaatgctgtggaactattctaagtccccttagcaaggaggctgctactgccaccatgaactctgcccagaatggggctacctctgctgctaccagcactagcaaaatcaaggtcctctttcccagtgtaatccattctgaatcaaagtctagcatcggtacatttgatttgcatccaaatcacctatctgtaccctagcgacaaatgagtcccagtaataaagtttttttttttttttggtataacatatttaagtatttgatttacactaaagggaatctattaaaatatagaatattccattgattttaggcaggcatgtattccagatttccgccacatcaccttgtttttccatacagaaaactttagaactatacagaaatcatcttcgtcagaacagtgtttagcacatgaatcattatcaggcttgatttgtgaggaagctgaatgtaaaacagaaaagcattataaatagaaagctataatcaagaagtgaaatattgtcctccttgcttcattaagcttttattttattttatttttttaatttttaggaccttttgctctgagaccttaacagatagcatcaaatacaaaacaaaaactaatcataggaaagccttgatctgacttctggattcttgcataacctctaataatacacaatgcaactggaagtgttgattcttatcctgagggaagaaagaaacttacctcaggagggaagaaaagtcacttttctgtgatcataaataagagaattgcaattagtttatgccaacacacacacacacacacacacacacacacacacacacaccaccaccaccacaacaacaatatatgtatctatgtacccacatttgaatatataagagatttttgatgacttactgacaaataatttgtatagcatccataactagcacataaataattgtgccctaaaaatgctattttagcttaaagacaatgtgttgcaatattacatccatatggaaaatatgggtgttgtttggtccttgtggatctgttcagtgacaaagatgaatataaagacgactggctaagtgcctcaaaaaggcttgtcaaggttaggaagccagaggtttcttggcacagatctgtattttggcaaccctttcggaattacaggaagcatagaagccgtgcttcaccatatgttcggctcaagaagctgtccaccaaggagaggcatactgtttccactgagccaacctaggggaagcaatctggtaaagcaaattatggtaaattatcattgctcatttactgataattaatcaagtaatttttatcacctaataatgtgtcatgccctgtggtaatgtaaaatatatttgtgtttgagacaccttgaacaacaacagaaaagccctgtctttatgtgtcttacattctaaaagaaagagacagatattaaataataagcaagtaaaataaatatgattttagatgatagttgttatggaaatgaagaaaatagagtatgatacgagtcaaaaagcgcctttaaaattttatctccacattcctgatcattacttctatttctttttccccattggaacccaatttaatgcgcttgcactcatattaagaatgtagaatcgttggccagacgcagtggctcacgcctgtaatcccagcactttgggaggccgaggcaggcagatcacaaggtcaggagatcgagaccatcctggctaacacggtggaactccgtctctagtaaaaaaaatacaaaaaaaaattagccaggcatggtggcgggcacctgtagtcccagctactcgggaggctcaggcaggagaatggcttgaaccctggaggtggagcttgcactgagccgagatcgtgccactgcactccagcctgggcgacagagtgagactctgtcttaaaaaaaaaaaaaaaaaattgtttaatgtgagtatatgttttaaatttacctacatgttattggccatacatgttgttcagcatcttacaattttaaagttaaaactgcgtttgaaactcatccatctgactgtgtatgttcacttcatttacttgcttctacctgctgccgatttttccatagtatacatccactgcattttatttatgccaataagtaaaattgtattagatgtttagtttgctacgaattcctccactaaaaaataataacgtgatgtagactttgtggaggtgcattcatcaacttttggagaactttgttaggaaatagatcttggaatggaaatcctggacctaaacatattcaggttaaatgaatagtgtgagacttttctgcagaatgactatacagatggatattcttaccagagtataatgaattcccttttctctcaatagcttgcctttctaatgaatgtaacatggttaaattagcattttttattgcaaacaagcttgaacatttaaactccttttctgtgaactacctataaatacgctttgcctaattatctattaattttctggcttttttgcgaccttgttgatttatgagaattctttgtatgttctgtaatccagtgttaatttttttttctgtatcaccctttctgtgaagctttcagagacttttttttcctaagaattttgatccataaagggtttttttttttgttttttttttttttttgtttttttttgacaaggtgtctcactctgttacccaagctggagtgcagtggcgtgaactctgctcactgcaacctttgcccccccgggttcaagcgattctccgacctcagcctccgaagtagctgggactacaggcatgtaccactatgcccggctaatttttgtatttttagtagagacggagtttcaccaagttggccaggatggtcttgaactcctgacctcaggtgatccgcccacctcggcctcccaattcctgggattataggcgtgacccaccataaccggcccatccacgaagttttaataccacagatatgtgttatatgtttatatattacaagtatatatatgatttatatattaaaaatcactcattggttttaatattttaaaataactttctactacggtaatctgttaatttttgtttatcaaaatagctagtattttcatatctgttaaattttgttgaaaagaatgcttaattttgaaatattgattttttccaatcttatgagttatctcttttagttcttgtttaataaatattttctcaattgtggtttacaaagtattttcctatttgcccttttattcaatttataattctcctctcacatgtggattattaatacaacaagagtctatgatcaggatcgaattttacttttctcagtgtcataactggattttttcaagacaatttatcaagcatcccgtattttgcccgttgctgtgcccaatctctgatatgtatctaattttcatctatataaagacctatgtctgagttagctgggtttctccctcactcatcattctatactctttaatactgtgcgtttgcagtatgtcttaaaatctgtttggtaaattcccactcgttgcaatctttagtcagaatttacttaattattcacaatctataaattattctttgttaatattctatagtttgttgagttcttcataatatttcaggtaaaattcttatggtgattgctttgaatcttccaattgagatcattgttctacttatatgttacaattccatctttaaattgtatatatcactgtatttaattttttaattgtgttgattttttattttaatatctaaaaattcaaaaaataagagtatatttattgaaatgtctccctctcattctccccctccttacagataactaccactattcaatttttgtatatttttccagaagatacacacttaactgttaaattttaaaaaccttactgaaattattattgggtttaagaaaattattcatctggaaaagcaaaatacctgaaattttattttaaaatattgccataatcattcataatttttagaatgatgaaaaataattttaaaaggcttttatatttatactcatttttaccatttttgacactctttctttgtataaatctaagtttatgtcccatatcatattccttctgcctgaaggacatcctctgacatttctcatagtacaagtgtgctagcaataaatcagctttagttttgtctgaaaactattttatccttatttaaaaaaataatattttctctgagaatagaattactggtgtatagtttttgctttcttttagtacttgaaagatgtgactgaatattctggcttgtatgatttctgataagaattttgctgtaattcttttgttgttgttgttttcattcctgtataatgtgtcgacttttcttttttctctggctacctgaaggattttctcttttggttttcatcagtgtgactgagatgtatctcagtgtgtacctgtactcttcgatctgtgtttattttgtgtttattttgttatttattctgcttattggtttttcgagcttcttggatctatagtgtgctttctttccttaattttctaaaattctcagtcattatatctatctgtgcatatattatatacatctatacatgcatgcgtgcatttgttctgttctccatcagttctttctgcgggactgaaggacattcataatagtcatttgatggtgtcccatgcctcttaatgctctgcttttttatttattttttaaattttaccttcatttatttccgtgtttcagtttcagtcatttttacaagcatacattttatttttttccttagctagatgaagtccgagtacttatgtatccattgacggaattcttcaattcttgcattatgttttcacttttagcgtttccattttaatttttcttatagattttatctctctgctaaagttccccatcttttaatctatgttctccaccttttttactagattgtcaacaggtttcacatagttattttaaagcagttacccagtaaatctaacactcaggtgatctatgagtccagttctattgattatcttatctcttttcactcttttttgttggttttctgattttgactgaatcactcttacacatttatatgttaccaatcactttctcccacgtgtgtgtgtgtgtgttttaattttggctaagtggttgctctacaatatcagctatctgatggacttgagaaaagttatactttgatagttctctttgactttttttcattgtttgattggaagcaacaggttttcccactttccatgtgctagatgaaagcaaaagcacataacttttttttttctggaaaggtatgttaaatatattttttcaaatgccatattatgtcagaagaaatattaattcatttcaaatttaaatagacctttaaatgtcttatttttccattgcctcttcaaaccggctttggttgaattataaccacaatcaaataaaccctaaattcccttctttcttacttttctctttaaataactcaaagcaaaataacaatgaattctattcctgctggataattattaaacataataagaatcatcaaacgcgaattgatatgtcctcgtcagtcgtactcatggcaatttttattgcgttcacttatcatttttaagccaagttgttatatcttagtatttttgaacaaaggcttggaaaccccttaaaaatcacttacctccttgtttcatagtgttaatgtctaattacatgctacttatgataatatgtttatgaatttattttttcaacattaaaaacttaaacatagatctgagagtacaaaactctatgcttcatgcatgcatctaggctctcctccttcagaaatatgtttgaaatctcacattatatttataaatgtattagggtgccaatagggccttgaggttaaagatatgtgccaaaaactgttttactttctctttttattaagccaaggatgcacttttgagcttcaaattggtaagttctactttagacctcccagtgtgttatagtacgtcacaaatagtagcagagctgggaatccacctatcaaggtcctgagctgacatcaccaaagtgcaatctgcaagcttcagagattttgtaaaacttaacataatgctcttaaatttttaggttgacatctgaattttatatattgtttgtttagtagtcataaatattctattttgccagtgctatatattttcatgtggttaaaatatatctgcaaaaactttgtatcttcagtattagctattcaatttatggaaaaatatcctaattcaacagcaaagttaatccttattgccaaaccaatcgccaaatcaaatttgttgtgagtaaagagttatttcatttttttaaaaatttaacttgttattatttatcactcctacagacaactcaggagtgaactgtctaagaagacagatagctagctagagaataagaacacagacttgccattaatagtcagctagtggtgactaactatttagacataaaaaaagtaaatttttttttttttttttttttttggtggcagggtgtagtggctcacacctgtaatctcagcattttgggaggtcaaggcgggggatcacctgaggttaggactttgagaccagcctggctaacatggtgaaaccccatctctactaaaaatacaaaaaattagccaggtgtggtggcacatacctgtaatcccagctacttgggaggctaaggtgtaagaatctcttgaactcaggaggcaaaggttgcagtgagccgagatcatgccactgcaatcctgcctgggtgacagagcaagactctgtctcaaaaaaaataaaaataaatatagttaatcacctggatgatgcataaaaagtgtatttgtggtgacaaagtatattttttgtttttgttttttgttttttcattcagagaatatactagactaaaatttaaaatggctgggagttaagtttctattttgtaaactgggagggggacctttgtgaaagacaagttggaaaagaaagacaaagctcacacactactgcaggcatatcaaattttaatttcagataaattacaaatggatgtatatggatgtgggggatctgaaaatgttccacttaaaatgaatggttcctatgtttcatctggaatgtcttcattgacctttcggaatatgtgggcctcatttgaagactggtgttctagtttactccagctatccaaagctgataatgacctgaagggaatgccttctactgcttttcaggtctagttcacttaacgttagtagcactaactttactgagggatactgtatgccaaataatgctgtacacctcacagaaatcttacggatttggtcatttatcagtatccccactttaatgcagtaaactgaagtttaggcctaacaagtaatgcaatcaaggtaacagaactaataagtgttagaatccaggtagattgactccagaacctgtgtatctacgggctctattgcctcctccaggagcctttcttattatcttaacagagatctccttgttggtggtggtgtgtattttagtaggttgatataatgtagagcattgcatcacaaactttaatgcatgtgggagttacatagagaattttgttaaaatacgtactctgtttcacgaagtctttggaaaagtctgagacgctgaatgcctaataagttccaggtgatgtagtgctgctagtcctaggtcctcactcagagtggctcaacagttctcaatcctggaaacacagcaaaatcgcttaacgcattgtccactactgaaatttgaagagaggttaaaagcaactaaattttgaaaagctctcacatgttattcaggataatagtgaaagcaaagaaccacagttaagtatttatgtctgaaactatacgaagggttggttcaaagagaggagctagaggatttgtcttaaagcttatctggggatctagataaagaaaaataaaggagtccatggatatggtaagactgaagtccatcatgtcaaaccacagtcttactgtgtctactgggcacagctgtcaacataataatgtgccctctgtaaatgggagcgcacatttacagaaagacagtgctaacgggagagtgggttagaaagaaatcctcagttgattgtgatacgaccttctcctgtgtttagaaaatctcaaattttgagcatttattgtccttgctttttaattgtatgtagtattttcagattcttcgccagttttccttctctctaccccttaatatactataaatatctcagaaataaggcttatgacattttctccccttttcccactgaatgaaagaactcagcaagttctcactcactgcatgctacatttattaatttattaattcaacgaatatttactgtgtcaacaaatatttcctatgtcaaccaataggtaagaagttaaaggtgtaagacccagtccccatcctcaaagagctcacagtctaggtagggtagaagaaggaataaaatatgcttgccataactgtgtatggaagtgttttaaggaggttttcaaaagatgtcggaagcttcagagagaaacactcagcctaggaaatttatccggaaattagtggggtaattaggtctagattcaaagattaagtggaggtttatttaaatgttattttcaaatagagaaaaatataaaatatccttatgccaggtgaccttattggccagagttgttgatctgaagtcaaagaactgttgtggaaagggggacaaaatacgatattttactgttaaatgaattttattctctgtccacatgaacccatgggcagtttccttaatagcaaaggagaaaggcttggtgcagacattttggcatcatttggtattagccagctgtgcatacttgtatagaaaaataaatgtatttacctggtggttttataatttaaacatctggagagttaagcagtttaaaatcaaacactgaggctatgtaatcgttacatatgtgtcatagatcacatacaacaaaacaaatctctgatacatagaatagaaattgaggatggcttctccatttattctgcaagttaaagatgttgagcaagcctaattctagctgcctgaaataaaagctgtttccataatataattggaagcaaattgtctcaggagtcacaatttctaaattcctatgatgggaacaaatctatttacagaaccatcagaatatgttttctccctcttttaaaaatatcaaatcaatgtcagtggtatagaaagcttgtgatcacctctcaatttttcattagttcacataagtgtctattagagcacatttgcacttactggctaattagaaaatttctaaaaataagatgattaaaaatacaaataaaatacaaataaaaatataaatgaaaaaaaaagactccttactctgtgccaagtaacatgttttcacaccaatatatcctttcttagctcaaagtacttgctcctaagctctaaaattcccacagaagacaccttactttagactcgtctatctgtgagtgccccatgtacttggtctttacagatataaagagaatgcagcttcttcctttcctagcgaagaaagttagttttagaatgctaaagtgagtgaggaattaaggcaattttctgaataagttagaccaagtcaatctctacttgtcatgaaaacatctacttttaattttttttttttgagacaaggtctcactctgtcacccagggtgcaaggcaatggcatgatttcagctcactgaaaactcttgtctcctgggttaagtaaccctccggcttcagccttccaagtagctgggacgacagacgcaagcgaccacacctgggtaatttttttttttttttttttttgaaagacaaggtctcaccactatgttgcttaggctagtctcaaattcctgagctcaagcaatcctcccgctttggcctttcaaagtgctgggattacaggcatgagccactgcgcccagccacatctgctaatttttaacttagttactgttcaaaaagttaaccctgttggagagagagagagagaaatgactattcccttctggtaggagtaactaaattctagacttattggaattttctaatttactttccaatatcagtttttaatgtgttccctccttctcttttggctagcttgcatcatgtcctgcaaaagatgtctatgccttaatttaagaacctgtgaatatgctaccttacaaaggcaaaaggggctctgcagatgtaattaattaaggatcttacaatgggaaagtactcaggtgggcaaaatgtaatcagaaggctccttataagaaagaggcagaggctcagagttagtagtaggagatatgagaaaggaagcaaaagctagtaatgatgcccgtaagccacaagacaaggcatgcaggcagcctctagaagctgaaaaaggtaaggaaatggactgtcccctcaggacctccagaaagaaccagctttgctgacaccttgactttagcatagtgaggttgatattggatttccaacctccaaaactgtacaataacaaatttgtgttctttcaagctactatatttgtaatgtgtatataatgtattatggtagcaataagaaacaaattcacctggactttgtacaaataggcactcaagtaatttctataatatgaagggagtgaatgaaattaaattcagattgctaacccaaaagagtaatgtgggaatagcagtaagtttcgccatagccttactgtcactatcatgacagttaccgaaacagaaaagtccaagggtgttctctaagtctactaataatttttaaattgattcctcttgagaagagcaaaaataggggcaagttttcactctggaacagaggtaaggaggaaatgtgcatgttaaacactgtatgtttgctatttaatgtggcaaaagaaagaacactactagaaatgttaagatgcgcttgataattttctctgtgggctataacataattcaaagtcatgtttctgactgtcaatttctacgtaaccagataaataggaatatagtataatttttgcatattgtcaaatgctgcaactgtggcttgtattactgggaaaagtgcaattcattcagatgaagaaaaactttttaaagtgaagaacttaatatatatttttaaaaattcagttattttattaattgatcaattttgtcactaaagctgaagttctaatatgttaccagcaatgtttccaaagagagttttattcatgaaatactatttacaaattgtgaatttgtgacccatcccaaatatgccccgagagcattaagtagttatacagtttaaaatttaagtacacaaagagattatgggataaagttacattttttgaaattattatattgttacatgagtcatagattacttctctctaaataaatcatgacagcagcttggtggtgctatttgcacagccaccaccaaaccagtgcaaagatccttgtcaaagcatgctgaatgcttttcctatacaaatactaaaaagtaaattctcgaattttcttcagaatccaacataaattaattgaatcctatgccataatctaactcattagtttctaagcctgaattcctcagagttgagaagttttgttgctttttataaaaacttctttctggaaaattcaaaatacaaaagtagagttatactgctttcaagctaattttaatataaaattaaaataatcttctaccttcaaaatgaacaactatcaactcagggacatctaagttgcttcatctattattcttcctccaaatatagccataccgctcaacacctggtttctactccagacctagtgaatttaaatccatctgtatttatttcaacctgttcagctgcttttgataaccactcagactgaagaattactacttaaaaggaacttaaatcttacctgatgtttttatttttttaattagcttattgttaatcacatgattgttttacctttttatttaatatttctccttttgaatactgaatttataaaagttctttaggcagggtgacaaatagaaccaattaaaaattttctatctttgtaggttgttacttaagaatttcagatattctaaataaaagcaactgagattcttgaataacattttgtatttaaaaggatatttcattaaaaatagcaacaaagctgaaaatttaaatttaaaatttagaacaataaacagtctgtatttaactaccagttccttggaaaataagcagattgtctaaattagcgccatgttccagtgtgacattccaggtttatttttctctaagccatggttttctgtgggccagagcaatgtagaaacagtgatactgatactccagaagctctgccttcccattcagctaagcctagctattgaatctgaccaggactctattcggtcaaccagcgggacgactcctggtgaatgccctttcttcatgttctctgtaactacctaaacaaaagaccgtttgacagatccatacaaatcttttgctaagatttttagcttgtctgccctgtgtggggggaggaggacaattttttttcctactaggtacatacctgctgcactaagagccatgtctgactgtccacccaaccagatgaggtaattcaaccacaaaagtaattttttttttctttttctttttctttttcttttttttttttttgagaaggagtctcgctgtcgcccaggctctcggctcactgcaagctccgcctcccgggttcacgccattctcctgcctcagcctcccgagtagctgggactacaggtgcctgccaccacgcccggctaatgttttgtacttttagtagagatggggtttcaccgtgttagccaggatggtctcgatctcctgacctcgtgatccgcccacctcggcctcccaaagtaaagtaattcttttaaaatgcaaacatgtctgtgacacctcatgactaaaaccatttgctggtttgctggttcctcattatccttaataataaaacctataatccttaatatggccttataaatacaaacggtctccttttcaccttaaggcccatacaggtgccactgtccccatgtacccatttttctctaatgtctactgaatgacagttctccagatgcatcttgaatcataaaggagtggacagagataagaaagcacagtgcagttagcaagctggggaggcttagaaatgccagaggccaggagaaaaatgtatacaagttcctgcttccccactacagctttctgcaagcagtaaaactgggcttgggtgggaagacatgttaattttttaaaagtttgaaatcttttgctattgcaaagttgatatttaattacagatttgatgggcattgccacttaaaatgactgtaggaattatttctattcaaggttgatcagagaagtcatccaggggcagtagaagcggcagccccaaggagcagatttaatgagccacaaaagtaaaatgtaaacttgttctttgatctcattctgtgctctgtgtttacaatataatgttcacactgaattagactgagaagtcctgaaagtgactccttaaatctttttgcttccaagacttgaaactccattaaaagcagaggttgagtaagttgcatttctgcatacctgagatttttaatatgaaatcaattcctgtcacatttgactacagtaccctctatctccttgattaaaacctttcaagggtaccctattggtgggagtaggaagaagaggaagttgaggaggaaagagagagtttaatgaggccacaagatcttaaaggacttggtccttgctagtgttcagcttcatctcccactagactatccctgagactgtgctgcagccaccctagcctttttctctttcttcagatgtgtaattctttgatcgctaaatcctatcctcagctctcatcctttcacctaatttctatgtaacctcaggtcatagctttgttatttcctcagtgagacttttatggacgtgtcacatgctttcgtaggaccaaagactgtggcacaatggttttaattttacaagtatttaagtaattatttgactatggactctctcctactaaactaactgcagtatctatgaggccaagatcacatctcatgaatttaccagcttatcgtgggggccttgaatagttactggtcagtagtagttgctcaatgaagaattcttaataacttattcagttattaagttatcacatccttagttctgtgtctttggttctttttcattaagttttctttcctttctcgttctctaatgccaaactgaattaaggttgagattaacggcgttgtgctaattttttgtttgtttggtttttgttgttgttgttgtttctgtgacctagcttttttgtaggagtggaagaggaatttttctttttgggaatcctcagaattcataaagaaaggaactgacaacttgatcaggaagcctacccttcccttccattctcaaaacacaccacattaggcaaagaccctctttttggtgctctctgcttctctcccaaagtacagcattctctggaccactatgtcaagattattgactagttgctctttacttttgcatttaattctttatagctaatttgaatggttataattagatatgcaaatatattttcttgattattttacaggtgtatgttttaatatcttgctgttacatttactcaaagcgtatcttaaaatatgtttcttaataagacagtgcaaaatgacgttttaggggttgtactactgaatgaatctactagaaatgtcattatcacttttagtcaaatcagctctgttcctctccagcttcactggaagttgaaaaatctgtggccttcaaatgtcctagtgtagcacactgcatgtggttattactcaaaattgtggcttcatggtttcattgaagaataataggttccctttaaaatgtgataaatttttaatattctaaaataggattcttttacctagtccaaaatctttaaagtaatggacctgtgtacatttagtcattatgatatgcgtgagagaacatttttatcactgtcttctgatctgaatagtttatacaaaagcttctctaatgtggatatcaaattctaaaattttgtgacaaatttttcttaatatgtttatgtatcataatatcagtatatattgaaaacaaagcttctatcaagtatacttgtaaaacctattaatttttgctatttctcaggtatggtatgcttaaaaggattttgagttaacaattctctttgatttacctttcaactttttacgcatgttcaatgtctatatcaatagttcttaaagattttgaaataaaaaagcgaaagcacattgcaaaccaaaactgccaaccccatgggatgcttaaacttctcattttctgttttaatcctaatacaacttttaattctctatgacttcaggaaagtctcttaaaccctatgaacctcatgttcctcatctgaaaagtgagataatattcatcttttatggtcactgtaaggattgaatgatgtaacatgtaaaattacctagcataccttctaatacataattgtttctcaataaatgttttcttccttccctctctcaaccaatgattctgcactatccttaatagacagaacttaaaacaggatgggaagaggcttactgtgacgacccttctctattttcctctgttaatgacaacttggcataaattctagttgttaagggcctttatttctacaaatttgtcactttattgctaataatgataatgacaagaattgctaacattcagtgtagtgcatgtaattctcacaactctgagggaggcactatttttatatctacaatttgctgatgataaaactgaggcaaagagtggctgaggcatttgtctaagaatgtgcagataataaggcatgggtcccaggcagactgactacagaacttgactgaaacattatactacagggacttaccctggtgaagttctcagccattggagacatgctgcctaaggtcagatcctgtcattgctatctcctatctgtgatctgtagtccctaaactctccattattcagattgctgctacttctgtcaaatgggactagcatttgtaagaattcacagaggcagtatttaaaggggtttattcaatgcctgctacaatggaaatgagtaaaagtgagctgtttctgttaatggctagaaacagccagttttctttcttctcttcctcgatgctctgtctaaagcatctgtaagtttttgtatttttaagttaatcttcctcctgtctccttgattcctcaggagcagttaacactgaccgaaggagtgtacaactgaaatctgccatcattcatatgatggactttcccccaaatccacttctccccattcatgacttttttcctaaaacagtttgcacagctcaatgtgactacaacatatttaagtgaattcagataataagcagggcatatctttttaaaatgatttgtaatctttttgtggagatccttattttaatagctcagccttttatggagaataatttgttattcacattgaaaccccttagctctacaatggaagcaagagcttttactgataaggtacctccttgctgccatagcacacgcctaccttagaaacagttttagtaaaatttactttgaaagaacatatgatgtgtcaaaaagaaaaataatcacgaggtctatgaacctagaaagtctgaagattttagtaaatgtgactgatgatatgaacttaggtgattgcatagaatatatattttattgataaattagaagttgagaataaatctttccttgtgttgcgaaaaatagccttaggtctttagtttctgtccaggtgtgcaaatagaattgccaatttaggatggtctccttttatctatcctttattaaaaaaccgaaagccagtagagtcgagggcatagtttctctatgtgtaaataccaaagtggaaaacagcatgcttctatgcagtcccaagcctctctcaaataagtaatataaaaacctgactttttgtgcttgcttttagcaatatactcaaaagcaaacaaaagagagcatgcatacatgcaattatctgttgatatgttaaatcatacaacatgctcactaaggaaagagacatgctaatatgcataaacaaatagtgttcattgtacacctactgtatgtcatgctgtcctagatgattttcaagagctctaagttttaatgttgacaatgtagcataagtactgttactatttcatttaacaattgtgatatctgaagagtggaggggcttacaacacttacccaacacttacagccaaaatttaaaagccgatgtttcaactcacatctgtgtggctccagataattcttaggaaacaagtattaggtcagaggagaaaagaaggagtaggtaatagaacagaaaaatattgcctttccttaataaatactattagagccacaattaactctgaatctccttagcatggcatgaggtccttttgaactgacctgctgtctacatattcaatctcattgtctaacattatctcctgtccccgacaagtgctctaagcccatcctgagatgttcccttttctgctaatccgtgactatttatcatgtctttatacctgcctcaccagtctcctccgttttgaaagccttctcctctcattaacacccaactcacatattgtttcttcttagaagccttgcctgttgctcctcttaaatctacctgctgcatccactccaaagtaaaattaacaaccaccccaacctgaggttccacagcagtttatttttcatgattctatggttctagcattcccagaactaatattcttgcaatttttaagggcagtttgaatctatccacgttatgaaaaatttgctaatttggactctgtgtgtcgttgtgtgtgtttgtgcatcctcatttgaaggtctgttgtaatgaacagacttaatttattacacattgttgaaataagagtcctaataccaaaataaaattatgaatttttgttagcatcctatttttgcatgaacatattttacttgcaagtaagagaagaaaaattaggacaaaaataagtttatttccctatatttcaaatgaaaaattagtttagttagatcttggagtacatattatacttcctggttgaaacagaaagcatacaaattccgtatttatcctcacaaactaagccttagtttattacattgttaaaatgttttcacttttgaacactaagttataagcaatggagataaaaatgaatgtatttttttcctaaagaaatgtaaatatcatttagcctgctaaccacagtttgaataggcttataaactaaacattttttaaaaactttataaactaaaaagaaaatcaaacctgttgtaaggttctaatggaaaagtagatttgccccactcctaacccacgtcaagaggatttcctcccgtttccactgagtcataattaaggtaaaattttctgcttttttcctgcgaaggaaactattgtcctatcctgctaagcttctttagattttactctgcatccttaaaagtatgtggaattatacggaaagaaaacattctcattctctcaaaacttttctaagaaattatgagcaacatatttacaccatgacctgcacctgtcttcaaaatacatcatgcattttaaagtagagaacgtatttctaacaagcctgctattacattctttcttgtcctagtagcggttaaatatttgatagatgattccctcactcccaaactaaattcagtattgacttgatgattcttttttcccccaatttgagaaaccttcaaattgaaatagatatctttctggttatatttcaaaagcccatacaggcatctgtctctctctgtctctgtctttgtctgtctctgcctccgtctctgcctccgtctctgcctgcctctgcctctgtctggctctgtctgtgtctctctgactcatacacattttaaatctctgatgtgccattcatatatattaatgcatgaaagaaatgctcataaaaatggaaatgaggcataattttccatggagcaagtagaatcatttgtaaataagaacttcacttggacttaaaacgtttgtgaatccaagtgtttagtttccaatgttgatgaatcctttgacagctttctaattatcattgagttagtgcatggtacccttcaggaactaaattgaagccataagttcatctcttcatatatcacctctaaagcttttagttgataatcgctttgtccttcttggtctgaacttggggtttttattaccaaaaaggaaaggctctgttacatgattaaacatcaactgtctctacctacccaaattttgttgtttgactgcatattttatgctgccttttttatgacaataaactctatacttgtgtaaagtgacgttgccactgtatttccttgatttattcgatgatgcttccatctggtttccattacaatccagtcattttcatttaagtaattaaaacatccaacatagaaaattgggtagaaagcagaggttaattataaagttataaaggagaaactatttacacttagaggcatttctcttttctctctgcccatagaattcccattgctgttaatgggacttacagggatctattgagtgccaaatagacttaaagtgttagatgttagtaatggaaaatgaaatttaggtacatacaattgtgtttaatggagtcaagtaagtttttttcttttttaaatttgcctgaatttgacaaggattttttaaatctcagtattgtattatggatttataaaaacattttttaaaatggaagaagacattaaatccacctgatttacttttctactaaacttgttactaaagtcaaattatctggctgaaataataaatctcttatacatccctaggcttgtcagataacctttaaatactacttttactttatatagtgtaactatataaagtactactataatggtactactatactattactttatggccacagcagactcccattatatttctagtgtttgacgtaagtttattcattctcattcagttgttttattcaagttatggtgcattacaacttgaaaattgtgctactatattttcttttgggaacagtctttattgaactcttatatttctgctaagattctaagtcagatgtataaatatgaaacttattgaatgtgtagtttcagccagtaagagacattcagcttcatatgaggtgataagatgtagatacatacaacaattagaccatacgaaaagaagtataaaaggtggatggatggacatagtatttatgtctaccgttaatcgtaacttttagacaactgaaataatgttggcagttgtagaaaaaaagggcaacggagtttacagaggcaattttctaaatattgactgtggcttaatggcttaatggcttaatgtttgggtgaattgtgctttaaatgttctcacacaagtgagaacatttatataaggttcaatatgttcaacagatattctaattttctttataaaggatttgtttagctggatagataggaaatcaaattgtttgttggtaattctttaattaactactgcctttagcttcctttattgtgtttctctataacttaattattgttttctgttatcactttctcaatttggttgtcttaaaatgaacctcaaacttagcatgcttttctttctcctaggataacttgaccagtcataaattcctgacgtattttgatatgttcagccttcattgcttggtttgtgattttagaaagcttaacagtattcttttaatcattaactttttaaaaatttggttctgctgtcagaagcaagacccaggatgttctgcaacttaggtgaactaaaatttgcttatacttgtttctatgggattattttcttctacctgattctaagttattttctatgaaattctttttttccttatttttaaattggtacataataattgtatatgttgatgggtcaaattagggtaattagcatattcatcatcttaaacctctatgaaattgtttttaaaagcactagtggaaataataccatgactaataagagacatatgtgacaataactatgttttgcattttaatggactgtgacttctagattttattgtagttacatttttataattgatcatcatgtttgccaagcaccgtattacagtgctgtatttcatcatcttatctgattgtcagagtaagtgaaggcatggaattgcactcagtgttgccagcatcctgcttcccacactctgtcataacatttcccacactctgctggcagtcaagtaatcactgtaagggcaaaaataatactttattcagtatttaacctccaaaatgaagcacaccaattgctatatagccagctccatttaacggtccttgaatgaatttttactaatgctcctgggaactttcaaccttgtgggcaaatgagccgactttatcatattaaattaatgttcaaaacaaaaggtccataggaaatcattcttcttgtttgttctcaatttcacttatttattaaaaaccactgtttcagcaaatacattgcctattgtttctcaaacaaggaacagatgacaaaggcatgttgtttgtgcctcaagttccttggttttgaaaattccaattccaggttttgatagggagtgcaagatacatatagtaatccttattcttgaaaggaaagagtatgtatctgcttgtgagctatatttatatatacaaattttaaatatatgcatatatatgtatatacaagtgatatcagtaattcatttaacctagttgtaattcatatttgaaaggagatatggtgtccagtgatgatgagcattttttcatgtgtctgttggctgcataaatgtcttcttttgagaagtgtctgttcatatctttcacccacttgttgatggggttgtttgtttttttcttgtaaatttgtttgagttcattgtagattctggatattagccctttgtcagatgagtagattgcaaaaattttctcccattctgtaggttgcctgttcactctgatggtagtttcttttgctgtgcagaagtccatattttatttctattttctttgtttttaataaatgttcatggatattacattatatttagttatcatgtgtctttagggtcctcttggttgtgacagtttctgactttccttattgttgatgagtattgctcaactattttgcaggatgcccctctgttagaatttgtctcctgtttttctctacgtaagattaagataattggttgttgggaggaaataccacagaggtcaagtaccattttcatctcatcccatcaaaagtacatgctatcatgctatcatattgatactggccttgatcacctcgctgaggtagtatatgtcaggtttctccactgctaagttagtctcctcctgtcccccctttccatactgtactcttggaagcaagtccctacatagaggccacagcgcaggagtggaaagttacgctccactttcttgagatagagtagctacatacattatttagaattattctacgtgggttgttttcctcatcacctcttatttattttgttattcaagctgtcatagctttggccattgggagctatcccagttgctcctgggctcctttgacacactatttttttttttttttcaaattttcatactccttttttcatactccttttttcatttttaaaattttttgaatatgtccttgcattctgccactactggttgttccaagttgttgcatatttcctgcctcagacctagagtcagtcgtttatttaaggagccctaatttctttttattagagaatgttattagaaaccagtatcagggtgctaggcatgtttgttgctactgtctgccatttcttctaggccctctaggcagacagagcaaaaaatatatgtgcttaatcataacccatgtatagacatatctctctaaaatatctctatatgtaaacatctatatattatgctaaatatgagttcataccaatgtctacaactctaatccatcacaacataagtcattctagcttcctctccttgcttatctgaaaaagctcactgctggttctatctgctgtccatttattcagttccattccaatacattcatgtagcagtatcagaattgttaacctgtaccctgtggaaaacaactttatcaactcaagtacactgtttttgtgcacctccttttgcctctagcattatagacttgacttattttcaaagttatttaggtcagcacctttctacctcattctcttcagtgaggtttttcatatatttgtcgtaggaagatagattctcttgccataggaagtttttctaggatcatccaatctgctaaattttttaaatgtctatacattaagttttactctgtgctgtaaaattccatgggttttgacaaatatgtactgtcatgtgtccaccattacaatatcagtaaaacttggaataattttgctgttctaaaagtcctctgtgctttacctatttacccctcttccttcctctcgaggctctggaaacaactgatcattttactatttctacaagttttgccttttctagaataatatataattgtaatcacaaatatgtcagctctcaatactggtttatttcacttagccatcaaaggtgcatttaagattactgtggcttgataggcaatttctttttattgctgaataatattttattatatagatatactacaatttgtttattcattcatctgttgaacatcttggttgcttccagttttgggaaattatgaataaagctgctgtaaacttttgcaggaaggttttggtgtgaacataacttttagaaacaacagggtttatacctaggagcaagattgtttgattttatggtaagactatgtgtagttttaaaagcccaccaaacctttttctaaaatggctgtaccattttgtattcccacctattgccctacattctcactagcatttggtattgtcagtatttttagttttcacccttctaataggtatagtagtgtctaataggtgtgaggttttatgatattgagcatcatttaatatttttgccatctgcatattttctttgaagtatctgtccagataccttatgcattttaaattgggtcacttgtttccttattgctgagttttaaaagtcctttgtatattttggataaaagttttttggcagatatgtgttttgtaaataaattacccaactatttcttgtctgattatcttaacagtttgttttacacagcataagtcttttgtttttgtttgttttgttgctgttgttgttgtttttgagatggagttttgctcttgtcacccaggctggagtgcaatggcatgatcttggctcactgcaacctctgcctcctgggttcaagcaattctcctgcctcagtctccctagtagctggtattacaggtgcgtgccaccacgcccagctaattttttgtatgtttagtagagatggggtttcaccatgttggtcaggctggccttgaactcctgacctcaggtgatccacccacctcagcctcccaaagtgctgggattacaggcgtgagccactgcacccagccacagcataagtttttaataaagtccaatgtatccttctttgtttcatagattgtttttggtactgtatctgaaaacttcttgccaaactcaacatcacttatattttctcctgtgtatcttctagaattttttgagttgatttaatatttaggtgtttgatctattttaagttatgctttatgaaaggtgtaagctctatgtctagattctctctcttacacatacacaaatgaacttccagtcattccaagatttgctgaaagataccttttccccattgaattgcccttgcttttttgtcaaagatcagttgactgtattgatgtgggtctgattctgggctcttctaatttttttttttttctcaccctgtcttatagtgctaatcttctattctgttgatcggtgtatcttttgtttcaccaacaccaggctgtctggattactgtagatttttagtaagtcttgaagtcaggttgtgacagtcttccaactttattctttagtattgtgttagctattctgggtcttttgcctcttcatataaattttaggattcatttgtcagtatcactaatattgtgttaaggttttttgctttttgtttatgagagatatttccctacaggtttttgttgttgttttgtttttgctatggtggtgatggcattagaaaaatagcctcatagaatgagatagaaagtattctttctgctttcctttgaattttaatttcaattatttttaaatcatcggatatttaattgtataattttttgtaaatatgcttgctctcttgtaacattttaccttgtttatctgttttttcctttgaaacattaataattttaagtattatcttattgtctgcatgtgtacaagtcctttcttgttaagctttgtatcaatatgtcttttgtaattttaggttgtacattaatgtttcacaggattttatttttcagaattccatatgatttggatttatgagatatcttaaaaagaggagtattctttgcctctgttaatgttcccatggatgttagtagctctggatcactttttgtgtctgtttatatatacatacatataaatgggatttattttttgtggagtcaaaatgaatacagtgggcatgctttttctcaaacaatttatttttaaattagttgtatgttctccatgagcttcagctatacatggagttctcaactccaaatttcaacttaacttgagcccaatagtttctcttgttaggttctgacccttagctagttacgggcactgattttttttgctaccacctatgggcagttataacataaacatcatcttttcttttcatctaatatgtgtttaaagttgatattgattacaatttattcatacattttatgtgctttctattttatgtggagaagattcagttatttagattcttcagtgctagaaaacaaaatctcattgctctctaacttgtgatttattaatgctaatacattgatctgtctctattactaggtaactagctcctatgggccattcccttgtctcattcatgtatgggccattcccttgtctcattcacatatgtcctaccttaattatctgaaatagctatttgtgaagaataagtatttaatactagattaaatgtgtgacaaaatgataaaccacataacaaaacatatgtatcttctgtattaattttgaatatttttaatattatgggtttctctccacttgaaacataatccacttattttgcaaacccacaggcacatattaaaaacaatgaactggatttctgaaatcaagtagtgcttatttataactattttaatctttcaggttcgtgcagaaataaaaaatttctgatcatctgactctcagcctcaattaaatcactacactacttttgtctcataacactcaccaatttggtagagtttttttttttttttttaagtttgactttaatcagggctgaggtaaacctcaccttaatctcttttacattatttcctttccccataaagaacaaaaagtaacataatttgatgggaagaaaaatacctctccaaaggaaaatgtattatatttatgatgaaatgaagaccatatattagattggacatttctaaaatatgagcaaaatctatatatttttttaaaagcttgcatttaacacgtgatcaacagttagtgggttggtacatttgcaaataaatgtggcctgcctcaaataattattgtgtaagattttagatcccccccaccactcctgttataatttaaaaatggcttgataactctttattgagtagtccttctgatactgtttcaggaacatgtagttacattaagttttggaaaatctttgttatttgaaagcagtatgattattttcttaagaacccaaataggccgggcgtggtggctcacgcctgtaatcccagcactttgggaggccgaggcgggctatcacgaggtcaggagatcgagaccatcctggctaacacggtgaaaccctgtctctactaaaaatacaaaaaattagtcgggcatggtggcgggcacctgtagtcccagctacttgggaggctgaggcaggagaatggcgtgaacctgggaggcggagcttgcagttagccaagatcgtgccactatactcaagcctgggcgacagagcgagactctgtctcaaaaaaaaaaaaaaacaaaacaaaacaaaacaaaaaaaacgaaaacccaaatatccagagttcaatgttgtggccaatgtaaagttgggtaccaaattgatatataacaaacggtaagaagacaaggttttattttaagattcataaaatgataaagaatcacaaaaaggaagtaaaaatttatttaagaatatagcttaaatacgtacatatcctttactgctttatgttcttgtggttcctttcaggatgataaagtcattttacactttcaccgtttagtactcgttcactcattcatgcattattcatttgttctttatcaatttcatgctccctttccagtgttatactggagataagttcctttgtttgctgacagtgcttacttaagaggacctgactacattgctgttaggctttctatgcctactatatgatgggagtagattgcctatcttcttcattctttacttcactaaaatgcaagctctttagcatttagtttgacctgtactctttattttttagtgggaggcctttaacatttcttgcacaattatttataaagtgagctgaaatggtatctttatcttaatagaggtttaatattaaaactgagttttgtttgttcgtgaatctcgttttgaataagatgcaaattgatctcattcctttgtaatatttgtctagctaatcaatatagccatttgaaggaaaattctacttatattgtatatatagttacttgtatctattactgtattaatctatgtttctatacacaaataacattgctgggatatacacagaaattgatataaaaaataggaactgtttcagatgggagggaggattactattttatatgtataaggatgtttgttatgtacctattatagtattctaaaagaaaactagttaatattcatggattttatattaattgtgctctcataaatgacagattttctatttctgcattattttatattcttgttttaaactatgaaaaatttattgtctgattatgtattttataagtaatgttcttattaatagttctcttacaagaagtattttcataatgttaaaacaacatgtttaaagttagtgctttttagaataagtatacttaatagaaaaaaagatgatacaattacattactccctaaatagatgagtttattagtaatactgtttataggacaatgatctttttttttttttttttttttttttttgttttgagacagagtctcaatctgtcaccgaggctggaatgcagtggcacagtcttggctcactgtagcctcctcccaggttcaagcgattctcatccctcagcctcccaagtagctgggattacaggtgcacaccaccacacccagctaatttttgtattttttgtagagacagggtttcatcatgttggccccactggtctcaaacttctgacctcagtgatccacctgcctccgcctcccaaagtgctgggattaccagcatgagccaccgcaaccagcctgctctttcaatcaagtgccctatatacctagagtccttcaaggtagcaaatggatggaaaaatataattttaaaaaacacagcaaagaaatcctccctttacacaaaaagcaactgcaaaggctagttgcaacattgagtgtgtgtatgccaaacaatttcttctgggcatcatgtagcatatgtcgataaaaccctatggcgggaagagtgagctatgtagcatgagcatgacataaagcattgccagatggtacctgcaaaaactagttaaaatatgtttaaaaccggttgcttcagcagtggttacaataaacatgggactgaggggatctcagtgagcataagtcagataaaccaatatcacagactgttaatttgctccagtacaaataccagatcctacatgacgtgttgtttaatgttatggtagcttatcattgtgttagaattctccagagaaacaaaaccaaaagtgagtgtgtatgtatgtgtgtgtgtgtgtgtgtgtgtgtgtgtgtccacaattccctctattttaatttaattttttttatttcagtagcttttggggcataagtagtttttgattacatggttgaattctatagtgttgaattctgagattttagtacacctgttactgaatggtgtacactgtacccagtatgtagtctttttatcccttttgctcaggtgaggtcagtcttttgttctgttcatgcctataactgattcgatgaggcctgtccacatcgtggagggcagtctgcgtgcacaaattttactgattactgctgcagaaatatccaggataatgttaaccacatatctgcacaccatgacccaggaaagttgacacacagaattaaccatccattttggttctgtatgaacaaaatggataaatctaatagacatatgatgtgggtcaccaccttttgcatttttcaagtctttgatgttgatactaatttctgcagttcatcctaaaattcattcttgcataggattttttctggcttccacaatgttccttaccccacaggtttgagaagcagtatgagggctcttctacttgccaattatatcattcttatataggtatttaagaaatatttacatttttaagggaaatagcagccagataagtgaacagatcagaaacactgtgcagtggatttggaataaatttatctcctggtctccatagccctcactctaactggaggttcatgacagtattacaggtactctatcttcagtgtttaaaccctagttctaaccatcttttaaatttctgggcattcacctttccccagtgaatagttatcctggcaaaatggtgcaaggactctttagggaagggagaatagttattatatatatagttaatagcgctggtcttcctcagtaaaaccagccttccattcaatcattgtactctggattctgtgaactaatttgattgtcagaacgagtgagaaacaatcttccattgcaatgaacgatgttggccttctgcttaccatcattctattttccaccagttttgtaattgaacaacatccttgtttgttatacctacatcttgccccaggaacaccatttcccggttgttgccaaaaatgcctgtggtcaaggcaccacgtgttgctgagcattacacattttacatcttttatatacaccttctgtttaagtaccatcacctggcttcttacattctagaattccactacagagcccaataatgtcccacctttaaccaggacaaaagaacatagccacgtttgagctcttcaaagttaccatttctcctttcaccaatgtactttttcactgtgttaggattgtgtcctctagactctcctaggcacataactttcaggtggtgagttctcagatcttgtctggtaaatccattctaattttactaccatcctcagcctctgtccctcctcaatactttgccaaaaatattccagcatctttatttcatttcctgtaggccataattgtgtgcagacttcaagggggtgattccaacatatatatttgggccagggccaggtgttcttacccaagtactcaattaagatcatgagtaaatgatgggtatcaataaattctcttcatattagtctttacattgctccgccaccttagtcccataaactgaattgactgctacatatgtaatcttgtttcctgctataaatactggctaggcactacctttcctgtgatgtataatctgtttcctcctgatgcagaattatacttccccgttcaaagtatactgaaacctcaccctggttatttgcctgaaggcatagaggggctgtaggaaggaatgttgaggagaacgacattaacttgtaagaaattcatctcagataatatccatgtatgccctccaggcaaggggaggggaaactttactcagaaacattggggggtgctgtttttaacagccaggaggattcagaagaatttaggggttcaaaattcttaatgcttatccgctcaagtgtccctccctaggacatagtttctcatgaattttgtttcattttttcaataagagccatagctttgtcataaatatattaaggctagatggtgtttacaggcctaccactttcataattaaaacctaggtctaatttttaacacagtcggccttttaattttaggagataagaatatcttcaaacactgccattgaggcccttaggcttttatagcttgccttagattggagatggatgccccaagacttatcacttttttttccctcaaagcttctaattcagttaatagaagctagacctcatagttccattgtccctgaaacattaaagggctacatatacatatttcaccctcctcctacatcttattctaattaacctgaggtgaaaattcctggtacttatgacgcatttacatgccatggattatcatcacctcagctactaccagaaatagaatctcttgttactttcataccagtgagtaatccagcccccaaattctattcttagagtcagctttctgctgctatgcctgatttcaaatgctttaacctagttttcccagaaattagaacagaaattatgtgctgctactgttatttgagaccatactcccatgtaataggaatgagggaaggaaaaatgaggaaaataataaaaagatgcattattgattcaggggtataaaagatagtttgatcttccactttcttcttttttttttttttttttttttttttttttttttttttgagacggagtctcgctgtcgcccaggctggagtgcagtggcgcgatctcggctcactgcaggctccgccccctggggttcacgccattctcctgcctcagcctcccaagtagctgggactacaggcgtccaccacctcgcccggctaattttttgtatttttagtagagacggggtttcaccgtgttagccaggatggtctcgatctcctgacctcgtgatccgcccgcctcggcctcccaaagtgctgggattacaggcgtgagccaccgcgcccggcctccactttcttcttaaaagccaaataaactaggtcttaagacagttggtccaaataaagaaaagtgagaaatttctccaccagcttccctagctcatttgtcaaagttgtgcctcttgggaaatgaactccccacacttctacattgcacataattgctgtctaaacaagaattcacagcatccccatctggatgtcacatggaagtcccagagagaagacgagaggtgtgttgcacaggtttaagacaaatcattatcaggttaggtcagcataaagtcagccacagttcacacaaaggtcgttgtcacagtgacagctgggacaaaaaacaaggccagggaaacctgacgtgatacaggaaatgtgtctgatatctatgggctggactatgatggtacgttaagaataactaagagactttatgttaagaatcaaacttaaggaaatagcttggttgcagaaacaaaaatcaatttcacactgacttacagaaaaatggaaatttattgaccctacaaacaaattttttgataatactggcttcagaagagccatgattcaataactcaatgcggtcatcaaagattcaatttcctttattttgatctctacttgctcttcagagtgttggcttcagtctaaagttgatgtcacatctgatctgaagataacacatgacctgagtctacatacttgctccccattcgtcaagaatgagaaagcattttttttgttgttgttgttagtttgtttgtttgtttctttgccagagtttccaatgaaagtgtagagattcagaaaatgcctactccgtagtaggactaggagcctggatgtagtgattggcttaacctaggtcgtatgatttttccctttggtatgtgagtagcattatccctgggaaaataaatcattaactccctacgagggctgttgcaaagaagaagtatccacatgaagatggaggaaggaaaacaagagtgattatcccaatcagtaagttgttgcttattggtaaaaatcaactaaatttaaaaataaaaaacatcatagaatgtggatttcatcaaataattaagaaggtgttaatgggagataatttttaagtcttataatgttttaaaggttaggaagccttggtgtgtaagatgcactgctttggtctcaatttttaaaatctctaaaaagtgtttagaaaatggctaccattttgtggaaaatataaaaaatgagaaactcataaacattaatgaaacactttttaaggaatattttctacagatcatggaggaggtaattaaacataaaataattgcttccatctcttccccttatgtttgaactttctctgattttgagacatatgaacaattcttataatttttgctctacatcttgttttctcgtattcttcaccctttatcccaccacagaaatcttaggcccccccatgctgacattgcatcagatatagtgtttctcattgcactgtaatattaatttatttagataatgctactgctttatttatatttcaaatagctcaaaatttgactgccatatcttgttctttgcaattatctttttattgtcataaaatttgtctctactcaatcttttttgcccttatacctactgttgagatcagatctaatataatactacctatttattgggttaggctaataaatctcctttctcttatctttttaacaatgcccctagaattactgccattggattacagaaattaagtgaatacacttcttacaattttggctaagtattgcatacttacccttaaaatttaacctttggggaaaaaaggttttgcagaatattgtgtcatcagatacataagccaatcactaaagagttgaggctaaaagtgcagctattggacttttaatttatctctacattttacttttattatcctttatgtctcacattttttaaaatgttcatcacctgccatttatttgccaaagattcagtaagacttattctttttcaggcatgttgtttgatattgggaatggagtacggtgaggccaaattttgggagaagagtggcagcaataaggaatacacatcccttcctagaatatcccaatctattgagggaagatagtcacattttttaaaaattgagatacagtgaaagtcgtgttgatagagaatggcagtgcagttcataagtatagtaatagaacaaaaactgtgctttaggaggatagcctcatgttcacaaggaaggtgactttgaatagggccctgaatgatgagcagaccccataaggcaaataaatagtaacacattttataatcaacaataaaaatcttgactactcttcatgttctgagctttctcctttttcctctgtcttcatttttacctttcttcatctatctcccttcttcataaagtcaagaagaaaaaaatcttgctaccaggatattcctgcaacaaggaaactcgtagataacttctagacaaatgaagttccctactgatctgctccctataaggctgtctttcttgattcattctatctaaaaatagatatattcactgtcagggatggctgatttaacaaaataagcttagtaggcaccattacttgaatctctttatggattttttttaggttcatacatgttataggaaaagtctcttggaagatgaacttctcacaacagtgctaacttcaagtattttagtccttagaaccaaaaatcagaacgaaaatctaacttgaccttttactacctacatgccatggtgtatatatatatatataaaatatatatttaaaatatatatatataaaatatatatattatatatataatatatatataatatatatataaaatatatatataatatatatattatatataaaatatatataatatatatattatatatataaaatatatataatatatataaaatatatataatatatagtatatataaaaatatataaaatatataatatatatataatatatatataaaatatatattatatataatatgtatataaaatatatataatatatatataatatatataatatatattatatatataatacatatataatatatataatatatatataaaatatatatataatctccagagcacatgttaagtataactagaaaagaatttggatatctaaaatgtaccattatattccaaagtaccttactgaaaactaaatgagagagtatctgtatagctgaactactcattgtactgaatatgcctcttgtacatataggaatacatgataaagggacgtgtcaacttttcagttcttccaagttattttttataaaaagatcatttcttttgtggtattttggggctcttgggataaaaacttcatttttctaaggcattttctgatcttcacaagcaaatagaactctatgcatggcttccaaaatcaggattttaatatatataatcgttattcattctgtcatttgcattgtaaaaatgataatgtgtcagcaaatattcatagttctgcttcacataatattgcacttcaattaaagcatattttaagtttcagtggaactacttgagttttgctttaattctatcgttaaaatcccttgatattttaggcatgagttgaagtaaaacaacatttgtgcttttagagcttagatgtctgttactacattagagggtctctgtattgtgcgagatagttcccagtttttcctctgatcaagctgttctcccagaagccagtgtcgatgcaggagggttgggggagcagtggtctggagacctgcagtaaggaaagaatatgtttccctttgcaaaaagagtgtgcctcggtaagatccaggcaaaaagtcacagccagaatcagaagtggatccctactggggactaataatcagctattgaaccctgcactctttctgtaagtttattttgcagctactttgaagagggagtttattttttaattaatttgacacaatttaacgtataacctcttacatgccactcactaagctagatgttttcagccatatgtagtgctttgtgcatctctcagttatacttattgtaacatgattaattgtccacacatttttacccattcattaaataagcaagtattgagtaccacctattttctaggtattttgccaagtgctgagaatgagcaagatgtataattgcttgtgtttaagctgcttgcaatctagtgaagaagaaaaccacaaagccttattatcttagaaggtacaaggtaatgatttagtatgcatggcagatttaagtactcctctgtaaacagtgtccagcttgggaaagtgaaggatgactttcccaactgggaaaggatccaaaaggcttcctcaagttctaacatatagtagtttttatatcatttaatttgtatcattttaaattttatatcatttaatttgtatcattttaaattttacaataatagttctttggttatttacaaatgtcagtaaccatcttttaaaaaatatttcaggtacgtatagatttgtgtgtgtgctctttgtttctgatttttaacttattttgattatggtcagagaacatggtctattggatttcaatttttggaactgtattaaggtttgcttttcagcataaatctggttgactttcagaagtgttctatttatgtgtgaaaataatatatgtaggtactctaatttctcccctcttaaattatcttgattacaatccagcatcctcctccaattttactagagcacatcttgtcatggtcacccatgagctctgtgttgcatgtgcaatgtgcaattcttcaacttgcattacttaactgccaccttggacacaggagaacacttctttttgaatcactgtttttggttggcttctgggaccccactctctgacttcctgcatatttcattaacagctccattttacttcttcttgatttttatcttcatatcaccagtatctaaaagttggactacccaaggctttagtcttcttttcttttaaatctcttttcctttcatcaccctttggtgacctcatgtgatctctatgtttataataccacctatatcctaataacttccaaatttatgcttccaggcatattttctccgtaatctcaggtttatttacctccctattagttttattcaaatgcctaacgggcatcttacaactgacacttccacgtggatctcctaataatcccatccaagccactatcttggtaatcaactttaactgaaaaatggtaacctcttacatagatctaaaactatacagttatactttatcaatttcttttaacataccacatcaaatctgctcacaaattctttttaccttcagacaaatccatattctagctacctctcaacacctctccactacttgtctggtcatattcatctcttttctagacttttacagtaggcctttttgttgtttttctgcttctcattttaacttccttcagtctcatctctacatctggccaaactggaccttctctgctttctactcaaaaaataccccactggctttccatttcatttgaagtaaaagctaatgtctccagtttttaaaataacttactcaaatttagattatgtgtctcctcattaccctgacctactctcctcatgtctttccctcattcaatccactggaaaaaaaaaagctggatttcttgctgtttttaagcaatctatgtatgctctcttcttagactttgctcttcatgtggcctattcttggaatactcttcacccagttatacacatgcctgactcccttttttccttcaggtcttcactcaaatgttgccttagtaagaatttacctcattcccatattaaaaaaatctttttattaatctttttattaatcttatttaatttttgtactctctactataattaaagcttcatatggagaaagaaatgtgtgtgcattttatttgtactcctgtattttaagtgccagccttagtgctagcacatagtagatactcaaaaaatgtttatggaaataatgaataaatgttgtatcgagttgtcagctgcacactggataccttactactcctcaaataggtggactgagacagattgttataagtagatatctactataggttgttaaggagttttgtagtgattgacatctgtgaaagagaagggaacaaagcaagaatgggcaaacaggaaagatgagctgcaatgcaatctcaacaaaggcttcagccaacgtcactggaaggttttctgtcttgtgactaacaggctaagcctttctcctctgtatttaccagtcgttgggctcatttaaaagaaaagaagactaaagccttgagttttccaacttttagatactctgacatgaagataaaaatcaagaaaaagtaaaatggagctgttaatgaaatatgtaggaagatatatttagtgagacattggtgaaggagcatggacagcttagggcaatttgcagattgggatgagagctggggctagcagtccagcagcactcccagcagcttggaaaaaaagaatcctttaatcctgaaaaaggatttttcagttgtctactgtacttaccaagcatgctatgggtttaaggctgtttctacttcctagaaggctcttcctctagagaactgcacaattagcttctgtacctccttcaaattcttattcagatgttgctttcttgaaatgactacacttttattttaaactaaaatatcgccatctaacagccacaaacccacagcttctaatatcttctaatatagcatattatttgcttaattacatgttcgctattcattgtctcctccaactagaagatatgttccatgaagacagtaatttttgttgatttgttcaataacataattgacaaatacttagaacactacacatagtatttcaaatattttgggaatgaatgaatgaatgaatttcaaacttcttactgacctgacgttgtgatacattgaatactaaaaattccagagagtgatgatagcccttttaatctgactactgtacaggggaaaatgaagcagagcctgactgcctagaataaacctccactgcagccctctgacaaaatattccaaggccatcttttgtaacaactaggaaggagatgaatcctgcctattaggatatctaacaagttccaggtactaatctggttctttaagggttaaaacagatctaatatgtcttcattttgagtttgattgtactacgatattgtctcaggaccaaggagacttgggtaggctaacagcctatgtaagactgacatccagctatatccactatcagcttttgccccgagttagtgcagggaagatgcaatggagcagaatgccaccagagggcactgtggcaccgctttgtgattttcagttttcatatatgggattgcaagaaaagcttgggacaaaagctttaaaaaaaaaaaaaaacaactcagagcaatgttttgctgacgtagttaatggctttcattcattttgaaaatgtataggatgataaagaatgttataaattgcaacttggataaaaaatggcaaagctattaacaaatttcacagaaaaatacacacaaatgtctttaaatattatgaaaacatgctcaaactaccttataattttttaaatgctaattaaaatagcattgatataaaacttttcacctgtaagatttgcaaaattgtagaagtcggcccacccaagcaatcttgtagattgtcggtagaagcacaaattagtttgattctcaaggaaggaaattgggcactatatctgatagttacagattcatttgccccttgaccttcctacacatacttatagaaatctattctacagatgtacatcttatatacaaattgatgcataaatagtaatttattataaactctttaataggtaaaggggttttttaaatcgttttggggagagtgctggttaaattatggtatatcagtaaaatagaaaaacataaagctgaaaataatgaagatgatgaagatgctttttatttactgatataatgcccacctaactttaagtgaaaaatgtaagacccataatattggtaaatcattgaatttttttaaaggaggtggagaataagaatatatgtatggttgtattcgtttgtatttccagaaggaaattttgcaaagacacacagatgccaatcaatgtggttttggtgagggtgggaaatgggaagcatggaggcaagtgtgagagtaatattttgtcctgtgtactatttcctgtggcttagattcatgattcacaggaattcattacctagtcacaaaatggaataaatgttttaacaattgtggggtagaacttttggctgggctttcagaaaatgttggagattcaactctttattttaaatcattcaaatacattagatatacacagaagtatttgttgtcatagttagctaataactactgatttttcttctggaaatcaatcaattgtagtgcttttggcaaccttggaatgaatgacatgaattttccagcaaggcttcccagagaaaagttacaaaagtgactggagtttcctttgggacctcttcttcagagttgttctactctccaccatgcaccagttgtcacaggccgatctgtcctttgggaaaagaggattgaagttactgaaccctttccttacattgtgacaaatttattatagatatacacatttggctgggctcagtggctcacgccagtaatcctagcactttgggaggctgaggccggtggatcacttgatgtcaggagttcaagaacagcctggccaatacggcgaaactccatctctactaaaaatacaaaaattacccaggcgtggtgctgggttcctgtaatcccagctacttgggaggcttaggcaggagaatcacttgaacccaagaggcagaaattgcagcgagctgagatcatgccactgcccttcagcctgggcatcagagtgagactgtctaaaataagatacacatatttcttcattcacttaatgtttattgaatattaagaacctggctgtgaaccaccttttgagcatacaaatctgtcagacatagcttttcccttccctcatagtcatataggaagccaggcatgatctaaatcaagcttgtccatcctgtagcccacaggcagcatgcggcccaggacggctttgaatgtagcccaacacaaattcacaaattttcttaaaacatgagaaaacatgagatttttttggaattttctttttctcatcagctgtcattagtgttagtgtatcttatgtgtagcccaagacaactctttttttttctggtgtggcccagggaagccaaaagcttgcccacccccaggtctaagtgatttgtggagagctgtgtgccatggaagaacaagaagggaatggtcaccttttcttgattaaaaagctggagaaagccttcagatcatatctcatagattgtaaaatatgagcaagagttttctaggcaaatcagggttgaaatgtaggaagagaaatcattcttaagcggagggaacaacccttacgaaagtgcagaagtttgaaaatacatgatcaattagaacaagtggtgaagagctcagcatgactggagcatatatgtgtttgttgatttatttttgtatttcaacaggagagctgttgacacttttgttaatattatagcctccaggtatgctatgcgatttaatttaacaaaactcagaagaatgtattatctctgttgtacagataatgatatcaagatttataaaagttatcggtctagaattatacatctaggtagagataggactcaaatctaatttcaaaccccattaagtatgcataagagtgttagctggatctcttccgtttttcctttagactcactctttctttcctatcctattcccctggcaactagcctgatggagttcattgacaggctccaaagcactcaggcttccagtgaggtttgtcccataggtagtctagtcaagaaaccagaggtaagggagaagatgagcggggtttatcctttatcctcagacttccatctgtgctgccatcttacgctacctgtgactcccaaaccaagatcattgctcctctccaagaggcccactatatatctgactcttagatgtcagtaactgctcactcccctcatccctgcaagtctagagatggtatcaactccatcataccttccttgtggtttccccacatacagcccacacttttataaatgagttctttattaagctctactcaagttaccctaatttgaaagtgccatctgttttcacctggcacaagatccatattcaggaagttattatctaagtgagaactgatgaaagtttattgtggcagtagcagaagaaatgaaggtgataaagtggattccagaatgatctgagattaaaaagggctacaaggagagaatgatatttgctcttaaggtttgatttacattaagcaattctggtgggactttcttgagcccttcacatcgtactgcatagaaaaaactcttaagctaaatgagtattagcaagatgagacaaaataagtggttccaagcttgacaccagaagacagatttcactgcatttaccaaaatacagggagccacatgattcattcacagagggtgttaccaggcatcaggtgatgatccaagcaagcaattaataccaagtaggtacaacaagaggtaaatgggtactctggcagttagatcaagaaataggttttattgacctggtcaatcctggttttgaagattcagataagcagtgagcatcaaaaaggaggtcaccaaattgcaggatcttcatcatgaattcagttcagcaacaaactccaaatcttggggaggcagacatagacaaatcaaagactgcacaagccacaagaagactgctacagtgctgcatctcttgcatttttagagttccttacaaccacccagttgtctaccaaactggagcaaggctaaaatactaaaggtcagtagctctatttgtgtgcagtacaagaccctacctggcacattccattcatacaggagccctgctctatggttttcgtcaagcctataatttttatcatgaggtcaagcggtctatttccatagtagcaacactctggtgcgtttgagaaaacatcagtgttctttatcagtgtctctcaagttgagaaatacaaaagagcataggcataaaactaatgcaattgcattatcacattctgtttcctactgagattccttttcatggttaaaaaaaaaaaaaggaattcagaaaatgaattattttcaacatcagcttctctctggagtttaaaaatgtattttgatttactgtttccaaggacactatatggaaaatggcttcttaaattaacgcatcaattacttataccaaatggataggaatgattgtgctcaagtaataaataaccttttataaggaagattttataggagataaaatatagatggtccctttgacttatacaggtgctatattaatccctcagatgtaaattatagaggtgaagagtttatacttctttcctttgtgttgagcattctgataaatgagtgtctaatgtgacaggaaaagataacataatgaatatcttattgtgcttcaaggaacatgaagaaatgactgacactatgttttgttccaggtggaaaataaaaggcaagcagttcctggcccgtgatattccagttagaggtgtctgactgacagcatgttggcaccgagggaagcgatgggcttcggctccaggtgagttcagtatgactgggtatgctagtttcccatgacacaagatgtgtattttttggacttctatctacagaattaatgatgtaactccatcaacccttttacgctttcaaaatacgaaaacactgcatttctttaaaatagtataattttaaaattcgatagtgtctttaggtcaatgcatatactttttaatccacctaatttcaagttgtagaacaggtaactatgaatggatttctttctgaactgaggatcaaaatatctgagctagaagtagagtaaatgctagaacctcataagactgaaagctgtttgtagtagtgatccagagtgggaaaccagagttatcattaagcatttcaactgacacattgttcagtgccaccttactggtaatcacctgagggccgagtaacccttcaggacctcaggttttgtcatttccagagttaggcaataagggcaagcagataatccaataactcaaaagactcctcgattaccagtcttaaaattacaagaggtaagatctctgcctccaattccagttatgatccactctgagtctgtaccttcagaaatccatagccagaatatattaatcacatcatgtagaaacattaatatgaaactttggtaaactgaatagaataacagtttagggaatgaaatatatgtattatacagcttatttttttaaatgattttcatacactgtaagaactacatggtgggcctacacataacttatgggtaattcacatgcaatctgtcttccacagtttcaaagaatagtaaagaagataaactcatcaacagtactaggacaaatgctataaaatagatacaagaaacatgtaataagtatttggtctatttatgaaatacctcaacaatccctcctccatagcaattctgtatcttgtgatttaatgtgagtaaataattaggaatatctgaaaatatttaaacagaattatgtttttatagtcataaatagcccaaatatatacttgtataaaatttataaaatattttttctaatagtaaaattctatggaactattttttttttttatttatctatggaactattaaaacacatgcttgagaaaaaatacttctgacatgaaagaaggagcaggcatatatttaaattttagaaattggattaaaatgtctttataagataacttttatgtgtatatagagaaaaaagataaaagagaccaatatagtaatttattttttattttttattttttatttttttttattattttactttaagttttagggtacatgtgcacattgtgcaggttagttacatatgtatacatgtgccatgctggtgcgctgcacccattaactcatcatctagcattaggtatatctcccagtgctatccctcccccttcccccaacccaacaacagtccccagagtgtgatgttccccttcctgtgtccatgtgatctcattgttcaattcccacctatgagtgagaatatgtggggtttggttttttgttcttgtgatagtttactgagaatgatgatttccaattacatccatgtccctacaaaggacatgaactcatcattttttatggctgcatagtattccatggtgtatatgtgccacattttcttaatccagtctatcattgttggacatttgggttggttccaagtctttgctattgtgaataatgccgcaataaacatacgggtgcatgtgtctttatagcagcatgatttatagtcctttgggtatatacccagtaatgggatggctgggtcaaatggtatttctagttctagatccctgaggaatcgccacactgacttccacaatggttgaactagtttacagtcccaccaacagtgtaaaagtgttcctatttctccacatcctctccagcacctgttgtttactgactttttaatgatcgccattctaactggtgtgagattgtatctcattgtggttttgatttgcatttctctgatggccagtgatggtgagcattttttcatgtgttttttggctgcataaatgtcttcttttgagaagtgtctgttcatgtccttcgcccactttttaattgggttgtttttttcttgtaaatttgtttgagttcattgtagattctggatattagccctttgtcagatgagtaggttgtgaaaattttctcccattttttaggttgcctgttcactctgatggtagtttcttttgctgtgcagaagctctttagtttaattagatcccatttgtcaattttggcttttgttgccattgcttttggtgttttagacatgaagtccttgcccatgcctatgtcctgaatggtaatgcctaggttttcttctagggcttttatggttttaggtcgaacgtttaagtctttaatccatcttgaattgatttttgtataaggtgtaaggaagggatccagtttcagctttctacatatggctagccagttttcccagcaccatttattaaatagggaatcctttccccattgcttgttttggtcaggtttgtcaaagatcagatagttgtagatatgcagcattatttctgagggctctgttctgttccattgatctatatctctgttttggtaccagtaccatgctgttttggttactgtagccttgtagtatagtttgaagtcaggtagtgtgatgcctccagctttgttcttttggcttaggattgacttggcaatgcgggctttttttttggttccatatgaactttaaagtagttttttccaattctgtgaagaaagtcattggtagcttgatggggatggcattgaatctgtaaattaccttgggcagtatggccattttcacgatattgattgttcctacccatgagcatggaatgttcttccatttgtttgtatcctcttttatttccttgagcattggtttgtagttctccttggagaggtccttcacatcccttgtaagttgaattcctaggtattttattctctttgaagcaattgtgaatgggagttcactcatgatttggctctctgtttgtctgttgttggtgtataagaatgcttgtgatttttgtacattgattttgtatcctgagactgctgaagtcgcttatcagcttaaggagattttgggctgagacgatgatggggttttctagatatacaatcatgtcttctgcaaacagggacaatttgacttcctcttttcctaattgaataccctttatttccttctcctgcctgattgccctggccagaacttccaacactatgttgaataggagtggtgagagagggcatccctgtcttgtgccagttttcaaagggaatgcttccagtttttgcccattcagtatgatattggctgtgggtttgtcatagagagctcttattattttgaaatacatcccatcaatacctaatttattgagtttttagcatgaatggttgttgaattttgtcaaaggccttttctgtatctattgagataatcatgtggtttttgtctttggctctgtttatatgctggattatatttattgatttgcatatattgaaccagccttgcatcccagggatgaagccctcttgatcatggttgataagctttttgatgtgctgctggattcgttttgccagtattttattgaggatttttgcatcaatattcatcaaggatattggtctaaaattctcttttttggttgtgtctctgcccggctttggtattaaaatgatgctggcctcataaaatgagttagggaggattccctctttttctgttgattggaatagtttcagaaggaatggtaccagttcctccttgtacctctgcgagaattcagctgtgaatccatctggtcctggactctttttggttggtaagctattgattattgccataatttcagatcctgttattggtctattcagagattcaacttcttcctggtttagtcttgggagagtgtatgtgtcgaggaatttatccatttcttctagattttctagtttatttgcatagaggcgtttgtagtattctctgatggtagtttgtctttctgtgggatcggtggcgatatcccctttatcattttttattgcatctatttgattcttctctcttttcttctttattagtcttgctagcagtctattttgttgatcttttcaaaaaaccagctcctggattcattgatttttttgaagggttttttgtgtctctatttccttcagttctgctctgatcttacttatttcttgccttctgctagcttttgaatgtgtttgctcttgcttttctagttcttttaattgtgatgttagggtgtcaattttggatcttacctgctttctcttgtgggcgtttagtgctataaatttccctctacacactgctttgaatgtgtcccagagattctggtatgttgtgtctttgttctcgttggtttcaaagaacatctttatttctgccttcatttcattatgtacccagtagtcattcaggagcaggttgttcagtttccatgtagttgagcagctttgagtgagattcttaatcctgagttctagtttgattgcactgtggtctgagagatagtttgttataatttctgttcttttacattttctgaggagacctttacttccaagtatgtggtcaattttggaataggtgtggtgtggtgctgaaaaaaatgtatattctgttgatttggggtggagagttctgtagatgtctattaggtccgcttggtgcagagctgagttcaattcctgggtatccttgttgactttctgtctggttgatctgtctaatgttgacagtggggtgttaaagtctcccattattaatgtgtgggagtctaagtctccttgtaggtcactcaggacttgctttatgaatctgggtgctcctgtgttgggtgtatatatatttaggatagttagctcttcttgttgaattgatccctttaccactatgtaatggccttctttgtctcttttgatctttgttggtttaaagtctgttttatcagaaactaggattgcaacccctgcctttttttgttttccatttgcttggtagatcttcctccatccttttattttgagcctgtgtgtgtctctgcatgtgagatgggtttcctgaatacagcacactgatgggtcttgactctttatccaatttgccagtctgtgtcttttaattggagcatgtactccatttacatttaaagttaatattgttatgtgtgaatttgatcctgtcattatgatgttagctggttattttgcacgttagttgatgcagttacttcctagtctcgatggtctttacattttggcatgattttgcagcggctggtaccagttgttcctttccatgtttagcgcttccttcaggagctgttttagggcaggcctggtggtgacaaaatctctcaacatttgcttgtctgtaaaggattttatttctccttcacttatgaagcttagtttggctggatatgaaattctgggttgaaaattcttttctttaagaatgttgaatattggcccccactcttttctggctggtagggtttctgccgagagatctgctgttagtctgatgggcttccctttgagggtaacccgacctttctctctggctgcccttaacattttttccttcatttcaactttggtgaatctgacaattatgtgtcttggagttgctcttctcgaggagtatctttgtggcgttctctgtatttcctgaatctgaacgttggcctgccttgctagattggggaagttctcctggataatatcctgcagagtgttttccaacttggttccattctccccatcactttcaggtacaccaatcagatgtagatttggtcttttcacatagtcccatatttcttggaggctttgctcatttctttttattcttttttctctaaacttcccttctcgcttcatttcattcatttcatcttccattgctgataccctttcttccagttgattgcatcggctcctgaggcttctgcattcttcacgtagttctggagccttggttttcagctccatcagctcctttaagcacttctctgtattggttattctagttatacattcttctaaatttttttcaaagttttcaacttctttgcctttggtttgaatgtcctcccgtagctcagagtaatttgatcgtctgaagccttcttctctcagctcgtcaaagttattctccatccagctttgttcttttgctggtgaggaactgcgttcctttggaggaggagaggcactctgcattttagagtttccagtttttctgttctgttttttccccatctttgtggttttatctacttttggtctttgatgatggtgatgtacagatgggtttttggtgtggatgtcctttctgtttgttagttttccttctaacagacaggaccctcagctgcaggtctgttggagtactctgctgtgtgaggtgtcagtgtgcccctgctggggggtgcctcccagttaggctgctcgggggtcaggggtcagggacccacttgaggaggcagtctgcccgttctcagatctccagctgcgtgctgggagaaccactgctctcttcaaagctgtcagacagggacatttaagtctgcagaggttactgctgtctttttgtttgtctgtgccctgcccccagaggtggagcctacagaggtaggcaggcctccttgagctgtggtggactccacccagttcgagcttcccagctgctttgtttacctaagcacgcctgggcaatggtgggcgcccctcccccagcctcgttgccgtcttgcagtttgatctcagactgctgtgctagcaatcagcgagactccgtgggcataggaccctccgagccacgtgcgggatataatctcctggtgcactgttttttaagcccgtcggaaaagcgcagtattcgggtgggagcgacccgattttccaggtgccatctgtcacccctttctttgactaggaaagggaactccctgacaccttgcacttctggagtgaggcaatgcctcgccctgcttcggctcacgcacggtgcacgcacccactgacctgcgcccactgtctggcactccctagtgagatgaaccctgtacctcagatggaaatgcagaaatcacctgtcttctgcgtcgctcacgctgggagctgtagaccggagctgttcctattcggccatcttggctcctccccagtaatttttaattcttttttttatttttaacttgttgttacaatcaatttttttctataggaaaaaagtaacttctaattttgaaaattgtcaattaaattgtttcataaaaataggatagaagaataatgaggttgtgaaaaaatagtcaccatattttctagagggattaaaatcaagttataatacagaattggagtaaaattctatttgtgttaaaagcatatttaaatatatttttattttatactaaggaaaattatgaattcgggagagtcatggtagtaattcctatctagtaaatgcgtaaagtcctttaaaaggaaagaaatttgagtagggacttcaagggtaaccatacagaaatgtgcttttaatagtgtttataataatcaaaattgacctatttacatggataaacatacatattatgctcacttatattgttctgcttcattttgtggaaaagtataaataatacatatttcataaatttaaatattatatttgtgtcaagtgtaagcagaatagccatactgatatactcaatgctatctttcatcatatacttaaactttaaaatactgcatttttaataaaaattacattatataatcacaataagatttttctttatcaaatattcaaagttacttctgtttcaatgctttttctgcagttctttatccagtttgagtgacacatgaatgagttgtacatttgtttacatttgaaaactcaaacatacaagaaattgtttttatgtgaaaatgtcattttaaaaataaactctgtagaaatattgttaacagtctctttctcagacttctctgttcttgtcttccccatagactgtggtttccaggtccattcttgccctttttattctctgtgtgtgttctatttgaatgatctcacttatgtccatggcttcgatattcccaattctgtgactctaaccaaaggcacactctaattgtgtactagatcaacataccaaatgaactgcaggtctcctaaactgtttccagtgctgatgtctggtttttccttcctcccttgagcgctcatttgtgtaacttcttcaggtagatactcctggagctcccagccctaagtagtgtattcctatagctctgctttatctcatagtacttcttatgctctggtgttttgttttgttttgtttcctacagactgagtatctgactcctgaactaggtggtaaatgagtataaccttgagtatgagtactgtccattatctctggtgtcctcattatattgtgacccatgtcatccaaaatcagagcagtactatggcaaaagaaaacagaccagctgtaatttcaaaataactcatattctctttgtagaacatgatgtagtacaagtagaccacattcatcacatagctctatgtaactttttaaatttaaacttcctagggacatcctccattattaaatcaaccttatccaggccctgtctctttcagaaacctctttaaaagtgttttcttggccaggcgctgtggcttgagcctgtaatctcagcactttgtgaggctgaggtgggcagatcacgaggtcaagagattgagactatcctggccaacatggtgaaaccctgtctctactaaaaatataaaagttagctgggcatggtggcacatgcctgtagtcccagctgcatgggaggctgaggcagaagaatcgtttgaacccaggaggcagaggttgcagtgagacaagatcacgccactgcacttcagcctggtgacagagtagtgagactctgtctcaaaaaacaagtgttttctcttctggccctccccattatcaagtttcaaaaagcaaaatactccttgatagcaaggggtatagaggaagggctgcccaggttgactgagtagactcaagttaactttactggtccaaaggggcaagtttgtgaatataagcattttaattgttaatttactcttgataatccttcatcattctttcttgtgttcttctcccccagtatgcacatcctaaatgtgggagctaacaaacactaagtggagactagaaggatcacagagttagtgacatagtaaaataggtatagcggacagatatggtatctattgcttaggctcaattatctactctgccatgtatgagttatacagaccagagcatataagtctcttcgaacctctgagacttaaatcatttatttgttctaaatagtctctattttataaatcaactactgtatttgtgaaagccttttacaaatattttataaatgtttaagtactttataagtgtgaaaactaattgatattaccaagtgaaataatagcttaccaaagcatcaagtttaaagaaaataactggcttcaaaaaattaagttttcttccaaaatgcaaattgtgtgtgtgtgtgtgtgtgtgtgtgtgtgtatagagagagagatgactgctactgtattaggtgtgaaattaagtttgttctttattttctttcaccaaatacaaggtcaggtatcactagtcgagtttacaaataaaatattcagattagttaatattctaataacagtagtaatggatttttccatgttaatcattttttccactttatggcattgtgagtctgtctttgttgttgttcccatagtgaaatatctctttactttgtgtaagtgatctttacatatttgcaaagaaaattccctccttttaagtttaatgtaaattgcctgcccatcaaatcagcattgttcaatagtttttaaggtgctctctctgtcctttgataacaaagggaattcagttctggacaaaaactcaagataatgagcttggcaacataaagcatcttccttttatgaaatccactcacaaaataatgtggtatgaaatttaaaggcaaagaatattaagatagcattgattcattgatctggaaattaattctaaccatgtaatattaataacacttcatgatctgaaatttaagctgcagctaacatcatgcagcaacaaaagttatttaatattgccaacaactgtagtaaagttgaattttaacggttgacattatattttctggagcactacaatacttttcaaagtgtaataaaatattgaaaatgatcagaagatgaaacgttgttcacatgaagcagagttcattagtcatttaagaatatatgcctataatacataaaaacaagttttatgttagttgtacccaaacaacttaggcttccaaacaatatgtagtaaaatctgagtgaattagctttctactcgccaacctctcaactgcattttcttcccgtgtcctttattcacatatctcaagaaaatgcaaatgacatgaaaataagctagggctagaagaatgaaattgactctgaaaaagatggctctcaatgactaaagaaagaggcaatatttcaaacaatattaagaatctatgaacattgcactgcattagatgtatgggaaaaatagatagatattaataatatacttgtaatttatccatcataggagatgcacggtgtatttagatactaaatagtatgttattatgtacacacacgcattcctttacataactatactattagtgttaggtgctaaaagataaggagagatcagacaccaattgttttccagaagacagaccagtaatttttgttaaagcaactgagaaggcttcttgaggaaagctgaatttgatataaatccaatagggcagatgtgtgggctgggaatggcattgcagatgtagggaatagtacatacagaaatggtgaatttgaatgtagagggcacttaggaaaggacagctagcaatgctttcataataaagggtagtaataatggaaggtaatactgaaaagaaaacacagagattgatttaggtgggttttaagtgttcgcccgaagagttctttatttcatgctcctcctccagcagtgggtatagtttacattgtgttgtacccccagtgaaatcacaagtagaaatgcttttaaatattctaatatagaaatactcaatattttatactggttaagtatataatggttattacaaaatctgtgatgtttatagcggtgcttaaatatcacaaaactaataagcaaaattaatctcctaaggcatataaaatataaacttcaatgaacactttttcctgcaatacctaattatatttaattttccacaacactaatagtcttaaggttacaaatcaacaattcttgaacctattaaaactaatcttggtgtgctacaggaaagctttttccatttgtaataaatacaattccaatttatgatataacactgaaaatgtacagcttaaaatacaaattttatttcagtgacttttatctctctaaacaaatgctcatgggtaaactatacctttgatttctcaaaacacttgcataagtagttctttattaaattttctcttgaaatcttcacattaaccctagttagaaattttggctttagctttcaactatcatttttgtcaacaataagtcatatatatttgaagcttatgatttttatttctaccctttctcagttattttaatgatacaattatcttcacattcagtgaaattttaaatcatagagtttggttttttctttctcttttctgctctttttctctgttgtatgcattcatcatgtatttactgaaaaaaatacatcgttccaagatctgagtcctctttcatagcctccttgatatcttccttttttctttccatattccctggctttatccccttcaacacaatttgggcaaatacaactaaaaatttgtatgatgatgatccctttctgtcttaatatccactatttttcctgttttattgtactgtttcccagcaattcttctgagatgattaacactaccatacagttattctcaaaaaatattaatgtttcttttgctcatactgagttttcaagggcttgacttaggaaaatattaggtaagtataagataggtagaatttagaagtacaagcctggaacgtataagagaagttggccaggtgcagtggctgatgcctgtaatcccagcactttaggaggatgaagcaggaggatcgcttgagcctgggagtctagaccagcctgggcaacatagaaagaccccatttctacaaaaacttaaaaaaaattttctaggcatggtgctgtacatctgtactcccagctacttaggaggctgaggtgggaggatctctttagcccaggagttcaaagctacagtaagccatgaccatgacactgtactctagcctgggtgataaagccagaccctaactcaaaacaaacaaacaaacaaagggagattagtatatagatttgagattctttctcacaagtcatcatctatctagcattacaatgaaacaaagataaaaggaaaaaaggtgcatagaagaaaattttttgagacacgacattagaagttagcataatgagtgagagaaggaataatctcagtttagttatgcaggtaggtaaggtagaagagttttttttaaaaaattttgtcatctgaatgctgaaaaaaatgagaagtactgaaaaaagaccactatatttaatattactgttataataataaaaacatgctttaaaaaaactaatgtgaagtgaagcacatattcttttagttatccaaaaccataaatcactcttcaaagattatttatataatatagaacctccttcaaggtcctgtatgtaagaccttaaataccaaacattcagcagtcaccctcctgttagagatgacatattaccttaaaaactcaactttgactatattaaatatacacatttttgtttttctggagagggaaatatgtgaatttctgtttagtaaggcaacaattttatcctaccctgtaataagaactttctcacattttaggcagcacatgggcaactactgcctctctacagtagtataagtgatcattgccactaaaaatttgtgagcaaattgtagatttgtgataatttaattttgtactgctacaacctactataatagttgaataacactatctgtaatatatactagttataatataaacactgtaatatagacaattatataccagctgctaaagtcaaaggtattgctactcggtattgactatttagaaattatagtaaacatattttatttgtggaaatttacaaattctattactaacacaagagatgattagtatttcatgcactctagctaggagttgaaagcaaggacagaaggtgcttcattcaaacatattctaacattactagcaacaaatttcataaaaagtagagatatgtggtatgcctatccttgtactgaatcccacaaaactttagctttcaagtatctgtcaaagggaataagctaatttttaaagcaattatttttagagatacgaaggacaataagaacatctaggctcttttaaaaactccttgtgataggagatggtttttatttcaaaagcatgttacatgtaacacaggaccatgtttcttttaaaaagtttctaaacaaggaaaggaaagtgaaagcgtactggaaaggcaaggaaagtgtttcgggcaaggaaagtgtcatcagtgtgctgtattgttgaaatgactttagggcttttgtagcaacatgagttgttataactttaaaatttgcttttatttttataaataggagctcatgatctagtaatcaaatagtattatattaagaggcttataataacagcaacagaataatggcagcttgtttgacacttctctatgctatagtcctgttcaatagagaaagcaatgtttagctcgtgtatctggtccttttggtaactaccttaattgtttttaatttaatatgcttgtattattatcttgatttatcaactttaaacattacctaataacttctattatgatgcctacataggaattaggacaggtgcaccaattacaggactcttttcccactattctctcaatgtgttgtttctggtgaaatcattatttcctatttacatgattatgactacataaatattattctctaggtttacatttttagcacaatatatttatttttcctgaagtttataaagttgttagtgatgatttcaaatttcaaatatacaaaataatgaaaatattttaattccatccttcatatgtttagatttcactcctctagcctttcatccttctgctcccctctcactggttgctctctaagactccctgtctttgtttttctctgttggacttcttgttcctagatcgcacttcattctccttgatttcaatacctcatatttgcagaagtacaacttctagtatctttctaaaaaatacggcccatgagaagtatacattttagatgtgtacttctcttcaatgagcttacctcctccacccttccatctgattgagcattttcttgagattttaagttgaagattattcttgctcacaattatgaaaagatcactttgatgccagcctgattccctttttgtttgtagatgacttgttttactttttaaattgttttgttgtatgctttttctttgtaggaaacgtttaagcatttctgaaattcttgatatacctttgtgtggaactgatttcgtttggagatcgatttttttgtgtgtgctcagaaattttcttctatagtttaattgataatttagtcttatcaactgcaactgtcacaaatatttttttaatgattaatcagccattggaccttctgcattgctctcctcttcctgtcttttgtcgttttccatctctttgtgtctttcttttaacttttgatagattttcttgatttttatcttccactcttctattcattacaatattttatttgaaaaaaaaaactaacagaaagggtgtaaaaatatacaacacctcactatcttttacccagattatctgtagagttaacatttgtcttatttgcttcctttttctgtacatacacacacacacacacacacacacaccccccacacacacagtcctttttttttccttagtcattttacgttacatggtctttcaccagtaaatatttcaatgtgtgttttctaagataaagatagtcttacttacctacagtatggtagtaagattcagtaaatgtgacattgataaaatactttgatagaattagaatactagcagtatattacatcaattgagccaattctttatagcatgattttcctccagcatggagtccaacctagaatcatgtattgcaattagttgtcatatctcttcagtccccttcaatctggaaaacctctccagcttttcttgcctttcacgacaataccattttttaaagataaaattccccctgtttttaatagaatgttcttgtttttggtttgtcttatgttctactggttttttaaattttatttttcatacttttccaataacttttttgttattttttatagcattcattttttgatttagtacaacacatactgttttctcactccaacattggttatgtgtaatatttccctgttctttgattatagacattatctctatttcagtcctttttagttgttactgtaggtctcaactactcatgctgaaattttgcttccattgctgatgatctgtggctcttcattcatatttcacaagggaattttagaatgggggcttgggtaatataattggtgttctagaaaccaaaaagggaaagaaggttacaggtcccttgattatgtgaacttccaataatagctctgatcaaaatctaacatttaacaggtttaatttattcacagaatagtatacttcggattcaagggattgagagaaagggaggtgatgggaatgaagaggtaattgcccactgtagaggaagagagagcaaccaccttagaacttgatgaatttttctctgttcagaactgcagttcattcgtgccttctaaagcactcagtttttccaagtggtgagttgctcacagcttctctgagtgatttgctaacttcttgtgggggctccacactgtgggcatataggcagtactttctcagccctgctatatgaatcatttctccacctgcttcccatcctccacaatttattgaattatggcacagggattaagtgtatgactttacaacgacactgcttggacttgaatactagctttgccacttactgaatatgtgataatcagcaaattgcttaatgattcaccatttcctcatttataaaatggaggtaatgataggaatgttatggttgctaaatgaattagaacagtgtgggacacataatatcagctgctctcaattacactattgtcttttctactatctttagtttttttttttttacttctataaattggctttttaaaaattattttcccataatttgtctgaagcttggagaaggaaaagagattgatacctactgttaattcatcagtctttgtttaaaaaaaaaaaaatcagggcttttaattttatcctctgccatttttttcccctgagcagtaaaactattatgtaatttgtaagttctcttgaatatactctatttcatcttaagaccagaaagaatcaggactttcttaatctatatattaaaaaaatcattctaagatattttactagaattaattatatgtgtgagtgtcatagctcttaaatcattattattttgagatactgctattcatgtgagaatttatgttaggaatgaattaaggacacattcttaattaatattatataaccttacaaaaagagatttctattttactatgtattaaacaggcaaacagaaaccctatcttatgtgcacagacatttatgttatagaaattcacaattatttaaatatttataaaatgagagttgaaagcagcacttttgaaaagcagttaataatgaacagacatcaagggagctatcattataacagcaaagtgctttgcaactccaataacttcagtggtgcagaagcaggccatcaaatttaattaaaagcagtcaaaaataaactgagaaattgaactgtaaaaggctgtcctttgccaggagctaaaggcaaaaagaaagcaaggtagagccttgaaagtagtaatgaattgataagccttagtgcctgcaacttgtaattcgctctgtcagattttagtatcagttaaactagattaatagagcaatcactgatcttctatcttaaatccttcttcgttcatcctgcgttataggctcccatgatagatggaagccggagtgggtcaaaatttctattcacttctctactcagtttttaaataatgctggcatctacattttctggacatcagaattctgatatgttaaaagcaggaataaatttagttatcgacaggctatagccctcctttctaaagaggcttaactccttcttattcaactgaggaagaaatcccctggaacctgagcagtgagcaattggcatctccttctaccactaggggctaccatggtgaagtgaatgataaagaggacgtaacaaatttattgttgctttaaacgttcagattaatgtggatctgcagaaacagtaccacaaggacaaaaacaatttgccctccatcattttatttttataataatgttctttaatgaagctaaagcctccctgctgtgaccttattatgtttttcaacatcagtgagaaatagattccttcgaattgttagagagctcatgaaacagcagggatattgaagtagaggatcaattaccttttagcagtaattttgaactttaaatggctatagcacagcctatgtaaacaagaagacaaatcagcttattgaaaagcagtgtgcaaattatccagaccacaaaaagctgaggtaaacaaactgttctgttttctaatatccttcaacgtttgcacagtgtctcatcaaagagcaagtgcctgagacactgttttggaagacacaaaccaaaactgacaacaattttgtcactgatttaaatgtaaaacttaaaacatgtctaagaaatttgaaaattgctaacattgctgcttatgggttaaatcccgtttattgtaacctcaagaaaagatctttgattatgatgaaaaaaaacttcaaggtgtatatgaagatagaaacagaaaagcgtataggtgttacaaatgtaacagattattactgcatttatgaaatactgtaattcctgaagtcctattatatccacatgtcactcaatcctggcagcagcttagtaagacatgaattcaaacaggcattgatatcttacaaatgctgcagtaacgaagactgaggctcactcaggcaggttaaatagttagcaccaggtcatacaagcacctgaaactacctaatatagcccgttgttctttctctttagtatttatgagaactcccaacttttaaaatgcaaatcattaagctgcaatatagtctgccttaccaaagtctgtaatttccatttccatctgctgcattcaggcaggaacttctcatttgtgctgataggggagttacatgaatcattgggcctttagacaatgcaagctcttaagtgtacttcatttgaataattatccgaatgcggcacatgcaggactccacagccatctaaagggtgggaaactgagttcactggtaagggaggtgtctgaaaagcttctgcaaaaatggcacatgagttgaaagatacattccttcctgtggggggactttgattcctgcccaaagagagactgggttgaggtgaagtttgggccaagccaccaattcacccagctcaatggaattgactcagagagatgactggaggtcaaggtaatagggtcctgaaactagttagaaggaagagagggtatgtttttaagaggtgctaaatcagtatgaaaagtagagtaacaaaaaattaggagcaaaaacaccctaaaatttaaataatatgacttattcattttatataaatcaaatattgtcattcatttggatattttaacttttttaaagctatttttagttgtttaacattagcaaataaaaggctgccagatgttattctatctcctcaacatcaagattagtatgattaattaaaattagaataaaaaacaataatggcattcattgatctgtaactatatgccatttttctgaggactgtactgtatatttaggtattgattaattttgaattgatgtttgtatagggttggaggcaggggtctaattcttctgcaggtggctatccagttctcctagcaccatttattaaagatactaccttttcaacagtgaatattctcgatacccatgccaaaaatcagatggctatagatacgtggattaatttctgcattctctattggttctattggtctctttctgtttttatgccagtgttatgctgttttacagttactacagctttgtagtgtattttgaagtctggtagcgtcacgccttcagttttgctgttttgtctcaggatggctttggctacttgaagtattttgtgcttccatttacatcttatgattttttttctatttatttgaagaatatccttgacattttgatagagatttaatcgaatcagattgctttggatagttttgtgattctaacaatattcttctaatccatgagcatggggtgtctttttatttgtatcttcttcaattatttttatcaatgttttgtagttttcattgtggagtttttttttttttttttttacctctttggttaaatttattcctaggtattttataagtttcttgtagctattgtaaatgagatagttttcttgattactttttcagctagttcatttttcctgtattgaaatgtgacttaattttcatattgatttttatattctgcaaccttgctgaatttatttatcaagtctgagatttttggtagactctctagatttttctatgtacaaaatcatgtcatctaggtacagataatttgacttctttctttccaatttgtattccttttctttctcttgcctaattgttctgggtaggacttcgaatactatgtgtaataagacaggtgagagttgtcttttctcgttcttagggaaaaagataccagcttttcactgatcagtaagatgttttgggtttgtcatatatgacctccattatgctgagatatgttccttttatacctaattaatttagagtttaaatcattaaaggatgttagtgtcaaatgtatgtattgataaatggcttttgtccttcattctacaaatgtgatgtatcacatttattgatttgcatgttaatccatccttgcatttctgagataactcccatttaatcatggtgtgttatctttttgatgtgttgttggatttggtttgttagtattttgtttaagacttttgtgtctctgttcatcaggctattggcttgcagttttctgtttagctatttttatatccttgtctgcttttcatattatggttatgctgacctcaacaaataatttgggaggaataccttctgcttcatttttttggaatagcttgaaaagaattggtgttaactctaaagatatggtagaattcagtggtaaagacatctggtcctggattttttttttttttttttttaggaaattttctggattttaaaatgtattggagtgtagttgttcatggtggtctctaataatgttttgtattcctgtgatctccattgtgactttgattttatttctgattttatttaggtctactctctttttttttttttttttttttcagtctagctaatggcttgtcaatttcatcttctcagaaacccaactttttgttttgtggatttttaaaaatttttttagtatcaattttgtttacttctgcttgatctttattcttccttgctactaattttggatttagtttgttcttttctagacattcattgttagattgtttatttacaatttttctagttttttttgatgtagacatttattgatatatacttgcctcttaatactacttttgctgcattccataggttttggtacattgtgtttccattttcatttgtttcaagagatttttaaatttcattcttaactttttcctacacccattattagagaacatgttgtttaatttccattaatttgtattatttcaaatgttcctcttgttatcattttattctattgtgatcaatgggatacttgatatgattttgattaaaaaatatttaaacttgtttggtgtcctaacatgtcaatcctggagaatgttccatgtgctgatgtgcagaatgtgtattctccaactgttgaatgaaatgttttgtaaattagatccatttgttctatggtgaagtttaaatctgatgtttctttgtttttctgttttgtctgatctaactataactactgttagcttttggtttctgtttgcacagaacatctttttttataactttcaccctatatgtgtctttaaaggtgagatgaggttcttgtaggcaacatatatgtatatatgtatacatacatgtatatatatatatagagagaggattttaaaaatctattcaaccaatttatatcttttaaatggggatttagtttatttacattcatagttattattgataggtgaggacgtacacctatcatttgattgatttcttgttgttttatataccctttgttccttttttcttttattatttgtggttggttggttttctatagtgatatggttttattcttttctctttctcctgtgtgtatcagtgaatttgagttttgtatgtttccatgatggtatttaccacctttttacttctagagctacaattctcttgaacatttcttgtaagactggctagtagtaatgagttcccttagttttgcttgtctgagaaacatttcattcgtcctccatttttgaaagatggttttgctgaatatagtatttgtagctgacagttttttgtttttttttttttaattttagtactttggatatatcgcctcattctctccttgcctctaaggtttctgctgaaaactatgctgttaatctagtggaaattcccttatatgttacttaatgtttttcttttccagcttttagaattatttgtccttgattttcttcaacttgactataatgcgccttggagtagacctgtttgggctgaatcaatctgaagttctttgaccttcctggatctggatgtccatccctctaacaaaacaagatgttttctgctatcatttcattaaatatgattttctcaccttttttcttgaatgcttataataacatatttgttcacttaatgatctcccataaatcctgtaggctttcttcatcattcttttttatttatttttttttcctggttcatttaaaaagatctgttttcaaggtcagaaatttgtttcttctgcttggtggtctagcctgttgttaaagttctcaatagtatttttttaaattaattgaattattcagctttagtacttctgtttggttctttttttaatgatatctatctctttatttaatttctcattcaaatcatgagttgtcttcctgatgttcttgaattgtttatctgtattctcttatatctcacagtttccttaagatttattattttgaattctttttctggcatttcatatatttccttatgattggtatctgtttactagataatcagttttttttggagatgtcatgtttcctttgttttttatgtttgatgtgttcctacattaatttccatgcatttggtagaaaagtaatctagtttaattttatggtgttagtttcatatggaaagatatgttcatacgaatgggtcttgggctgtcagtttggtagggtgtgtgggccttcattctaggtagacacatttgtgttgtctccatgtcgtttctacagctctaacccatgctaaaggcatttgcaagttgctcagtagcctatgctaagagagtttgtggtgataatggcgaggctttgctgaaagttggctcaccgggctatttttcaggtcaggggcatatgtgtgcacacagtgagtccaacaacttggtgtctggctcactgggtttggggctacagggatgttactctggctaggagcatgggcatgcagtttttctgccagcctggaagcatgtcttccaagggcagcctgtgggtctgttttgcaggcccatgacatagaagcagtttcctagctagtttgggggcatatttgcccaagtgacccacagggctacttctcaggcctgagatatgagcacaagcaggctcagctggcccgggagtgtgtctgctggtagtcagcttatgtatggggatgtttttcaagctcagaatacaatcacatgctctcttggctggtctgggtgcatgtttgctgtgggttgcctacagtgccagaacacaggcgcggtaaacacgtactcggaacgcaggccctcagctgttcagccagcctggctgtgtgtcttctaagggcaatctgcaaggctgtaagtcaggcctagaatgtgagagaaaggctgtttggctggcctctgattgtgtctgctaagtgcaggcacagggttatttcttaggcccctgacgtggctacacggctactcagcatgtccactaggggtggacacctgaagctcaaggcccaagacatatactctttgctgttttcctggcccatgggtgtgcccactaggggaagcctttgggactgtttctcaaacgctgactgcaggcacagggctgttaagcaagccagagacatgtctggagtagcaggggttgctgtggggctgtttctcagaccctgaatgcaggaacatagctgctccactagtctgggggtgtattagctgctcagaacctcggagttctctcctgcattgggaaaggagtgcagcatttggctagttcaagggtgggtttgcccaaggcaggactgtaagattatttatctggctagaagtgtggtaccaaatactggtttctgtactgtacaggaccagaatcacagctgatcctaggcccagagtccacatagctggggttgtagcattcagtcactattgtcggcttgtcataatgaagatggtgccctgtgttggcccccagaacaatgcatattccagaggtggctctgatcttgagatggcaacatgctgtggcagcttggctaatggcagggaatgggaggtgggaggtggagggagagagtacacaccttgtgctcctaatccagggtaatgaattcccagcaattctctaaactggtttcagggtttgtgtggactgtgaagttctcctgttgtatgagactgtagatgtttacataggcaatggggcttgtggggttcttctgcttaccttttcctggcaataggaagtccctcctgactcagcaaattagatcagggttggggagatgggtctgcagattctgggtgcctctgtgctgccctcctgaatttccagtcactactggtgcatctccactcccctttcccttcgacactccagtccaatcttagctgtttattcattaacttggtcctttcttctgggagagatgaatgctaggcatctgtagtcagccatcttgatgagatcactctgttttgtttttttttccctatttgatcttaaagcacttttatgcctcctgcaatttatatagcatgtatttatcactattcttttactttgggaaatactgatgctgaatagattcattatcactgttgactaatatcaagactccttatcaaagattaaggaaatttatattcagtgttgctctgtagctaaccacattaacagtgaaatactatgcataacatacttttcttttttcataaaaatgaatttatatagcaattagaatgtaatttggaattattttttattggagctatattgtcacactttctgttgatatcccaggaaatttatgatcgatcacatatttgtatgatcttataaaatgaaataagcagacttaaaaaaacttataagaatgtttacagaaaatctgattgttatttaatgtgcttgtctttatttgcattcataaagaaagagagaaggaagagcaaaaaagtatcagtttttaggaaattgtaagatgcattgattatactctatttttatgttctttcctatgaggaagttagaacattagcaaaatataaaaactcttgcaatattctcagtgctattgaatcacatttgtttacaaaaagaaaaaaaatctttacatctggatagtctagggaatatcattctcaacttgggttattggcttctgacatcattttattagtgcagttgtaattgtaattatggattataatacctactggctattcatttctctctgccaccagagggagatgcaaactcacgtgtcaggcttcagcactgattgccaacgataccatttaatattattcagctttctctcaggggagcttcattaccaaattatttctaggtagtgatgaggcaaaacatgtgctattgaggagtgtcagtgcaatctcaaccttaattcatatggcaaaaagaacattattttatgctgaggagtccaagataaccccagagaaatagtggaatttacagcataatcaaagttggcatttgacaagggagactgctacctcatgataaatgagttgactctaaattttggacaaatgttttagtttgtatgctgtagtttgtatattccaactcagaacaaatgacagtcctttgttttttcaactgaagtggcaggttttccagaggggctgacctgctcctttatcttttattttgattttaaattaaacgattaaaaaagtgtatttatttgctttcacttttacttctaaatatacttgacagaaatttactgaatttccatcaaggttttattttatagtatttttcccccacttacaatatatattgcagatatatcagcaaggctgtagattattgactttattttttcttattcttgattgacattctcaaattaataaataaacattattaagatcttacttttaagtctaatgaattatggtagtataagctggttccataacagtgacaagaaaaaacagatgatctctttgtattttaagtaaaaatgacctggccacttttgaagatttagttttccaaatgtggttttattaaacaacatcaccacaggaaaatttttaaaatgaattattttattaacattttctcttatttatgatcctgaaaattttacttaaaagtagaaataaaaagttatattaattttgcttcctatatcctactgttatttagcccagttacttggcattttgaatgttatgaaagtttatatctaaagggaaatataaaagcaacatttttttgaagtctgataaaatgcaaattattatgaaaatgaaataattgttttccagaatgttaactttattaaaatgattataaattttacactgcattttattttagcagtataactctgtgtatggtaatttagttggggtaacaaaccccaaaccataacaaatggtaagggagtcaactctgacatgaggttcgtgtgtatttgcgtttctaaatgccttctttatggtgtggctaatgttcattttcatgcacatttgcattcaaacaagtttggaagtgttctttttaattagatagaatcacacacagagactctaagtaagagttcttgcatttagctataagaagtgtcacaatgcagtatgggacgagagcaatattttatccagccttggaatttgtttcctgacaaggataatagttgttgtcatagctgtctaccttcccaaacaaactaaagctagaaatgtgaaagccttgttaaaggagaggatggggctgatgtatattatccacacaataaaccaaagaacaggagcaataccaggattacaagccaagcagactggaaatggaagaacaaactatcaactgtaaggagttagccaaaagacaaatccagatatgaaacaatgaattggaaactagacaccaaaccaaagcaagtagtttctaaagaaaatgattcccactggaatgagaactacgctactcgagcccataatgtaatgattgttgggttttgacaaagattgaaatcactttagagtgattaaactcagaacttctcagttttccaagtattattcagtccattaggagtctcatgacttcacactagaacttggaaaacagttacctgcttaataatttcatccgatattttaagaaactcaagttttgtatcaaatgatctcatggtaattaataagaaaatgacaaatacatctatatataatgcataaaagacaaaattaaataacaaaaaacaatgcctaattccacaagcaattaaatataaattgaagcaacacacttataatttagtaactagaaaaagaagagagttaatggcaatactttgtactagaaaagctgaacagaaattttcagacccctacactgtcaagaggagtacgtatgttttcaaacatccttcaagaatacatttctttcagctcagtatattttcttctagaaaatcgtgggattatttgaacagaactgcatactcgtatacagatgttgactgaaaattgctatacagatatttttaaaagattgcacacatgtatcatgagagatgaaaaaattcacattacatcaagcagcaaaaatgttcataaactatgtctattttatgtaaaaattcaggggtttgcatgaaactctacaataatacaattttcatcagcttaacatttattctatgccaggagctctaatgagtactttgtatgtaacttatttaatcctggtaactgagatactgttgtcctctgccttcacagatatgaaagctgaggtacaaacttgaccaagatgtcaagaaagtagtaagcagttgagccagcatttgaacctgaggttatggctccagagaccatatatttaccataaaatagtaacaccaaggaattagaacttttctctaactgataggatgattttgtcatttgtatgcatgccttatctactatctataggtattacaaagaatatgtattactttactataaagaaaaaaatatacagctagctgcatgttagggaaaaaataattgaacttataggcaaaaacagatgttgaatcaggtctagtgaatagtgcatgctcatgacaaaaaaaaacattcaatccacaaatgatgtcccaaaggctcacatgtctgtatgttgaagtcaacttagtcaatttcttaattagttcattgaaatataaatgcactataaagaaaagtctgacaatattaaattgagaaattaaaaaagtaattttacattttgacatatttacaccaattaaactgccccatattttatacattttacagtgatgtctaagatagtgcctaataataaattcatataaatatatcaaccaataatgcatttagaatggaggggttaaggcctatgtttaactcaatactacactgctttttttcaactgtcatttttaataaatttgcatttatacagatatgtaaatattttaaagtctttccaatattacttcctagcagctgcccctgcccccagcaatcttgttagttaaattaataggaaaagccgtaaaaaaaaaaaaaaaactttcagattaaaaactcaacctaaaatcccattcatcagcatgctattcatccatagcaatattatatgagagaagaaaaatacactctaagcacacagctgacagatatgccatttcaggtagaaatgtgctgcttcatttaatttttgatgaacaaaatatgtatatcagcaatcaaaaatcattacatctactccctccataataaaaaggaaattctgagctcagtagtttggagttgctttttcaatcctggaaaatatgtgaaaaaaatcctttatttacctcagtgatattgatagaatatgatgttaatatatgatcatgtcaattttaaaccacttgctatataatagtttcagataaattgaggaatatagcctatatcttctctctgtataatattttggtttaactgaccattaaactccaaagaagtgttaccgacctagataccaaagacaataatatttttattcttagacctagcatttgtatgagtgcctattttcaaaaacttcccaaagataagtttcatagataaatatgttatattttgtttgttcatcactcctgaaatacttgatatattaagcaaccagcacagaaaaaatataagcaagataaagaacagaaaactcacatattaaatagcaaatggatagaaagtatatattttaaagactgcatagacaactaaatctttaaaacccatttccctcatccagaacgtttaatacttcattttatctgtggactatcatttgagaaataatatacattaacaaccctgtggatggcacatactcccagcagaaaggatgctcaacaagtacaattctgtttcctttgagtcctacagtgaaaatgtccttaacaaggtgtggatccagtactttcaaaggactagtcctcagacaggctggagagaccccttcccacctgttcacatgttccagttgaaatgccctctgttcccttccttgacactccccctttataccagctattgatactattagtgtggaagaactctcagatgatacagcaatcactgccagcataggcacattgagcaggaatgttctatatgtgtaaattccagagaggtatttaatttttattccagaatttaccatcttctttcaatctccatggacttttcctttgcccaactagatacttttttttctgttaattttattttctcatttctattctaagatttttttttttgtcttaatgttctctttatcctaatcttggtgtatatgttctcatattataatctcactgtatactatatagtcctcaaagtataagatgctataggtcaggtacatgatacattaatacattaaattcaattataatttgcaaaaattgtgagttgttacacctgttttccattaagcttcatagtaatttataattctataatacatgttactggtatgagtgatgaaaatgacaactgttaagtgattcactattttcattacaagaatcagtagggttctgattttaaagagtgcttatggttaggagaattgtatgattaattgtgtaaatggtggctatgttaggaatgacagtattttctgaaattggttagtgttcacttttatgggactgaattgtgtctccctgaaattcatatgttgaagccctaatccccaatgtgactttattcggagatagagctttaaaagaaataaggttaaatgaggttagaagaataggactctgatcctacatgactgatatccttagaagaagaagaatagacatcagtgatatgtgtacattgagtaaatgtcatgtgaggacatagtaagaagacaaccatggtcaagccgtggagaaagggaggcctcatgagaaaccagacctaccaacaacttgatcttgaatttctgtcctcttaaaactgtgagaaaataaatttctattgcttcagccacccagtctgtggtattttattatgacggccctagcagactaatataataataataggatgttttgtgcaatgatgcttatataagaacccaagtgaaataacagactccaaaactcctgataatcatcatgtatatgacaattgcacatgacctaattagactgtgtttgccaccgcaaaacaaaaacctggagtttggggaataggcaaaaaaggacacagaactcttgcttggaagatgctagctgaactcctctcatcattaggaactgaccatataaggatttggtgtgtgttggggagagtatggggggtgagatttaaaataagaaaacttaggtaatttttcctaaagtctgctgtgttcatcttaattttggcagtggtgctttttcacttttgtcagtatggctgaaatcttggaggccacaaacgcagtgaattaagaataagttctatgagccagatctcatattaatctatcaagattttttattcagaaggaatttattagatttcttgaaagagaataatcttatgaatgtgcttttgaaaactaacagtggtctgtaacaaaaaactccatgtacatacacttttgaaaagtgggtttcaatttaattaaaaatactgagtttttcctttcctatgaattgtctacatataatacattctaagccttgagaaatgctgattatatgataggtgagttaaaacatcataaatgaattctctttggaattatttaagtgtagtatgacttaaataaatgtgtcataggaatgtctgtcttcaactaacttctttattaagcatttattttggatgaccaatgtaactatcatcatgtaacagaaaataaacgaaaagcttcaaccagttgcctactgattacgtaggcaccaatacaggttaaccagtaaaagataagataaaagcaatgattatctgtatagtgtagtctatataaaataaagacaacgataacaattgagtatagagtgaagttggaattactggagggacctagagctgtatcacatacgtacaaaaaagcacacttctcacatccaagatgaaaaattttgaattaactctttttttctttccttaatattttataacaaatatgtcatgaaactggttgtactttaaaagattctcctcttttcttttccttactagagcctgacactctcttcttcccccatgactagattacttgaataacttgtatgcctgcacaaaactccaggagtttgcctcgcaggcatcctgtattttttctattctgtgtcctcctaaagctttacaacatgcttctcagctgtacttcaagttacaaagacttctattgcctagagcatctggcttaaaattttatctctgacaactaaaaccaccgtattctggtcccaccttatcttaatagtctgttaattctccacacacatgcttctccagtcaaggcaggttcctcatgagtttgcacttataccttaggcccctatgttctgtttagttctctcttttgtccttgtttgtatactttttcctgactatagtaatgtctatattctttgtctgtttatctactcgtccagttttggtttaattttcctcttagtgtcttgaattcttctgtattagtagtgcaaatatagttacgcagtaggaaatttaattacatgatatcttgggttttgtgctgagttttatagcatgtcatttgtaaaaatttctgagaatagggaccagtatattatttttatgaacacatgtgtatagttattttataaaatttcctttattgaacaactttttaagataagtatctgactggcttgataactagtatataggtatgtagagccaagtttttgtatgtagccataaaccttgttgtcgtatatgaggatgacatatgtgacaatatagttgtttgcagacttagatttagaatgtattttatatgctctttagtgttcatttactagtcaataacaacaattgagctaattatttaaaactctacctgaaatataattctgattaaaaaaagaaccctgactttcaataatcaaactgaatttagggtgactatatgtttgcaaagtaaatgaggagctacagaagatatgtagatacaaacatacatacgtatgtgtaatggtctagaaagaactttgaaaaaaaatgtcgtgttcaagtacgaactaaattggctaagttcaggcatgggaaggtgagttacttagatggtatgctctcattagaaaggaaaactactgagtagatcacaatgaatattaaacagaacactgataatatatgcctcactgatttgcatatttaggaagatgatttaagcacacaaaaaaatccatgtttatgcatgttgttctttaatgaactgaataacaatatgggacagattaaaggcactttcagtatgagaaattaaatccccacttcgttatttcaccaaggcatatcattgcccacctacgatttctctgagtttgatcttggttgaacaaaacttcggtgaatgtcttttatgtcatctattttccaaataaatttgcatgtgtcattacattttctcaaattaaaaagatgtttaagctttattctctgtctttttaaccttatattttgccttatgtttatctaatggttcaccttttttggagcatttttttaaatgcattattgcatttaatccttttgagacaggatatttttctgcttattttgtaggtgtggaaggaagctaaggctaaaaaaattactgtggccatttttagtgatacagttgagagcataacctttggtttgtgatcttaccctttgagataattacagtctaattgaggattcagaataacaaaaagtgaatacactttaaaatattaaaataacagtacaaagatttcaatttgaaaacaactgtagaagaggtagtccttttccccaatcttctaatcacaagcgtttttttgttccctttcctgaaataattgtcatattttggtagtcagtgtaagataattttacagaagtgacctatcttagcgaacatctgacttcctgattctcatttcttgtagttcatcaaacgtttggctgaaaacatatttgagatttagaaaagaaaaacatttccagctttagacccagacacactgtaccacccatctttgtctgacacagagagattctttgtgagaagagagagaagtgagatgatgaaaaggaacaagctgtgctttgggaaactgtcttttcactatcatcagtgcacctggaggactgaactttgccaggggtaactggtttgctgatgatcccaaaagtgaagcaggggctttgacccaagatagaggttaatgttactattactgtctgtaggttgtgagtcaatgaccctattagttgattgacacattttgaaaaccgagtttattgttatggtcaaatgtaacttagaagacagttgttctgaaacacattgaataagatgcatagtcatgatggtgcttcatgttaattagataaagctagagagttaagatgatccagtgaaaaacttcaagtactttagaatttcctggcatccctgatcctagggtaagacagaaagaagaaagagggaatggttttaaactgtggacgtccacagagatcaatcatattgatttgtttaattatatcttatttttcttgtattatttaatgctattctttcagtaaatattaacagagctgcttctcagtctcaggcactgtgtactatgctggaaatgtaaagtaagtgatacagaactaatctgtttcatgagaaatacccattatttattgggtacctgatctgtgtgtaatggaattctaagtgctttatcaatattttctcaccaacttgtgaaactgtttctatgattatctcagttttactaatgtggcaacaggcacagagatctttataaagacaatgacaatttttgttagagtgctaatggtctttaagcatctaaagtaatagcttaaaatactactcgagttcttcatcacatacaatattagaaaataaaaaattaaaactattagggaagaaaatataaagtgaagcaaatgcattcattcatatgcatgcaatctttctgctatgcaagatatataatcattggaagaaaattatttgattcaacaaattagctgtttctttcacatttgattacttatttcatgctacaggtggttaagaatatatgtctttagctcaaatacacatatacatatgtaaaatccttgatttttactggaattttcgatgtttttcactcaggtaaaactcccttaattaaaatataggatattttggcagaattagagtgagctacagttttattttcactgttagccaacgtcacacttttgatattacacaaacaaaaaaatgtagaaaatgttgctgtgtgttgaaaatttgctatcacctaaatgtccaaacgcaattcatactacagtgtgcttggaaaaagtttgtgaatgaaagatgagctctagctcacctttacatctccaagttcacctgagttttatctatgtatctaaggtatctatcatcctacctactgatctgtatctgaactcatcatcaccccatgattttgaatgtgttatcaataataccttcacaagccagcaactaaataaacagatacatggtgctagtcaggtgagcaaagttgaagtgtgcatttctaaatgtgctagtttcttttttatttaaatataaaattgaggttttaaatactgtggttatcttgagaccaaatttctacactgttatgtaatcaacatacatgacttcagatgtatgactcttgcattttagtgattggtatatgattatttattcaaaagtagagcaccggcagaaaaagaaactaaagaatcatactcaggaaatgaaaacaatacattaatggtatgggaaactaaaattcttcatttctttggtttacacgatgttgcaaaaattatttaagtattcacaaagatacataaattagaacacagtgagataactgtaaattaaaaatagataagaaagaaatagagagcacagacattcatgcatgggcgctgatgcacgtacacacaagcttagaattataaaatagaatcaacaataaggctgatggaaaacacatatcaattatatgaaaacagtaaacctttggagaagggaaaaagttggtaagagtagaagcagccaataggtatttaccagacctattagctaaattttaggaagtctgatttcaaagagttcatatgatactaactgtgaaatagaagatgtaatatgaaaattacagatcatacaatcctaacgactatctaaataaaaatatttgctgttttcatgatggtgagcgagttctcgcaagatctagtcttttgagagtgtgtagcacttccccctgctcttgctctctggctctgacatgtaaagatgtgcttgcttgccatttgccttctgccatgattgtaagtttcctggggcctccccagccatgcctcccatacagcctccagaactgtgagtcagttaaacctcttttctttgtaaactacccaatctcaagtagttatttatagtaatatgagaactaactaatataatcaactcaccactagcttcggagaaagaaagaagtcagatttctctggtcttttttattaagaatttatttattttaataatttattaaaatattctgacatattttaaactttggttatatatttccccagcaactgttaattcttagatatttaatatattttatttatcagaaattactgtgttaatgtagcatcatccttttgtaaaagcataatgaaagaggattatctttgcaatgcattttttaagatttgatctcatccatagttatgacaacttatcccacatgttgcctctaggttttaagcactatttcaggaggttgaacatcgaaggtctaatagttttaaagaaaacattaatgaactctgaaaattgttttataattataatgacatattagaactttaaaaatattgtatgctaagcttctctaaaacagtggctgctaaaggctagtccgagacatataattgggatggttatatcagaaaatccactcttgcttccagtctcgccgtgttatacacaggcacctgctttgctctccactatgactgtaagctttctgaagactttccagaagctaggtggatgctggtgccattgttgtacagcctgcagaactgtcagacaaataaacctcttttctttataaagtaactcagcctcagatatttccttgtaacaatgcaaaatggactaatacataaaattggcaccaaggagtggggcattgctataaagatacctgaaaattgggaggtcaatgtgggcggatcatgaggtcaagagatagagaccatcctagccaacatggtgaaacctcatctttactaaaaataccaaagttagctgggtgtggtggcacgtgcctgtagttccagctactcgggaggctgaggcaggagaatcacttgaagctgggaggcagaggttgcagtgagccaagatcgtgccactgcattccagcctggcaacagagcaagactccatctcaaaaaaaaaaaaaacctgaaaatgtggaagcacctttggaactgggtaacaggccgactttggaagagtttggagggctctcaagaagacaggatgacgaaagaaagtttagaacttcttagagacttgcgcttgtgaccaaaatgctgatagaaatatggacagtgaaggtaaggctgatgaagactcagataaaaatgagaaagttattgggaactgaaacaaaggtcacttgtgttttgccttagcaaagaacttggctaaattgggtccatgccctagcaatttgtgaaagtttgaacttaagggtgattatttagcatatctgatagaagaagaaatatctaagctgcaaagcatgcagtatgtggcctggcttcttctaaaaatttttgatcaaatatgggagtacaaaatgatttaaagttggaacttttatttaaaatggaagcagagcataaaaatttggaaaattctgcagcctgggcatgtggtagggaaggaaggagtgttttcagggaagaacttaatgcagctgtggaacaaccacttgctagagagatttgcatgatattaagtgtttcactccatgaacacagaatatttcttcaatatttcatttttttcttgttttccccccagcctctggtaactattattctactttctgcttctattacttctacttttttcaggtttgtcatgtgtctttgtgtgcttggcttatttcacctaacatagtatcttctaggtttttctatgttgtcacaagtgactggatttttttctttcttaagactagtgttccatctgcatgtataataaatcttctttatctgtttcttgatggacacttaagttgattctatatctttgttattgtaaatagtgctgtaaccaaaatggaagtgcagatatctcttccacatactgatttttttttcctttggaggtatatctagtagtgggattgctggcttatatggtggttctatttttaattttttgaggaacctccatactgttttccataatagctgtactaacttaaattacaccaagagtatatgagctctcatttcttcacatccataccaacactggttatctttcatctttttgataataaccattctaacagcagtgtgaggtgatatctcacagtggctttaatttgcatttccctgatgaattgtgttattgaactttttttatatacttagccatttgtatgtcttccttacagaaatatcgattcacattctttgcccattgttaaataaattattattattttgctattgagttgttttagttccttatttattggatattaatcccttattagatgcacggttcagaagtacagtacttttttcccatttcatagtctctcttcacactctccattatttagatctatgagttctttcatctgttttgtggttctctacctacagattctctacatattttgttagatttgttcctaagtacttcttcttggggtatactatagtaaaagttatttattaaacttacaattctaattgttcattgctggcatatgagaaagtaattgacttttgtgtattgaccttgtgtcctgtgactttgcaaaactcacttattagttacagaaaatttttgtttggtagttttttggggatttgttatgtagataatcatgaatccatgaataaagacagctttgtttttcctttcaaaagaaaacaagaaaatcctggagaatatgggatatgcgtaaactcatagtcactatgcacagagattttaatcctgtgggtttagtatacagactaacatacgtctttttaaaaattcactaagagatgctaataaaggaggtcagaggaccaaagttagaacattagtcaagtggaatatattacagcatatggtttcttaaactagacttaagaccatagcatttctatgccaaatatctcaatccattcctgaagttcatataaagcatatgtgacattatacaaccacaacacttcagtgcagcaaccacacaaaagaatctttttgtgacttctgtctctaacctctaaggattccttaaattgaaatagcatgcgcatctagagcgtaatctagagcttcatatgaaatcacatgaagtaatccttgatgcggtatctttctctgttaaataaaatgtcaataaaacatgaagtatctgaaaaaaactcatttcagtggaaatgaacaggtgtgagtcctgcttttattgataatcaagtaatatcaaggcatcattaccatgtatgtaaacagctaattaaaatctatctccttcattaaataggctagcataccattgaataaggaattcactacctccagtcccaaaatgaaatggttacttttttcatttactgaaattttaattgacgcattgatatagacctctatatttctgtgttaatctcttaatattaatgacctagtttatccctaaaacatatttaaaactgtagaagtttcatacattatgaataaattaaaaacaggagaaaacaggcattccttagtttctctatgttgttgaagatattcttactattacataatttagatgagaattaagcaaactacagcttgtgcaccaaagccacctgtttttataagtaaagatttatttaaacatagccatgcttacttgattacctgttttctgtggcctttttacactgccgtcaaaggtgaacagttgcaacagagaccgtctgacctgtgaagcctaaaatgtatactattaggctcttacagaggaaagcttaccaatgctgaatttagctaagagtcagaaaaacagttaagtgtacattgtctactttaaaaaatatcaagtttaaaataaaatgctcataagtagtttaaaatactgtttctaaaaataatatattgtatgtaaaattattatgtttgagtaaaatcctaatcaataggtgaatcaacagctataatttaaattgtccatattacatagtttgtaatactgtatatattctcagtcagaaagcttattttacaataaagtacaaggatactcctatgggggtattttaaaataagttacagatattttaacatagatatagtcctattgaagaaaaaaatagatgaaaaatattaactatattgcgaataaactttttttggtttcctaaagatttactgtagagttcaactttccctcaaatatgtattttttacttacaaaaatcctaataaatatttttcttttaaaaactcttggtggaagtgtgtaggttcataatactgtctttatatattctttggtttaaagtatatagatttcatatagcaaattagtaagtcagagtcaactgtggactgtttgcttgaaaactcatacctctgcctctagatttaagcaacaattctgaagtaggcattaggcattacctttaccaacccccagggggtgtttagcagcggtgtgtgtgtgtgtgtgtgtgtgtgtgtgtaagtgtaagagatgtttttgttttaatgacagggaagtgtttacttcccaggaaggaggaatgtcaaaattcttgtgatatatggcaaatcccaaagggaaacattgttctcctgaaaataccatcattgcctccattgaggaactctgcaagtccagagattatttgagaaactacagaaagctttgagattgcaaatataaatctgctcacgttcactcatcaatttttattattgtcacttagtggatggatctccagttaatgatttttctaatatgttatttaaagtatttctcattataattcaaataaatggcaactgaggtcatttttacattatatttatatttgaaaatgtactcaattatgataattgctaatatttcaattgatgcccaaagcaactgtattttctgatatgttctttaaagtattcttttgtaatccatgagtcagttagcttcttagactgatcctcttaaatatgaattcctcggatctaattcgttggaggatattcttttgtaaaaaaatataaatgttctgatgatttttatgttgttcttttgccaatcattgtagattttttcctttcttttaaaaaatgtgtttagctatccaaatgcactagactatttcccagaagttatgctaataaaattcaaagcactatctaagagtaaacagaagaggcctgttccagtttcagctgcttgaaaccttgcactagtgaagatgtattcatgtgaaaaaatgatttgaagctgaaaaaaataattttgaaaggtctgacattctagctgaatcttaatctttgtccatgactcttttcttaccttgtctttaaaactttccgaagtctttcatttgctccagcaaaatagagaccctgatatcatggaaatagtcatattttatgtatgtgcttttaataagactttcacattttcatatgctgtgtatgtgtgtatggttgtgtgtgtttagagaagacttcagctcccttcatttgtaaactaagctcccaaagagaaaataaaagctgaaaaaaattaatctgtctctgtaaacaaatggatgggccctaagctttgtagtcatctcgtttgcagtagacgaactgtgacaaacggaccctttagctacccatcattcatgctctgagtaagtttagcttctacctacgtgccatataacctcaagaaagactttccattataaatgaaaaatgactttattcatcaccttcgtgatagactcgatttttaagttatttatcataactataaaaaaccaagtgtataaatcaatgaggttttaaggaactgcatgccatgagcactaaactgaaatttagctgctactagtccttcattttacaatttgaagaaacaaaaataattgctcattcttaccatttttcaagaatatattgttgactatagttgccatgtagtataatagatctcttaaacatattcctcctgtgtaactgtaaatatatttgaccatcattttccaaaccctccctctcctgtaaccatcgtggattctggttatcaccattgtagtccctacttctatgagataaacttttcatcatggtgcacatgacagttgatatgtcaatttgaaaaattacttaaaaatttaaataatcattataacagcaaaaattttaaaaagaaaagaaaaatttatcaaacattctattgaactattcagatacatataaggtctcaggctctggtatatacatggcttatctccatctctttcctcccaatttaaaagtccttggtagaattcttcccccttcccactgttaccacctaaggtgtattttatattttattttctgttccttttttctcttactggtaacaaacagaattcctggttttattggtatgtatatttcttcttgaactttaacccaaatgcatcttttgagtcaggaacaagtacttgtaaggaaagaagacaattttcatttttatagtcttacaaccagccaaagcctcaaattgctttgtaactcatatccctcatctggaagaaatttagaaatatgtaggcattgtttacacattatttcaacccattgtgtacccggagactgtactttgcttttttctagaaagattttttctagaaatattttaaagaaaacaagaatttttggctcttttgttcttagagttaaaatcaaaagccatttctggctcttttgttcttacagttaaaatcagagaaacatctcaaaaagaaacaaaagtgtcagaaaaaaaacagacattttattcaaaaacacttattaccgtgtatgtaacaggtactgtgctggcactagggttacaatactgagaacaaattaaatctccgaatgcatagaatatatagtataataaaaaagagagatattatttagctcatcccccaaatatatgtgaaatggtaactgttatgaaagttcttaggaagaaaagcatgcagtgtgatgtgggagtacagagggaatttaaggaactcagtgaaaaagttgtgaaaaaatgatggtgctgaactgcaatgcaaaaatgagtgaaagttgattagacaaatatgaaaagaaaataggtgtatcaggaaaaggaaaactggcaggatgaaacattaaatacaagttaaaaattgaatttaaaaaatctgattaaagcacaatgagctaaaggcaaattgtagagacaatgagccttgagagaggtagtagaaagatcacacagggccttcaggatcctttaaagaatgttgttcttaatgcacaggtgaaaaggttttaagtatgaggagatactataatctgaattgctttccagaagaaatctggggctgagtggggaaaagatttgagagacccataacagaggcagagagaccagccaggaggctgttgaaggagtttaggggagaaatgatagatattatcttggagatatagaggtgttcatgtgacatattaaaataaaagggttgggagtggtgactcatgctggcaattccacagcgttaggaggccaaggaaaggcaggaagtacatttgaacccagaagtttgatatcagcctgagcaacattgtgaaaccccttctctaccaaataccaacaacaaacacagggtgtggtggtgtgcacttgtggtcttagctactcaaaaggttgagacaggaggattgtttgagtttaaggttacagtgagctatgatcatgtcactgcattccagtctgggcaatagggaaagatcttgtctctaaaaaaaactcaaaacataaaaggaacaggctaaaagaagacaaggtggtagctagaggaggtaaccaagcttaaataaccaagcttctgttgtttttaacatgataagtgattatgtttaaaagtcattgggaaggatcttaatggtatttcaaactccctttctctcttaactgggtcctttccaataacttttaagcatgttcaattctccaatgtcaaaacaacaaaagaagcttggttattcaatactagctattcagttactattaaccattacatgaattatatataaacttttatatttcctacatatagtttttataggagtttgacatatttcattattaaaagcagaaatctattagaaatattttttgttgttttctatttgcttggtaaatgttcctccatctcattattttgagtctatgtgtgtcattgcatgtgagatgagtctcttgaagacagcataccaatggctcttggttccttatctagcttgccactctgtgtcttttaattgggagcatttagcccaatttacatttatgtttagtattgctatgtgtagatttgatcttgtcctcatgatactagctgcttattttgcagacttgtttatgtggttgctttgtagtgtcactagtctgtgtactttagtgtgtgcagccataaaaaagaacaagatcatagctctgattatattctatatagtgatattctccaaatgtatatctcaggcctgaagcactctcctgaacttcatactcttacttcccactgcctactcagcatatctaagtgagtgtctgatgtccaaatttatcttgtctaaaaccaaatttatgatctaacaccactgtcctattttactcctacaaattttcccaacatacgccataatgaatctctccttttattttttcagactgaaacctttgagtcatccttgactctttttatctcttatgtactataaccagtacctctttaagtctttttaacattaccttaaacttgtattcaaatattataccactcaagctttccattgctatttccctgaacaagacacaatttttttttttttacctcgttattataatgggctcctaaccagtgtaccttctctcttggtcaccctcatgcatcaccaaagtctgtctttgaccagcagattttaggatcctttaaaatacatagtgagatcatttcccaacagtttggcccaaaatgttccaatgctttttcatcttactagttccaatgtttttccatcttactagtaagccaacatcattacaagtgtccacaatgatctgaatcatttggtttctgtgctatatcttcaaatttctctacttttactttccgtctggctcactgtgccctagatctactttctgttctctgagcagagcaagtgtgcacacactctcagggtttttgcatttttgtcaatcaacacttcctccccgccaggcatggattgctcttcttctgaaagccagcggggactgttccttcacctcctttttgtatctgttcaaaggtaatctctataaggccttatctggctattttatttaaatatccattcctttcctcctttattacttttcttcctacattttccttttgctgattcatttttcttcatagaacttatcagcacctgccctaaaataaattgtacttttttacttgtctatttactaggcctggaacctggtaggcattcaataaatactcattttatgaatgaatgtgtacatagaagaaattaaaagtaaattttagtttagtgacttctcaacttattttatctgataaaatgaagaaaacagggccatttctgttttctagcttagccttggaacatggtgataaatagtaaaatatgtgggatgtcttttagtttttaaattaaatttatagctcattaaatcctgtttaatcaaaaagctgaaattatgtataaaatactttgataaaatctaaatcttatgacttaaaagcttgaactgaactcttccagtcatatgtagtcgatatttagtaagttttatgtgcctatgtacataaagtccagtcatactattcttaaaacatctcaatatttctcaacttataaataggaaatagtgtatatttgaccagtgatctgtgtttagaggtctgaaaaaaaatcctgttactctcaataaccatcaaactctaattgatgaagtggaatagacctgtatcagcattcaaaaatagttaaatctgaaagtactgtcaaaaaaataagctcatatgtgttgttaagagtgtaaatatgcagagaaatatacatagcatttatgtgacagaagaaataatggtctatatgttagtaatggctttctctacatgctaaatgacaaattgctcacagctttcgcagaatgatacttctgtgctaaaaaaaaaaaaaaagtgtatgttttcctgatgccatttattactttcaaacttaatatctctttggtattctttaattatttggaacaaaaagtctaaaataattgggagtttattgcatatttctttgaaagtccatctcatccccatccccataccactgggaaagttaaatctgagttggatgggagaagagaacaggagatgtatacataactgtgcatataccgttggttggctgactacaatcccgtctacatttccctttttcctagccatattccaatagttgccaagacatgaccatatgaccaagcttcagtcaatgaaagataatcttagcttccatgaaggtttttatagacgggaaaaaatcaacttgcatttccattttgcatgtttttcttttctatgtcttactgccagcgatgtagatatggtgaactcaaattcaatgtaatttagattcagctactctgatggtcttatgcaaaatcaattttggaattaaataggataagagagaagagattcaggagtgtctgaaggatatagtgtttaagaggcatcattggagacatagtatatttgagaataggcgcctgctttccccttccaattggtggaaattacaccccttccgattgatggtgtgtttctggaaatggcaccagtaacttcctgcttccctaccttttgcacagagtctctgtgggtcagttctgcaacattgttttgggggtcattcattgagtcccatcccagaacctgctctttatgcttctgatgatactgtaaaataattctggcatattatgtaaatgaggagccaatcaaaaggcagaaaccacacagcaattttaatagtaaaagtttaatatgaagaattactggctggtcatgtggctcatacctgtaatccaagcattttgggaggccaaggcaggcagattgcttgagtctaggagttcaagaccagcctgggcaacataggaagaccctcatctctataaaaaattcaaaaaaaatagccaggcgtggagggaacacttgtagttacaggtattggggaggctgtggtgggatgattgcttaggccaggaagtggaggctacagtgagccaggatcgtatcactgcactctaccctgggccacagagtaagaccctgtctcaaaaaaataaaaatgttaataggatatttagtaaccttaatttactagtgaggagtaaagagatattttaaaaaatcagaaatgtcatataaagggaatcattactacttttaaggctaacatagagcacccaagaaacagaccaatttaagagagaagctcctttcttagatctgaaatccatgcctctttgggagggtggattcatggcttactggatgaaggagaagtttgctgaactgccctctgctagccagattgctgataattcaccctctgccgttcttcaggaaagtgcctacagggaagtaccatgtactgctggcagtggccactggagaacccgtgcacccttcagaaacctgcccctgcagagaccacacacagacacacacacacacatacacacacacacacacacacacactcagcaggaacttgctgagacaagcacaacagaatcaggaagagaggacctctatcctgctgtgaccctccagggccctctatggacatagctcgcttaatatagtgccagacagcaaaggagaaatatttagagtccagctactttgtcacagaacaggcaatgtattgtggaattggggctgagaggcagtaaatcaattactaacacatatatgcaataaaatcctgactaaagcaccaacttagaggcttggtgttctctgggctcataatagtcttcatccgaatctataagtcctccttttgcactccttgtatctcagtgtaggagttgcctcctcagtgaggacttctatatttatttaaatacttttaaatttgtattttttaattgaaaaataaaattgtatatattatgtatgccatgatgttttgaagcatatatacattgtggaatgactaaatctagctagttaacacattcattacctcacagagttaccatttttgtggtgaggatgcttgacgtccactgtcagcatttttcaagaatacaatatattgctaactattatatatcagtacattgtacaataaataattctcctcctgtctaaaatttcgtatcctctcacctacatctccccaacttcctccaccacccccaaccatcccagcacctggcaaccatcattctactctctacttatataagatcaactcttttagattccacatatgagtgagatcatgcagtgtttgtctttctgtacctagcttatttcacttaatataatgtcctagaacttctgtatttttcagcatacttttgggtgctaataccataaatttttctaaacagttagggtttgcctttctcataaaaagaggtactgcaataggtgatctaacatttggtgctggctcaatgaaatcagggtgttgggtcagtttctctacaatactctttgtcttccctatctgtcttagtccatttgtgttgctataaaggaacacttgaggctgggcaatttacaaagaaaagaggcctatttggctcatggttcagccatatgagaagcatggcacaagaatctgtatctgctgagggcttcaggaagctttcgctcatggcagaaggtaaaggagagcaggcatcacattgtgacaggaaggaagaaagaaaaaggggaaggaattgccagcctatttttaacaattggctctcccaggagctcgttcatagagctagatctcactcattactttgaggacagcaccaagccattcacaagggaaccctctccccatgacccaaacaccacctattaggcccccacctccaacactgaagatgagattttcacatgagatctgtaagggacaaatatccaaactgtatactcatcgcctcacaatatgatggcagtagtcctctatatcttgtcttcacaaggcaatgtccaaagtagataatgacttggggactatcctcaggagagtctcgctcttcatctgacaggaacacctttcttgggaatatccatattctactttcacttcactgacagattcctccataacatctcagaattgtgtttcacactttccaccatttgctatgtgggaagatgggaaagtgaagaactggtgagagatttgatcttcccttaggactgaagggagaggaatggctgctgggtaggcagacaacaacgtgtgctacaccttctctaaccatccttgctaacgggccagtttccccaggtcattgtcttgcccttcgtcaggtgtcattttctgtttcggcatttaccattttctgaatttattttgttatttttcatgtgagtgtattatctccctccattagacttaagcccccatgtttactgggacacatttgtcttatttgtttttcaggtaatggaatagatattccataaatacgtgtcagctgaatcagtgtacgaaagagtattttaaaaatattgccccctccacattttcctactagtaaaactttctactcctgaaaagtatatttagctttctctaatttttccacctcccattaaatacttttaaggaagtgcaagttaggtctttcactagaaactgtttttctactacgcctcatgcaaccagttgactctccaggtttgtctgagtacatggtacactgatgttctcactaaagagtcctgcattcatcccacagggaagtttaacatctaatgttgttctgccccttgatgatgggctttaccataagatcagctgcttcatgctccttccaaatgtgtggtcctacacaagtattatgcatcatgtttttttatatgtattgcagcctcttaagccacacatgactatatgtatcctttgcattttcactgcaggagacaaaacttgcaggagaagagaatagctctttctcttgaggattcatatctcagtgacaaaaacatagaggtatagaaataacaatatccaatacagtgaacaatgtcaaggaaaattttcatggtttattggtggtaaataaggtaaatacggtgaagtgaacaaacaattctgctatgatattgacagaaggctttctaattgagaaaaaatatgaaagttgaagtgaaagtatgagaagaaatgacttgccaccaatgtgtaagtcactgtgtttccaaggtatgggagaagggacttattccattatgtattgttgcaaaacaaatttccttataacttagtggcggaaaaaaacaagtttatggcctctcatggtttgttgtggatcaggaatttgggaggtgtttggggacagtggtgtggatgcaagtcagacaagaactggagcatctgggtgctccatctggcctgctccatctgggacagaccttctatgtccatgtagtctaaaggctttcccatgtggtctctccacgtgggttaatttgaacttcatcaaagcatggcagcagtaaggcaactgaacaaaatgtatggtaacttagtgtactggcaagtgttccagcaaacaagatggaggctgcattgtctttcctaactgaaccacaaaagtcatgtagtgttacttcttcttcattcttgtagtacaatgaagtcccattcctgcccagattcaaggagcagagattatagacacctcttttcaatgacagaactgtcaagatcacattgtagaatttcttctgagatagaagatattggtacagtcattttggaaaatacactgtggaacggtctgacctctggccacaatttacatccctcccatgggaaaaatacacagcctcctttcttcaggactctccttttaaacctcccttttttatggcaatagtttcgggctcaaggtctaatatcctttatattatgtccacatgtgaagaaagctatttgcagttcattacatattactcttgtttatgtaaatgcccgtgaattaaagaaatatgagataaccagtagagagattccaattcaaacatataaaacaggagacccagagcagtgacgggcatatagcaattctgatatgcagccagacatgtattgataattctttggttagggcctaatcttgctctctggagttgtcctctgatgtctcttggctatatcccttgggcatcattctttttccggaagtggctggtgtgtataaatgagaaacattctcattctgttttctatccatagcagttcaggagtccaaaggtttcttttcatttggcactgtttatccttttcattttaactttgaatcttttttttttttaatatgtggggttttgtaaggtatcaaatgctaatccactacattagacaaaatctacactcacagatctctttcagataggcagataggcccttctcttctttttggccatggttttttttttaacctgttgtggctgtaacaaattaccacaaatttacaggcacaaagcatacaaaattactatcttacagttctggagatcagaagtctaaaaagggtcagcagactattttccttctagaagatctgggggataacctattttgttgccttttctggaggttgcccacattctttgacttgtggccccatagcatgccaacctctttccatggccacatttcattctctaaaactaccctcccttctccttcccttataaggactcttgggtctatctagacaattcagactagtccccccatctcaaaatccttaacatattcaaatctgcaaagtccgtttgccatgtaagtaatatatccatctgtaggacccctgtgaagctgctgagggaaactcctcagatccttagaagccttatcatataatgaaggggatctgagatgcaagtccttgaaattctcagtggaacttttgtgtaggttaaagattctatgaggcatcatcttaaatctttcttacatcttaacaaaggaatttatctcacgttggccttatcttactttgagaaacttttgcttgttgaaaggactcttctgggcccttccttctcaatttagtaatttctaatttttattcaatatattaatacttctttaatttctttttttctttttatatcataagtagctagaggaaaccatgcagtaccttaagctctctgcctggtaatctacttagctctatcattgaatttttaaggaatattttattttttgtgttactacaggcaccagttttactagcctttctgccactataaatgtctcctttcctctagatgccaataacgttttctttgcttttctgaaagccaccttgtattagtccgttctcacactgctaataaagacatacatgagactgggtaacttataaaggaaagaggtttaattgactcgtagttccattgggctggggtggcctcaggaaacttacaatcgtggcagaatgggaaacaaacacgtccttcttcacatggcagcggcaaggagaagtgccaagcaagtggggaaaagccccttataaaaccatcagatctcatgaaaacttactcactatcatgaaaacagcatgtaggtaaccatccccatgattcaattacctttcaccaggtccctcccatgacacatgaggattatggaaactataactcaaaatgagatttggttggggacacagccaaaccatatcactcctctaggctcatcagacttctacaaatagtgtcttcaaggcctttccagcttctacctgccatctattcccagagcttttgctgtgtgttttaggagacatatgccacatgctttagtttggtggtggtaaatgtttgtaaacaatgagctctgctataatattgaggaagggctttcttacagagatagaatctgagaagaggtatcttcctgacttacatgtacactgaaggtgaaagaatagatgttgttgctttcttgcttttagggtaggaagaaaatcataaataaaaacaaaattctgaacaacataaaggtatgaagttggaaagactgaactctgtgtcttatccctcattccattcttcacaatgtcaaatgttggtgccctgaacacagtccatagtcaatgtttgaaggatgatggggaggcttagagggaccaaaataaacttcactgctacatagtttggaacacaatcagccatattctcagctgtgtttactgcgtatcctttagttcattgtctaggtaaatatttgggaataagtcttagataatgtatatcttccaaataaatatgtactaagggataaaacaaagaatggaagttccaggactttaaaaaaaaggaagaaatgtcaaatactcactgaaagcatagagtattcagcttgactttccaggagctactaacagaataatttcattgaacattatttctgctgcatgacattggaaatgcactttggtacagttctacttcagttgttttcccttgggtattgaaaagtttgccctggaaaatgagaaaaccaagtgatggaaaaatttcacagtatacggctaaatgataaatatgtctattttaatactggtaataaaagctggctaagaggttagatagagtacatgtgaggcagtggttgtatgtcaccaaaatatttttagaattgttggtgattgctttacttttgaaagagcagatatatgattgcctgactttggtaaaagatgatctattcttcttaaaattcataattgattaagagaccatgtaacactgagagtgaaaaccgggaagtacctgaaacatctttgcacatttagtatcccctgattgccagacatcatttatactttcctgttctcctagttgacctcctcttcacaccttattctctattcttttgaatgttggtttctagatgtttttgtttttcttttccctacagcctgttctacttataaataaatttctagcgtttctctcagaataaagaaatgacagtgactatcaatgaagaggaagtaataaatttgtgttgagatgtttgcagcaacaagagaagattgaaaaaataaacttatctggggcctatctttcttgtgtattatcttttaaaagtataagcaccttcaaggatgggagttcgcctcttggggggtttgttcattttgcgttgctgtaaaggaatacctaagactgggtaatttataactaaaagaggcttatatggctcatagttctgaaggctgtacaagcatcatgacaacatcttcttggcttcaaatgagacctcatgtagcttacaatcatggcagaatgcaaagggatagccagaccatcacatggccagtgagggagaaagagagaagggaggtttcagactcttttcaacaaccaaaactcatgtgacctcattaccacagggagggcactaagccattcacaggggattcaccccagtggccgaaacacttcccattaggcccccacttccaacattgggaattacatttcaacatgagatttggaggggacaaatatccaaatcacatcagggtgggtctgggggtgtataggggggttggggagggtcatgtggacaagacttcctccttaacaggaacataaagacatttaatgcacaacctaaatggagaattcaacagttgctatccaccttacagtgggcttatagataattctcagagtctgaaataacaccaagaaaaacctcattctttccttcagaaaggttatttaatttaggttggatataaattatatgcctagaacttctaaagtagagcccttttataaaataaaaatatatcagtacccttcatcctcaagcctagaatggtgggactacttatttctcagcagaagaaaccaacttcaccatttggatcatgatattgaccaagcgttggccaaatataaatggtatatgaaacagatacaagcaaaaatgatgggaaaacctttcaaagattttgctcagtttcaactcagtgcttagtgaacctctagaaaatattctaatttcgatccttctgcttacaatcaaaaaaatgagagacatgataatgaggagagaggttaaaaaaattcaggtggtgaagggcatgttggaggagagaaactatgtatttgatatatgtgttataccaataaatattaaagttgtgtgagtatgtaatattaaatacaggtcattggaaatcttaatatatattagtctgtctacattcttttttcaactatatagatattgaagaacttgcaaagtgttacactatacaatccatggtggaaattgagaaaagcaatggaagttggatggggttttacaggcccagggtgttgcctgggtgacttgactctgcccctatggtctttcacatttctccagcaagctagcccaggcatgttcttgtggtaaatgtagaggtataagaggatgcaaacctagtcattctggcatatgtcaagtttctcctttttatttttactgatatcccattggctaaagcaaatgatatggttactctgaaaatccagctgcagaaccctggaaggtcacagagtgagatgtgggggtgtgagacggttgcggtaaagtggcaccttaatacaaccaatctatcataccagggttcataaatccctccagctctttgctatgcccccaaagctaactgaagttccaaagctaactgaaagttccatgtataattgggagttctttacataatcatcccagtttattttcacaacagccttgtaggatgatattttctgtttataaaagatgaagatgcggtggaggagaaataatgtaacctgccctggtaaacttagactcaaacccaagtcagactacgaagctcttgatcttgttacaagagcagagaactggggaagtaggaattactcatagtttgagataggcaaaatagtaatcatagaaacatcaatggtgagagaaataaattgatggtagagtctgatattaaatagctgatagtcaagttgtagatatgtatccaaaagatgattgaatgtcccaaagtagctgtttactcttatttttctttgaatgtccaaattctgcagtgttagccaattaaaaaaaactactaattttgtctaatatagaatttatttttttaaaaaaattattgagtgaagtttcacttcactgcccaaggatttccagaatatacccttccaaaatggctaatgagacttttccagacattctcgtactttaactagaaatgtttttcaatgcagggtttccaaatgtgcctatgcaaaatactttttgactacacataggtactggtaaaaggaaagatttttgttcacttaaactatttcgaacacatacaaatatgtaattattttccaaaataaaacaaccaaaagtcagtttcagacagtaggaaaaaaaaataaatgaccagcaaaggtcaaagcagcatcagtctaaggaactttctgaggctaacagatcaatagaaatacatgcttggctgaatttaatagtctcaccactaaatagcatctgcttaaaaagatcttttactatagttacaaaaaatgaattgtaataataattactgctcagtgtgtataaaacactgcttatcacacacaagcacacaacacacacagagtcccaaagaaacaaattaaattctcctctagtgcattgaagccaaggtaaagtaaactagggactcatacctgatacaaaaataaaagtaaatatctgaagattatatatgataattttaatttgtatataaattctatactgtttagaattatacacagtgataatggtgatatctgatttttgaaattctaaaaaagtaaataacatctgaggagtacattaacattttcacttaaatgctagccattaaccacgtagttatcttttaggcatcttgttttagtccattctcacactgctataaaaatactacctgagactgggtgatttataaagaaaagaggtttaattgactcacagttccacatggctgaggaggcctcaggaaacttaaaatcatggcggaaggggaagcaggcatgtcttacatggcagcaagcaatagagaaagagtgcacaaagtgagaacacttaaccagatcttgtgagttcactcactatcacaagaacaccatcagggaactgcccccatgatccaatcacctccctccctggacacttggggatataggtccccccctcgacatgtggggattagagttagagatgagatttgggtggggacacagaggcaagccatatcacacctgtagaaagaaattcagacatgtttttacttcaggcataaagtttatagacagcttcaaacttccaatataattttcttggcaatactgacccaactggcagtgattattcttatctccaggctctctgaagcaagacgaactggaaattcaagctgttcttcaatattaagctgatcagaaaaaccaagaagcaagaaatgttccaccctttcaagcttcttatctctggggatgatctgatcttatctcagagacatctcacctcttgatcttgaggcttctgttctctaaatcaaaaaacctaaactttcacttaggatctctgtcaattttagtcagtatattcctggtctgacagatgtgagtggagagttggttgtgttggaaaaaaatatataattgttgcagtgtcaaatacttgcaagcttcaattttacctttttcttcaatcctcagaatttaccctctatttaattttccaaataagataaatcaatcacttcctctatgatacaagctattttgaatggaatgttgtttatagtatagttctgtttctcactgggggagggaggttgcccttaggcagattcaattctacctagaggcatttttttctcatcacaagtgggagtgaagtaatacagacatttcatggatagaggccagggatgctactaaacaacctacacacaagatagcccctcatgacacagaattatctgtctcaaatgttaatactaaggaggttgaaaaacctttagaataaacaaaagaaaaaagggcaaatactactgattacaatttctctagtccttcatactctgtctctatggagaatggagcctaaggctaaattatagattcacattcagaaagaagacttgatagtcaacatagaattataaaacaccatagaaaatactgaatgaaaaattttgagggttgataaaataatctattttgagggcacatagagtaacaaatctcctcccatttattcattcatccattcattcaaaacctataatgtgactggagcctataataaagtccagactgataaggacatcaatagctgatgtttgattgtggagggaaggaggaaggtaaaggaaaaatggttcttcctcttcatcttttttagttgtggaaattctaataatacatgtgataaaagccatgtattattagaagaagaatgtagatagaggaaagttaaggcaggaagtatctaacaattatgagaaatccacctatgctctatttggtgggttatgcttaaagacagttcattctaacaatgctatttgaaaatgaagaaacaatccaagagttctatcattcatccagcaatgtacgcaggacttaggttgacagaccttactcttataggtctaaacattttctctattttctaacttaccaagtctcttacattcaggttaatttgtctgctattacatttatttgcccctcctggataatgcctattcatcctttaagtcttcacttagatgactctccttagtcttctctgcaagtttgcaggtgtcccctcagtatgctgtccctataattctcccacgatagctagcattcccagtgattgtgatggcctaggtccactcacacttccactacaatgtaagctcttggaactctctcaaatagcatagcatataatatctagcatgatgtaataactagtacatgacatatatattcctatgtgactaaatgaatgtctttctgcgtgatactttctcaggtattttgtgtagtatttaagtatatttcaataaaattaagcatactaaagccactattgttctctagctggatgtcctgagaagaggttgaattctttaatctctaccacagttggcagggtcctttatctgatcaaacaatcagtgagattatacttgaattttagaggggcaaccgatggatatagtgagaagggcaaacatgcattttttttttttttttttttttgagatggagttttgctattgttgcccaggttggagtgcaatggcgtgatctcagctcaccgcaacctccacctcccggggtaaagcaattctcctgcctcagcctcccaagtagccaggattacaggcatgggccaccgtgcctggctaattttgtattttcagtagagacaggtttctcctcgttagtcaggatgttctagaactccctacctcaggtgatctgcctgcctcgtcctcccaaagtgctgggattacaggcgtgagccactgtgcctggcccagcatttcttcaagagtttgtacacttaatcaaaacctgttttcctatcttggtgatctagaatgtacccaacacaataattaagaattctttttaccttcaactatgaagtcttggagcagaaaacattctccttcctcctttcacctaagattcactctcactttgatcataggagtcatgaaaaagaaaagaatctccacctcatacagtggttctaacatatcattcaagaatccctgatttgttactgatccatatcacaaattaaagtttctcctcttggactaaagagtggaggaaaagtggcttgaagtctttgcctcaaatcttcctcccttatcctccccatgacattggactgtggaggaaaagagtatatttatgaagctaatatttatttattttgtcccaagacagttgttcttgggtcactatctgttttataagaaaaatatagaattacctgcattaccagttactcaggagatgcatgactcactagttaaccaagtccatactgaagtgctaccactatatcccaagaattactatgataaatttcaaatgacagctgaaatatatctctgtaattagatctttttggtgcctggatgcttgaattctgtagcattcaggcatcaaaaagcttaaataagtggcttgagcaatgtaactgaacccaaaacttcagcaaggataaataattcagcctatttatacaggcaacttatgttttcttgtttcttaaaataaaattagtctatttaaataatgtatttgatgtgacacgaatgagtaaaaatcctgtaatttgtcttttaagatgacagtttgtcataaaaacatgacttaaagtcatccttaatgcatggcatgccgtcattattttgaatttcttgagtatgtttgtgtcaccacaataacataacatagtgttattttatgatgttgcatgattctgacatagaatttgtataaagcaaatttgagaaagagctcccaaaatgacaaatatgtgtaaaaaggagatgctgccaagggcaaatgctttccaaaaatagtgccactgcactaattctcatataatgagcattaagaaatgtaatgatctcatatttgtcttattgttaaaactgcagaggtggtttaacaagtgttttcacatcatgtgtgctttgttagttgttaaaacagtttttttttcgaggtgatataattaaaatagaattgtaggtgccctgaagagacattcacagctccgtttaaatataagtgaaatttcacagatgttagccaaaatttctaaatgcatgcttgctactgaagccctactttaaaaagagtctttcaaagtatttttcctaagaccttttcagtgattgtttcatttagtaggattctttattagaaagaaatcatatattcattttgataaacaagaaaaatctgattgtgtacaactaagtttcctaaatttttatagcaaatgtgaaatctaactctatcccttccctgactcaccattggaactcaggtacccataatcatagtaatcataatccttggttcaaaacacaatctcttactggcctatgcatggcccatcttcctcccttccttccaactatcctttattccttccttctttgcttccttttcttacaataatgaattaagcacctgcaaactcaccaggcaaaacaaagtcaggatctccagatgatcctgcagtagtcatatgtctctctcatcccatctttctgcttccattcactagagaaaaccattatcttggaccctgtattcaccaatctctgcatttccttttttatagtattttaacttttatcagttaacataaattaatatttatcacattttactaagattaactggtgttgtggattgttattttgtcttaaacctggatgttttttatttataaagggttaatattccaaatactctgcttttagttcagctgtctagagcatggatccacagaaactacgttattactaagtactaggtttcagactgtgtttccaaactgataagacattgttaacctacaataattctattagttagatattagataatttaataattctaatagttaacctacaataattctggtagttatctaagttggtggtcctgagagtaaagcatatgcaaagtaaaataagaaggcagtgtagattggtcagatactctttggtttgcatcctacttaggttattaacagatattcaatgttcttgaaattatccagcctttgtatttttaaagtttattttttatttttgtttttgagccagagtctcactctatcatccaggctagggtactgtacaataaaacttatttttcctcagtaatttagcaatatcagtacctaactgcattattagtgatgtgtaattttgcttctctgtaaaataaacataaaggatctcaaaagatatataattttaagaaattatctagggccccaagttgatactgttctaggcaaaggtatagagaacattggggtaaactgactagagaatgcaggatctcagtaagaactaaatatttaagaattacaataaaaagccttattgatgtataggttaaaacttatccattgtgttcacttgagttatctaatcattctcagaatcctttgtagcaggaaacaagtgattgtgctctttattcaaatgattggacaaaagctcagaaattttaaggtaatctatctattataaaccttggaatcataagattttatcctggaaagtattttatatttctagcctacagactgcaccacaggataatgtatcactaatctcaaattccctggacacaaaatattaaggtttagatctatcctacatacgtttccaaatgtacaggaatttcacaagtacatgtgaataagcattaattcacgtgatttagggagaccgtcttgtgctgagtaataaataaatcatttaatgtttgactggaggactgtgaacatattgcttgatagaaagcaaaaacatatttcaaagtttattatttgagataaaagagaacgaggaattagaatgatgtaagttgagttcattttctttcctttctaattcaaatacattttgctaaatctagcacctgttttaggtctctggattggtgaaaggcacgcttacatttaagtcctgcttacatttaacttcctgtttccaccagttctgcgttgcatatgttgtgactgttcctttctttctgacccaaatgtatataatattgatatcctgtataacatcactcatgtaatgtagttgattgtttttaagagacttttagttaagatttggaggttatggctagggattatataatcaaaaattagatcatttaaaaatgaataatagccagctttactagtagagctcccctgtatacatagccctctctctcgtcttcggcctcctgtctcactccacagcccactggcatgtccccttgacaggcttctgttcatttattatacatagtaatttacccttctttttgttttactcttactcatccagaccactctctattctacaagggcaaggtcctttaaaatgtttttgtcctaaaaacatttcatctgttgtgaggtcctaaaaatatcttaaaatcctaaaatctgctttaagaagaaattggtctcttggtcatatttgtttctttcttttatatataataatatacactattactacttcaatacacgtcagctattgttttactttagtaagtataaaacccattaaaatgatttaccaagttcaagcatgtcttcatttcttttttcataacactaattcccaataggtcttgagatatgcttctgtaacttatgctgctatggggatactcagaaatatgagcctcaggatggagaaagaatattttaattaaaagaattaagaatgctcatttattatctcagtttggagcatttacataattcgtgttatttaaatagcaaactacattctaatttgctgttatattttagatgtttagataactataggcatggcattaatggagatgtagaatgcaggaagggagcagtatttcctttaacaaattctgtgccctcctccttggactctgtggtaaattacccagagagtcattgttactttacctcttattaactgcccttatagaaaaaaaaaagtaagtaagatccaggttttagttagagcttatgagtttctggataattatttttttttgtaaatggatgggaaatatattgaccatgctttgtgctttaaggattatttcattcttaattattcctttgataaaataggaaggagaggtgcaggttagccacccaaggctaatgtttccaccactgaaagcagagagctcaaaagaaaacctttatttacatgaaaggttagaacagtttatctttccatgttaagtagacagtgctgaatgttcccaatacattggtgatgagtctttctttgataatatttcttcgtcggatcttccttcactatggtaggagattcagtgaaatgtgctgacttcatggaataatcattaaacactccacatttcatatcttaatcctattatatagattatttcttattttaaaaaggattatcaaaatagtattgatcttctaactcttctcaattgtaaagtgcttagacattgattgttgagttatttggccaatgtttatcaagcccatacttaataaatattaatcaggccctctgcttgcggatatgattgaatataggctgtcttctacttagctgattaatattgctgctttcagtttctgcctctcctccatcttctcttgaaggtttttcatttgggaacatactcaattacttttttaaaaactacttgaagttacttcactaagtaatgtaccatcatgatgatatctagcatttaatgtatacattcaaggtaccaggcactgtgctatgtcctttaagtgtatctatctcatgtaattctatctccttgtaaagctgtgttatctccattttattggtggtggtggtggtggttgttttgacacagggccttgctctgttgcccaggctggagtacagtgactcactatagcctcgatatcctcggctcaagcaatcctcccacctcagactccagagtagctgggactacagatatgtgcccccatgcccagctaattaaaattttcttttgtagagacagggtctcactatgttgcttaggcttgtctcaaactcctatgctcaagcaattctcctgcctcggcctcccaaagtattggaattacagccatgagtctccatttaattgtggaggaaattgagggactgtgagggcaaatcacttgcccagggtgacatggatcctatatattctggctggaattcaatttgcaagctggctgccttcagagcctacacttttaatcattatgctaagttagacacaggaaatgatacctttcgtttatgggaacatggtgattgccaactttgatggataagtgcaagatgaaactgatgagtgattatagtgtgaacaattatagaggggagccatcatgaccccaccacagacaatagtctgtggtactattgtcaagtcaggaggatactaatgcttactcttgaatttgtggtgaggattaaatgaagttatacatgtagagtgtttagttgtttgtctggcaattgtaaaataggcaataaaccttagtttttgttattatgatttatttagaatagttagacttatgcattcctattgttaaaggaaaagatcaagccaacccctccccccaggcccctttccagaagataatcttagggcctaaggaggttaggttgcttaccctctgcccatgagcttctcctcccaggcccctttccggaagataatcttagggtccaaagaggttaggttgcataccctctgcccctgcacttcttctcccaggcccctttccagaaggtaatcttagggcccaaggaggttaggttgcttaccctctgcccctgcacttctcctcccaggcccctttccagaagataatcttagggcccaaggaggttaggttgcttacactctgcccctgagcttccttgaagagctagagttagaaatacagcggctcccctgaatccaatctctcttggttttcacccatcctttcgtatactaaaccagagaggatattgcagtaaaatatcagaaaatattcaaaatggagaatagacaaggctccatcaaggatacaagactacatgaaattaaacttctcagaaggattttgtgtcaatggatttctcttgtgcaattgtcattacctacccttttggtcttactgttatttttgctatttcatgaagctaaaattgtatccatacttactctcttgtttgacttgtaattggtttattctattttatattgtaatttcttaatgtaaggactaaattattttattttctttctaatttttgtaggcttcaagttttcatataacaccttttgttgaacccattagtatctgtacaaaatgttttagactagagagaatgtaaattcatatttttatcctttctgattcaagggatcaaatgaatacatctcttaatttttatggagtagtaatttgttaattgaacagtttagtattaatatgtcttaattttatttctctctccaactctttgccacacaaacttcacatgtacagaaagttgaatgtatgttgttataacacgtatatatcccttatcccttcatccaggctcaacaattgttaagatatttcaacactaagtgtctatcctaccttctctttccctttatctgcaatttcccctggagtgtgtgtataaatttttttggctaaattatttaatattagattgcgaacatcagtacacttcatcctcaaatctttcagaagacatgtcttaagaacaaagtcattctcatacatgaccaaaatagcattatcaaaaccaagaaatttaacatcagtgaaatagaaataatataaataataagtaattcttatagaaattactataattatctcaacaatattttgtaagtgtaatttttatttcaaatgaaatacattataatcaaaaaaggttgctgtaaaatctcaactttatgagcatattaaagggtatgggcaacttatttattttacattttctgtggatatatgaaaatctatatgcaagtaacaaagttgtctatagtaaatatagattgtaggctgccctatttaacttcattattttatttcttctttgtctaatgtatccattgagattttgaagaagaatgatatattgaaatctatcattataattgtttttatatcaagattctttgaattttaaaaatctttttattcgggaattttcaaacatacttcaaaatagaaattattgtataagtagtctccatgaacccatccacccatcttcaatgattttacctttttaccaatcttagagattaccttttccatttgttgtataatattttgaaacaaatctaagatatcatgttaagatatatgtatcaagtacctgtagatacttcaataggacctaccctaacagataatattgatgtaagctaacaaatattttatgtttgtatacatatatacacatgctacagtgctatggacaaactttacaaaattagcaaccattgcttaatgtcatctagtggctgttctctaattgttttcccacttgtctcaatctctgctgtatttttacagttggtttgttcacatagtctccaaacagttctccatgttgcatgtctcctttcttttcctctgtattttttttaatgcagtttacttgttgaaaactgtttttgttactaatttatagaatgttccacattctagattttcctgcaggcttgctcttgatgacatttaaaccatcctcattcacccaggttttatgtttgatcattacatctagatttttggttagatttaggtattgtcttttactttttcaaagaatacttcattggtggcattatatgcttgctattatatcccgtcaggaaacatacaatgtcagatacaatctgaatgtgggacaaatccagcatgtggaacgttctacaataaaagagaagctataggtgagtccaggtagtgtccacagagaagatataggtgaattcagctggtgtcaacctaatccattcttaataaagtgtcccaacaactttcacctgatgattttggaatccattaataatcatggtctaaccacattgttttattagtggttttaaaatggtgattttctaaatgcaacatttcttctgcatttgttagcaagacttccataaagaagactttcctttgtcagccatttgatcacatgaatatttgcagcctatttggtttgttcagaaaagtcaagataatgcttgattgattccctttatcaatttataaaaaagtaagtatctgtcctcattttacctccaatggtgaatttcatacatttttcatagttttggttttatgtaagtagttgatgtattggttgctgcatgcaggcttttaattataccatattctcaaattatgcctcttaattagatgcatttgttcaggtgaatgatatagtccctgaatccttgtatatttgcaaatattcttttttttccttgtcaatggttgaaggatatctttcttacataaaggaattttgatttcagactttttctcttaggagtttgtagaagtttctctatcaacttttagaatctggtgttgtagatgagagatttaataacagccaaattctttattgtttataagtcatttgtgctttctgtttgaaagtttttaagatttcatttttctttgttccaggagtttaagtatattattaggatattcctaggtgtgtatctttcctcataataccctgcttgaaactagccaaaccctgttacactgcacgttagggtattctcccgctcagggatttttttttttaataatttatctcattgtcacctttctatccctactttttattcacatagaaagcttttattctcaagctatatttcctgaatctacctccaaatctcttatctttctctcttgactacaatgtctttaaattctactttgatctttgacttgctctttcacaccaataactagagttatgacaggaactgtgttcttcttcagtgtatatagcaaaattttagttaaaaaattcttattccagaaaagcattttggactgtatttaatttactctacttgtattattgctgtaattattattatattaattataacttcaagttcttttctgtcatcttcgatatctcacattagaggtttgttttgatgattatctttgatctttctctttcaagctaatgaacattttacagtgctaaaactatttttgttctactcactaggactcagctgcttggaatcctgaagcagcggtatagactgccaaaagcatagtggtctatctgcacctgtgggctgtaggcacaccatcaatcaggttggtccaggagaaggccgtttttcctaccaagtccctttatactcccctgaccttgtgaggggaaaggaattagtctagctattcagctcatgtgcagctctttgtggagtgagaaaaacagtcttactcatgtttggctccttccagatttctttctggggatcagaagacttgcctcccctaccctggggccaaggtctcctcagtttctgtcccattttgaatcttcttcactggttgccatgcttttataccatggaggaggaagttcctttttaatgtttgagcttaaacctacttgcctgccaactccataatttcttgacctaagagaaaacaataggtttgagttgagaattaaagggactccggatacttttctccacctagatttggggagattatatctttcttgaagtatcagttagcttcatttttcatgtgagccaagagctttttattttttattctcctttgaaatagcaactggtcacatttatgaggaaattattttgaatctcagttcctctgagattcttcctttattaatattatttatagaagcaatatgttgaggaaaatatgtttattatgtaccatatttaatcatgcagaatatcttgaatctgtttggaagataggtatcataaatcaataaaggaatttttaatcccacccaacaagaggcataatttgagaatatggtataattaaataggaagataatttgagactgggtataatgatttcattattcatagctgcctaagaactcccatttaaaaagcagaatgaatcgtatctttgagtaagccaactatgtgatcaggaaaataaacaagtaattcaacttatcaggagacttgggttctaatccttaatccttaccagttaagctttagggaaaaatatacaataatattgactccttttccgttaattggaacagtagcataggtgaacctctatgattttgtaaagaaacccttttgtttgtaaactttgagtctatatagagaaaacttccagtctaagtactaagtttgaatactataaagccaaaagaaataacatgactatactcaaacaaaatatgaaagaacaaattagtataagctgtacttacaccccaccaaaaagcaaaaactgttgcggtttaataggaactttgttgttctagatacatttgaaacactattttccagttatgttgagtagcattactgaagttgtgtttaggcattaaacttagaagctacttaaagacttaacatattttataaatataacatattttgatataaatacagtcataaaatataaaagatgttttccacaagggcgtattcacaattatctaagaaatgttgaaatcaacccagaaatctcaatagaagcttatgctaatttcaagaagaaaatttaaaacatattctccttctacttttcactttgttttattttcactattattcccctctttaaatttttgagcggatagttatgtatataactaatcttattacctgtttctttttgatataaatggcaccaaaagagcctctaaaattctaagaatacgagctttatctagaacctttgcttaagagacaaaaatttctggtcatactgtataaaaacatatttatggccaccacattacatgtcttgggaatttgtggctgcttacttaacattttttaaagctatcaaattattcctaaagctataacactgtaataagtgttatgaaatacttttctatgtaattcactttcatgaaaataatgttaacaaaactacaactgattaaggctatgacatatatagcagattctaaagtgtgtagtacaaattactaacattaaaaacagtctagggaataaaaatcaacttagacatattttagaaaatggatataaccttaactagatattaaatgtagataaattttaaatgaaaaagaagtaggtttcagaggcacataaccgtgtttataagtgcatatgtacagaggaaggcaagtgtacgagaatggcatgagaagggaacaaagaagattagaagggagcagtgtctgggactcttccttgaattgttcagatgggaggaacacactgagggacgctgtcttcagtctgtggacaattggaagccattacagattcttacagataaaaacgacatgaggaaattggtgttatgagacttgctttgaaaagagctaaattatctttaatcggctaaaatggaatgttacttttgttatcacatgttataataaatacccaagatagcttatatttcttagtaagggaactattcttttagcagaaaattacagagtattgaccagagaaccaactgatgatcttgatggtaattacagagaactttcttatttctcccattattgtcttagtccattttctgttgtttataacagaatatctgaaactgggtgacttataaagaaaaggaatttcttacagttatggaggctgggaaatttaaggttgagagggcacactgatgagaatcttcttgcttgtggggacactgtggtgtccctaggtgacacagagtgtcacatggcaaaggggctgagcacgcttatatgttagcaaaggcttctgtctgtccttataaagtcaccagtccctctcccatgataatgcattaatccattaatctgggaatagattaatccatccatgatggcagagctctcagtatttaatcatttcttaaagcctccgcctctcaatactgccacattgggaactaagtttcaacgtgacttttggaagggacgtttaaacaatagcagtaacctgattttcaaatgtaaatagatttattgcttgtgacacacagccctgaaataggaatatgtttttgtcattcatcccaatgcatacataaacttttacaaatatcattgtctatgatcttttagaaacagtagatttgcaatttgtagaggaaaaattagaacacaataaaatacatcacacttcaaataagaatatagaggtatttttgtttatgttttaatatagagataatctatttaatagaatctataatatacaccataatatcagaaatacattaaaaatcattattttataatttatcctaaaatataatttttaaagatgaaatcttctagaaagtataaaatgtgtaataaattttaatgtgaataatgcaccctttactacgaagtgcacagaagctgggttggggctggtggttcatgtctgcaatcctagtgctctgggaggcaaaggtgggagaattgcttgagcccagcagttcaagcctaggcaacaaagtgacaccctgtctctacagaaaattaaaaaattagctgggcttggtggtgtgcgcctgtggtcccagctacataagatgctaaggcaggaggatcacttgagcccaagagatcgaggctgcagtgagccatgttcatgccactgcactccagtcagggtaacagagtgagaccgtgcctcaaaaaacaaacaaacaaaaagtaaaaacaaacaacaaaatccgaaacagaaactgtatattagtgttttctgtatttctgatcatactttgcagaccacggaatctatgtcacacaccccatgtatttccttcagttctagacctctattcccaacttcttacttcatagctatatctgtatatcccacaaaactttttttttttttaatctttctctttttctttttcttaagactgagtctcactctgttacccaggctggagtgcagaggcgcgatctcggctcactgcaacctccgcctcccgggttcaagcgattcttctgcctcagcttcccaagtagctgggactgcgggcacccgccaccacacccagctaatttttgtattttttagtagaggtggggtttcaccatgttggccaggctggtctcaaactcctgacctcaaatgttccacccacttcggcctcctaaagtgctgggattataggcatgagccaccgcgcccggccaaacctttcaaacttactaggcctcatatggaacaatcttttggatatttctagcaagtaataaatgagaaatcaaccaactcaaaataactcacataactgcaaaattcagagactggacagggatcaggtatagttcaatcaaatctttgggtccatttctttgtactgcttttttttttttttccgtcctgcatgtaggttggctgctggaatagcaattcttgctaccttgttcacagacaaaagagagtgtctttctgaagtttgtttatagtagctaggacaattctgtcttatgtctcttttcatctccaatagccctctcacaaatatttcagtgacgtaagagggtcacatgtccattcttaataaatctctggggaaaaggaaaagaatgccttgctcaatgggctcaagtttgcctcctctgaagccattactttggcaaggaggatgtcataatcttgattagcttagattaatcaagtttgtctctggacatgagatcaattcccccaaattgtttagttgctacacaatgggagaaagatgaggtggaaactgatcagacacattcaacgttcactataccctccttgcccccaaacatgctcactcttacattcttgattttacatttaaaaatatgactgtcgggtgtcgagctagaaaacttagattcattcttgactctttcctttatcaattatcaaattttttagaatgtatctcaaatagttattaatccaactcccctgcaccacttccattctgtctttgtcttagtccgtgaacctttaatctgctttagaatttgcagtggacttctctctcatcttttctgtggactgttgtcagcttttcaagtgaagagatttgtcaaatttatcttcatatttcctaattcagcattttctagactcaaatacttcaggcactcaaatatttttgttgaatgagtaaaatttaaaaaatctcaaaaaagagctacaaagtgctttttttcctattgtcatttgttcttaagtctcctatattattgaagaaataatggttgaaaaagtttacaaactattttatgaaataaggtgaatttcaatgccccaaatattttgttgtgttttttctactaaaacataacagaaaaggcacaagaaaacctgaaatagaatgtatacagaaagacttaaatagaagcatcttagaaaattgtagatacttttcttaaaaatccaatacatactttggttaagtgttagggttggtgtttgagggactactcccccccccgccccccaccaatagcatgtgcagtaaactttcttcagagacaggcagaacttggggagctcagctcaacacaccacaacaagtatttctacatacaaatcatttctcctctgagtagtatttcttatctcactttcaatcagatgcaggtgtttttgattctcgcagtttctgaagcctttgccatgtcagaaaattaaaacagggatgagaaaatatgggaaaaagctttgagaaacctctccctaagcccaaggaagatggctttttgttttgttttgttttcacttcatatcttgaagaactactgacacttaccaggcaggtttggatatacggcagttagttacagcagttagttcctgtgtctgcatagatggggcagatctttcattaacctaatttgtgtttcctttctttttgcagaatgcaatataacttttaaatggatttatagcaatttgttttgtctaaatgtgtctttgcttttcaaaatggtaaacactttttttttttttccaatgatggcactcaatacaaacaagtttggcaagaggtgtctttaatactgcttgtgggaataagttggtgagaaaaaagcttttgaagcaaaccatcttgtaatatatagggagagtttacaaatgtatgtagcatttagcacataatcttatcttttcaaatctattcttaagaatcagtgaatttctttaacatatatgcagacagtgatggccatcacattgttactcataataaaaaatggaaataaccaaatatttttgagtttcacatggcaaattctttaaccagagcatatgctgctattataatcaaaacaggtaaggtaaatatgatgcagggggagagtaataaacatacctctacatataaacatagatgtaattatttgtgaaaattctgacttgtttttcttgtcattaccaacttagtcttttgaaaataattttatgaatttatttacttttttaaactagtgcttctatatataagctcaatatatttctgatttttctgcaaagatatgaatcatatcactacaaacaaaatattatactgtatatcaatagttaacatctaaatattctttccatgagttttgataaaaaataactatttcggccatgtgcggtggctcacgccagtaatccagcactttgagaggccgaggtgggcggatcacgaggtcatgagattgagaccatcctggccatcatggtgaaaccccatctctactaaaaatacaaaaattagcctgggcatggtggtgcatgcctgtagtcccagctactcgggaggctgaggcaggagaatcgcttgaacctgggaggcggaggttgcagtgagccgagatggcgccaatgcactccagcctgggagacagagcaagactctgtctcaaaaacaaaaagcaaaaaacaaaaaaataaaataaaataactatttcaatcttaattactttcataccatgtgagtctcactgcagtaactgtatctcagtggggtaatagaatatttacttctcccaatacactcatgtgatagaaatgtggtcaaaatgtggttaggaagtaacaataatttattatagatgctagtgtagaatagcaaaagccaactgggattcattttactgttgaaagaaataatgatttctcttttttaaaaaataattgcctaattcaaaaagcttccaactataatgtctatttttccaacagttctgttattttttaataatccaatacacaattttagctttttcccaaaactgcatttttcttaagagttgccagttttcagattcacatgctgagtatagcaattttgtgatgctagttaaagaaaacaacaaaaccaacatctctgttttgtgctttggtgataaaagccacaaagaaatctttgaccaagggataccactagacacaagacccctgtggtgtggatcagtaatgaactacaattgtttagtggtcctaggaaagcttcatgtatatatttataaaatgggatagtctaagtgacattgacatattctgcttcaccattcaatctagcttttgcctgttttccttcagagtgtgaaatgtatttgtcatcatcagagactggtattcttgcaagctaggcataaggcaatcaaatgtagtaccagcagagaacgaatgggcaacaacaactatccagaaagatcagtaaaatattgctcaatatctttatcttcttgtaaacacatgtgaacaataaacaagaaaccatgaaaagtgatgttttgtttctccttacccacataaggcaaatgtacctactttatatgcagacaaccaaacatttcttcaagaaagaaacagaattcctccaaacatagttcaattgtcctttagttaagttttcacatacaagttgttaacaatgatgatttttgtagctgaatttgtaattcttttccatcatttgtgttgtctttagtgactccacagtaaaaaataattggcactcttcaaaagcagatcttgtgaaataccatgtaccatctgactctagaataagaaatagttttaccttaccaattatttggcttttgttttatagtagatattgttcatggccatgtgaattttactttattcattgtgtgcatatatgttactaaacagttatttttaaataatgcaggagaatcaaatattatttgaattgtaccagaggagtttgttgttgttgttagagatcttgtgataaacactttttaaaatgtgaaatattctgttttctaagttgcaatttttctatactgttgactataaataggtacaaatatactggtagaaagtttgaagaaaacggtacatggcacaagaagaaacagagccatgttataaggagaaagtcagctggcttcccccaaaacaaattactttggtaaggataccgtattccagagtctgaccttgaaacttgaagactcagaaatttaaatttgtcagcagtatgagactagatctcaggagcattaactaagttcacagaattgttgtattaaatcagaataccagcttatttatagctattgacaaatattactttcctatgagctagaatatttatacaaatatgacaagagcattctctccttgaaggtggggggagttatgtgggaatctaaatcattattataaacttattttggtgcaatttggctcaggataaggatgttaaataatgcataacatatagcatgttttcttctgcccgtccttacccacaaacaaagctaagacaaattattggttgaccaaggcattattttccattaggctcagactcaactttagaatcttcctcaacaccaatagtccaggaagctgttgcaattgattgtgattggtatgggtattagtctgttttcacactactataaagatacttacctgagactgggtaatttataagcaaaagaagtttcattaacttctagttctacatggctggggaagcatcaggaaacttacaatcacggcagaaggcaaaggggaagcaggtaccttcttcacaaggcagtagaagagagagagtgtgcgtgtgagcatgggggagtgctgcactttaaaatcatcagcccttttttgagaactcactgtcacgagaacagcatgaggaaaactgccctcatcatccaatcacctcccaataggtccctccctagacaggtggggattcctattcgagatgagatttgggtgggggcacagagccaaaccgtatcagtatgagaggtgatgcctgttcttgggcaaagttttctgctctgagttccagtttccatatctgtgaaatggatgggttggattaattttttccccagggaccttttctgaactacaaataactgttgatttgggtctaaaagtaactgttgatttgggtaaatcacttacctgttttggctttattttctctatctgtaaaataagattatactaactagatttttagaatacatttttcattatatcattcttaattttatatacaaccctgtaagccagaagtttgtttacctatactaataattaagaaactgagacacggaccaatggctaactgctgcttcatgttctgagtcatctgcgtgcaattattggcttggtggaaaaggtgccataatgaattagttgtgtctcttctgagagtagaatgtgagaatgttggcacatttgccaggtgtttgtcattcttcatcgatagattaaatgctatcccaaatatttgtttaactagaacagtcattatgcaccaaatttgagagcagagaaggttgaagcaggtttgaagtcacaggcactattttctggaaaggtgtttgtgtctctaaaatcagatatgtttccattatgctggctaaatacaaagcaaaaatatttggtgccatcatatttattgtccacatttgtctgctactagcaattgtcttttagttatagggcttccagagcatcatgaaataatccgtattttaatgatgaaaaagatttatcattactaaaatgtatttttataattcagggcctgtggctctctattcactaaaacaattgcacagactatatagcacagttcctgaatgtctggttaaaggaaaagagtatcaagttctgattggtgttaaggagtgaatcttttgacatagataatggttcattatagcatgataatgcattcttcatatcttcacttttcactcacttaaaattatttctttccatttgaatttttttcatttactttatgaaaaaagtagagtattaatcaactatgctcatttaaaagatattaatgttctctttcttcaaccagacttatactctttcagaagacaaatactaaatgtgattagaatgagcacagccatattagcttcttaataaatatctgtgtggtccgtgaggagtgtttgccctgaaacagacatttaagacatctctgctcaaaaagtagccaacttctgtctgctgcctgacttaactaccatttacattttgtataatatgggcagaaagcattttaatttaatatataaatgtaaaacttcagcttccactagctgtaatatggactccatgattttatttatttatttattatcagcagagccagcatcctgtgagcttctgtgatagaaatgcaccgtgtgcagagagtgactctattaggctataggagaggatgaaaatggtttgagataaataaaaaagcaattacctaggcctgggaaagagatactgcacatttattcaggaagcatttaacttactcagggctccattccaatgaattgttgttctcttctccatcctccctaatatatgccaagtcaaattggaagtagcagaatgatgcttcacaccctggtaacaagaactcagagaattttgagaacttgagaaagctaccattaggggaaagacaaaaacatgaaaatggccttcattccatttcgaatgccagacattgagggcaaagcatttgaaattgtgacataaacaatcatagtaacaactaggcaaatggattgaaactaagtacagtttccacaaagttgaggattaatgtctttatgctgccccggggcccgcacaaagctatggctttgagggctgtaaccaaagtgcctacttccaaggctcacagctgatcttgagaggtcaaaaagaggaaaaataatacattggtccattaagaataaccactgctttcatttcccatttttaagtgacctaattcacattttattctagcttatttttctaaatttctattttacattttatccttgtacattcctttctccttctcagctcacttatcaatagaggtcttccagtcccatcaagcaacaccattttccatgggggcatccattcaagaaagaagggggaatacagagagttaagttcagctgagaaaagtatcccgctgctgcagggtccatcagaaaattgggacagctttaacagattctataacaaattcccaccaaaggttttcacaataattttttttttttggtaaattttcttctttttttttaacaattcatttcctctctgattgctgggaattgtcactcatcccatttcataccttgagatcctgtcttttggctttactcctcttgccattcttgttaatcttgaggaatgaagattccattactttgcttcatacactggatgcatttctttttgttactgtacttttgatagagacaggaggaagagaaattctaggcagaaaaggatgggtccctggtgaagccctaccctcaagccaaaaaccctgagaccgtggctcaaagtgagaacttctatcccgtttccccactcaaatgttgccttttcgtaaaccacccatggcccagccctgcaccatcctgtgcctataaagaccctaagctcatctggcagagaggaagagtggctggatgtcagggactacagctggatgtcagaagcggcttgacttcagagggacagcttgacggtgcaacttcagagaataatcctgccgcagatggccggacttcaggtgaagattacctacccaccttatccctttctcagctccccttcccactgagggccactttcatcagcaataaaatcccctgcatttaccattcttccactcattcttgcgatctcatttttcctggatgctggacaagagttctggagccacaagtgaggatacaggatgctgtcacactggcccctttaccctcaccggtagagagcagctgcctcacatgaaaaggcagatgacccactgagctgctagcgcttaaagccgtccatggactgcagagctaaaaagccctaacatgccctctggggcttcaggagttgaaggcatccctcctggacttgccatggggcccgcacaaagtttgctcctcccagctcccaaaagtgttcgccctggctcctgcacccactctcctgcgtgttgcctcctggaggggtggagttcactcctgcaggtgcggaagcggctggctggttccagtgcttctgcactccagttcccgctttgtttacttgtgcgctccctccgtcaaattgttgagagcggcaggttgaggaaatgaggcaccctcacaattcccacgaaaaggatcaggaaaatatcctgctttacttttaaagtaggttttaatttcctagtacttcaagtagtattctctttattcaattctagcctctcctttttgtttcttatgatcagctatgatgtggcaaagtagagagagcctctgctattttagaaggagctcctcccctttgttttactcagcgttcctgtgaagttcagctggggagaagtttgttaccatatattgaatacttcaaagctttgtataaatgaaagtcatagatcctttggcttttccttttttaaatttccttcctgtaatgtttcattttagctgctgtaagttaaaaagtaaaacattatataccctttgctcttgtaaaagaagaaaggctaccttgacttggacttaaagccaacactgaatgatgacagtaggttgatcaggacaactccaatgttgaatcacttagatgtctgcaaagccaccatcggctatggggaaagcttgaaaatatgttgttgttataggatttgttgattttgcttcattttatggccatttgacaaaataatgtatcatgtttcttccattaattttaaagcttagtataaaagtatcccaaattcctcaatttgttggtccagttgtgggaataaactaaagttagtgctactggtgtctcctggaagtttttgagtattatccatagttatagcaaaaggtacaattacacccagaaacactgtcaaaattagcaaaaggtcagatattctgtttttgtttttgctggttttctgggggtactggctttgctgaaaagatgaagttgaaagggatttaaaaaaaactggattataattcaaataacaatttagataagtaatcaaaaacaagtaaaaatatggtgggcatcatttcttgaaagaataagagaagtacaaaaaatgataataaatttatctgtggtagttaaatttatatataccagtagaaatcttctgagaaaagattagatatctttttttttctgagaaaaaaattagatatcttttttttctgagaaaagattcttgggaatcttgtaagttactccttgacaaactttatatgattcataggataaatatttcccaaccctcactctgtcaaatgcagaagaaattcccaatgcttttttccttgattccaggacctatgattaaattctaattatggcaaatacaagttagttttaaagataagctctgtcttgttccctatatgaccatgggttgcttaacttgtgccatataggtataattaattgtatcatctcaaagctgcatagtaccttaaaaagattgcacaaaatagtaaattaaagcttaacatttaatgtaaatagcaggttagagtaatagaggattttatgagatctgtcaatggttacaagactacaattagataggaggagtaagtggtgatgttctgttgcatggtgtgatgaatagagttaatgataatgtatatttttaactagctagaagagaggtttttgaatgttctcatcacaaagaaatgataaatgtttaaggtgatgaatctgctaaataccttgatttgattattacacagtgtatacacagatggaaacatcacattgtgccccattaaatatgtacaattatgtgttattcattttaaaaataactgggctggcgtggtggctcacgcctataatctcagcactttgggaggctgaggcgggcggatcatgaggtcaagaaattgagaccattgagaccatcctggccaacatggtgaaaccccgtctctactaaaaatacaaacattagctgggtgtagtgctgtgcacctgtagtcccaactactcaggaggctgaggcaggagaattgcttgaacctgggagggagaggttgcagcgacctgagatagtaccaccgcactccagcctggcaacagagtgacactccatctaaaaaaaaaccaaaaaacaacaaaaaaaacccttaaaaatattaatacacaataatacacagttgcataagccactaccactaagaaccgaatcactgtagagctaggcattagcaaactatatattgtctgtgagtcaaatcaggtccattgcctgttttcatatggtcctgaaacaagaatgttgttctacatttgtaaatggctgagaaaaaaccaagaagaatgttttatgacataagaattatatgaaacttgaattttagtatctataaataaaactatactgtaacacacccatgttcagttgtttccatgttgtctatagctcctatgctgcttataaccatagagttgagtacttgcaataaagcctgtttgtcctgaaaaggctaagatatttactatctgcccctttacagaaaatatttagcactccttctgccgagactagaggtcttctatgtcatagggtacatttaaataatatgtgacttaaataatgtatggtacctctatggagagcatagaattagaccatgtgaagtgttgtacatgatgctataagggtgatcctatttagtgtgctcactgctgggaaccaaaaccttgtttgtggaacaccattagatatccagctgattcactcaggtatagtgcacagatcaagagcccctacttgatctgctattgtgtagatttatgcatatcttatgtgattagagaaaccactaaacttccctggagttttgtaatattatttgaagaatagaaaaacaattgtatctatctcatagtataatttagaataaatgaaatcttgcctctgctagcatcatgtctgatacacaataaatgttgaataaaatttggtaattgttactttaaaagtttaaaagaaaaaaggaataatctttatcttatttataaagacaatataaaggattatatgaaaattatcaaatctatatgagggagtgataattatatctagtttttatataattaacctgagcatatttctatataactctagacactatagcaggtttctcactttaccttttaattattttcattaaatatatgttaaaataggaaaaatgacttttattcttttttttcttaatctccatatctaatagtttttgtctgctactagcatttatcctagttccacattcttttatgtctgggtagctttcgtattgatgggaataatagctaacaaaaaaattgtttttcaatgtcttggcctacagaattttttattcaaaattctgattttagatcaactgctctcatcatctcttccctaaggaagattcttctactttcttctgtaaattttatttttgcaaaaatccttttcattccatatttcatttcaaaaacaaattttttttttaattagattcagttggccatataatttttcttatctctttccgagaacattttaatgcatcgatcttcccttgttttatatgtctggtctctgttcaatgctctgcagatgagaagagttatatactatattctgtacttcaggaagagaaatttccatgttaaatctgaaatcggggacttcacagaacttaatttgcaagtctgttaacattttcagtgaatataaatagctcatagactttgtgatttcttttatgacaatgatgttgtcaatgttaacagtaagggatcatggttcttattatgacaatgatttgtaagaagcaacaaacacatatgtgcccagtgaaattatacttagttgttgttgtttttaattgagacagggtctcgctgtgttgtccaggttggaatgcagtggtgcaaacatggctaactgtagcctttacctcctgcgttcaagtgatccttctgcctcagcttcccacataatggggactataggtgtgcaccacaacgcccagctaacccagtgaaattataaatgaatacatattatagatacatcctacaaaagtacctgcactaactttatatttacaccttttgtaaataatgtaattcaatattatcatgcagatagttgcttgaagaatgtgaatctttaggccctgcagtacttgttgtaacttcacttgaaccaaaacaaaaagaggcaatatttaaatctttataatgtacattctagaagatataattgatcctccattgactcaatggaacagatataacagttatttctgtgtagaagctgccatgccaaggctggcctgacgagagcagttcaccttaaactttgaatctcgcagtcagcaatacgatactgcattaaccctcaggagacaagtttcactcagagacacttttgataatgcctgtaatactaattctacttttgcttatattatttctattaaaatagtagagaagaatatagaacaacatagaaagtttattgtatgctaagcactgtactttaacttcacaatttcatttcatccttaaataagcttataacttttaggtattgtgatccccaatttgcagataaagaatctgaagttaggttaaataattttgtctaaaatcacatagctagcaggtggcaactaaggtctttctggttccaaagataatcattgtagctttgtttaacattttccaaagccttttgcttaagattaaatctctccttagtcaagaaaaggtcaaattcatagaagcagagagtaaaatggtgattatcagtggagagtggtggtggtaggtggaggaggttagcagagttggtcaaaggatataatattttggttagaaggtataaattcaaaaatatgtaggacaacatagtgactacagttaataacaatgtgttttatacttgaaaattgcttagagagtagattttaagtgttctcacaataaaaaacaaatatgtgatacaatacataatttacttagcttgatttcatcattccatagtattctatatattttacatcatcatttacactatatatacaattttaatttgtctatttaaaaatataaaaatgaaatattaaatattctcttccccttccatttaatttttgttttagttatgaattatctgaaattcatcacatgactccagaaaatgttgcttaagctcatgtatatgtggtgtttcagtcatctatccaatcagttaactaagtagaaaaccaggacaatagcaatactactaataataacaagaacaaacatttacatgttaactccacttctttactatatgatgagccagaattctttcctgtctccagcatgacttctgatctcccaagcctcaagtttagaatgcgtctgaaacccacaaagcatcacaggaaagattagcgtttcagtattcaaaaagaaaggctaaaattcagctttttacatccttgaagaaataaatacctttcagtggtaactttttggtctaaagttaaatctaagtgatttgggtggtggatctggggtgtgacgggctggtgtttgttgatttggaatatctgggtaactactctgttcgtgagttcactacgcaagcatgatccggctctggtgtttatcaatgccatctctctatgcatttattttcacattatcttgatgactgctctgaactaggagctgagttaacagatcttattccgctgtaggaccatgctcttccttgacttttactatgttaatccctaaagtgtacctaactactacagtttcaatgttttcctgtgttcaggaaaagcatttgaagattttgatttgattcttagaggctttctggtttggagtggggcatcagctggatgcaaaagtccactcaaattagcacacagctagtatttccttagcactgattcagtggggactgacatctgaagatcatgaactaagatattaaaatgccagtcaagagcttagcaatcacaccttacataaatgtgcttctacttgaaatctagaatgattcacaacagttcattatgttaatcctggaaattctttccttttcctggctcatcatcattcttttcaaaacttggaatggacaatagcatcaccatcagacttctatatataaatttaagaatatagtaatatcttgactttctgttctcatttagccaaactagcacaggtaaagttaatcagtagcttttgtgtaaaaactgaaagagagcattgataatcagaatcttctcaatttttttttatttgatgcctgggttaattgctttatttttcttttactacctgtcttctagaataaattcagacatgtgtttccttcctaaagctctccttatacagcttgtacattctctctctacagcgtgatcctttgggatctgctggaattcattgtgagtagcccagggaaccaatttccccaataactgtttcctttactgcaactttgaacggaaagtaaatcaacaactttattttttaagtgaccaccctgtgtctatgtatttaaaaacatagggtaaaacagggtgtgtctatgtatttaagtgaccatccaaatacatagacacaccctgtttttcgggtaactggacgtgctcagacatttctctgtgtctgtttaggaagtatgttggattattcaataaatatgttattaattagaaattaccaaagtgctcattttttattaattgatttttaaagaaatttaaagtatgttattgaggcaattgatttacatttaatacttaggcatcttgaagatcaaatagctattagtttttttcttacaagaaagggaaatgaggctgtaatgggttctgtctacatgagcacacttttgaaaattgtttttgtattaaaatgatgaagatgtaaggatatatttgatatttatctattttgtgtgatatattttcttctaaatctctttaacatgtgttactgaatacatagaaaatatagattgaaggcacagctttctggggtagaaagcttgagtttcaagcttggatctaccacttaaaggctgtcatattggacaaggtcttcaattcttaaagtctcagtcttctcatcactttccttttgagttatgagaattaaacgaaataagccatgtaaatgcttattaatggataaatgtcattatccctatttgttcttttctatacacatctaagcatttaccatcattttacgtgattttgattctacttttgaaatgcatttctggccctcaggaagcatatggtctagtggccatgtttctttatttacaacccccaagctaagatatagcattaaggggacatgtgttgatataaatgaacataacagaagcagtactggggaatctgtggctttacagctagtgcctctgaaaattacaatgtaaaatctatgggttaattcatgaggtcagtataaagatcagacagaaaatagaaaactctgaagcgtgttacagctgtttagaggcccttttaaagatttccccctttccagtgctctcaatttggcatctcagctcatctgacttattcacaagtcttttcttatgagaaaagtcttcaatgctgcttgtgaatcacatggactgccactgcctttgtgtgattttcgttttctggcacttcttgctgggggctgttctagcaggatgtagcttcatcacgtggatctgccttttttaaaaagtgtgatgtacatcacctacaggcaggtatctcagctggatcagtggaaaggcaaagcactttcatttcccagcctgagggctcagctccaccgacagccctaccagctcctcttttaatgctccgaaataacttcacaggcaccagatagttctggtaagtctgggataattaggtttcctggtcaagagcaacagcatgacaagaagacttggccctgcctggaaagctaccacagaaacagaaggaatggaataatgggttgagagtacttagctaactagtaaggtttgttttgttttcctgtaaagtggcaagaatatgacaaacctagggggcattggtgaaaaagtggggtgactgtgcatattaggtccagagaacagggacgttattttcaaaagttagtgcaaattaaactgggtagatatttcataatcagtcatttaagtcatttctcggaaaaatatagcatcaattgtataaaatttcctgaagtatcaaaatatttgacatgcttgaaatcctgcagatggtactcatgagtaaaaatacattgtatttattttcaaaataccatagaacacatcagtaatttcttatggatgatagtatgtgtcccattgaagtgaaaataacaaagtaatcacttttggggtatagagccaaatgtgatttggttgtttatttttaatcatgtacagggacaaagaaaaacagggcttaattttaaccactctgaaaggacatttagaactacatttagttattcgttctacttaagagtatttaagttaaagaaaaattttacttggcaatttaatattttaaaactaaaactattcagaagaaaaacctaattacttgaatgtctggatgctttatttttttctggcatactcaaaaaaatatatattttatggcatgatattctccctgctagttttacacatcacagtacagtcactccagttctgttcaagataaaacctttatcataatcccctactctctttaattctcctgtgggcttaaacataacttccttcaaagttgattttggcagtttttagtcaatcaaaaggaaatcctccttcctccagctctcaatgtttcatttatgctgtccaagcagtgtcagcactaatacctttcagtttcatttttctttcatttggtttagttggtgtttggcagaataacaagctgggtagctttcttaaaaataagtttccatgctctgtcttcacaatacaaaaccagaactccttgacatagtccacctagctgcaaactcgtctggtaactctttatgtacaccatgttttgatacccatgattgctatatgttgaaagaatttcactctcatgagctaagttacctgaaaagaatttattttataataacttgatttacatatttagaaacaattatttatagtagttttaagggcttaatttctctaaagataaagtctcgagagtgtagctatgtatcttcatatgaaagttgcttacttgtcacaagtctgatttcttacctagactttggataaattttgtgaaaactgagcatagcattggagatgacaagtaattttgattgggaatgctgtagggtactgagtttgtgaaatatcccttgctgcagtgctttatgcacaggtgtaaagatctacaatctaggggtgatttgggtaagaacaatacaatgttaaatggagaaataaaatatcttgcttggggagggaggaagcatattacctatttaacgtttagataactgataaatagctaatattaaaaatagaaagttactttccatgcctagctacataatttgtataacactaggaattactctttctcaagacaaaagtagattaatatcctgcccgccttagttcctcccagttgttggtaatgaagagcatcaaactgttgctttttctttgagttactctgctccttctctgctccaggtgtatgtcattaacttcctctggacatggagctgggaatagctccataactgacaaccagttagctatttaattgcagccttctgctagctattgccaggtttgcatactgagtccataaaattaacattatgatttactttgtcttgtctgtgcttagcattttagattttctctcatatgattgatttcacgtcctcttgctgaggacttttttcgagtatgggtagattctttctacctcaagtttattgtttagacctgcctcaatccaacatatcttagagaataggacatgattttgaatatcaccactaactgaaggaccctatgatttggagtctctagccatatcagaagtccttaggtattgaaaacagctcaaatttaacatgaattgatgccccccacctcaccctcaaacacacacacgtatatgctcatgagcttctataattcacttaaggggtgtcctctgtagatcactaggtctaatctatgccctggtggtccttgccttcaaatgtgtgccttatggacactgccaaagtcttttgtggacaagatcattcaagttatgtcagataagcatttttgactttgtaatatatccctttctctcttttctctttgaaaatactgaaataggtttctaaatagaattgttaagatcactattgctatatatatatatatatagcagtatatatatagctatatatatagagcaatatatatatatatattgctctatatatagagcaatatatatatatattgctctatatatagagcaatatatatagcagtatatatatagctatatatatagagcaatatatatatatatattgctctatatatagctatatatatatagcagtatatatatacatacagtatttcagtggtttattaaaaaacatatttaaagttggtaacttgcatatagacttaaaatagaccgtccaagttataacacaatgtctgtgttacaagttttctgtgctaacaagcctgggaatttcttttatttatttgtttttcagtttataaaataaaatgccacaaattctgacactttttaaattttgaacattccagatgctcacctcaataacaagttttaagtattctaaaactcctggatttttctgctaggaacttgtgtcctaaacaaattctagttaatgagatttatttatacaatataatactgatcactaaaagataaataataaataaagctaataactgttaattggtgtaatttgtcgtagttatgagggactattttgtcctttctcccctatttttctaattaatatgtcatatcaattccttttattttttgtttatgctataaatatttacttggaatttaatattttctaggcacccaggcagatattaggattataaagataaaaatcaattgttccctttgatcaagatctcatttaccccacacctcagcccgggcagccatcatcctactctgtttctttgagtttgactttttaaagtttcctatataaattagatcatgtagtattagtctttctgtttctggcttatttcacttagcatgatgtctagtggcattatgatctaatgtacagcatgggtgatgatggatgtgtttgtgataattattacagaaagtgtgtgtataaaaatcacattaaacttgaatatattcagtctttgtcaattaaaattttaattcaagaaagtgaaagctagacaaaaaacaataaaattaaggcagtaaacaatgaaaaaaatcaattgctactttcattaagaatataggattttattaacaaaatccaaagtcattaaagtacccaaagaacatggttgaaatgaagcctatggcactggaactacagcactagaacacctgtatttgaagacatatacataggtatatgtttctaattaaaaccattaaatgtagtgaagctcttccccaatgaatcttaagcccacaaactgagccatgttgtcatggtctattcgataagataactggctaaaatcctagctaaattccatcaatcagttaacaaccattgaagatcagccacagttttcctgtacctctatttaaatttcggttttcattttaatattatttaatcagcaatttatatcttgtttttatacatatttttgcttatgttgattttctagatatacaatttatataaacaaagtttaatatatgtgttttcaaagatcgagaaatattcatctattgctgttacttttattaaagtcaaacctacatgagatatatcctgtcaaaatgtgtgggtggagaggcatttatcatttactgagggctcattttgcaaatttgggacacatgcaggtattataattcttataaaaccttataagatattatttattttaattttcttatataggtaaactaaggtttagagtatataagtaacttggccaaggtcattaacctttagcaataaagaaaaggcctaatttgagaaacagacagaaagtgtgcttagcatttatggctaaaaaaaaatgtgatacatttgcacctttttttgttagctgagaaaatttcaaggtgtaacaactatttataaagcccggaaccaagtccctaagcgatattatgatttccgccttgtctacaaacaactttgacctgaattcttgtctctttagaacagtgagtagcagactttttctgtaaatgcctagggaataaatatttgaaggtctagaagccataaggtttctgttgtaacaacttaactctgacattatagcccaaaatcctttatggaaaatattcaaacatagctgtgttccaataaaaccttatttatgaacacaagtgttagatgttgaattggtccaagggccatagtttgctaactcctgccttacagtgtagactagtgatctctaaacaacttatatatacaaccgtatagaaagttttacatgagtaccctgatacattattttacttatagaatatcacaagtactactgttctaattatgttcagtatgaaacatgcaaaaaaaaatccactgaagatcaaataaaatacgtaaaaagacattcccttttcttccacatcatgtggactgtgtgggccaccacctggtgtatgaagcacaacactgatgaatcctgtccaaggtaaagccaatgaagcaatgatctggggggaaaagaaaaaaaaaaaaaacaacttttttagatagttgattagtttttaactggtatgttacttaaaggacagttttcttcataatcagaatatcaggttttaacaacgatactagttttataattaatactgacatctagtctctcttttttgttcccaaatatttcttttttcttccctcccacactctctttcttccttcttatttatttcttaaagcccacttgaattaatagctttggttaatagctatcaatattatcatggatttaatcccacttttcacttaggaaagatgaaatggaaaaatcctacagtgttactacacagcaccatactagagttttccttcttggtgtccatgacaaaaaaaaaaaaaaaaaaaaaaaatgctctccttcagtagactttgagttttttgtgttttgaatcattgcccttcataattaatctaaaaagacaaccataagtgtgttggttccaaagaagcagacttgaaaagccttgtaaaagaaaaaatttaagcataaattctcaatattcttcttagttttcactcatgatttaaaatatagatgagtgtataaatatgtatatatacatccaaaaatatcctcctttagctatttcagcagaaaaaataagcaatttttcccaatattaaacatgtatagttgttcatagacatattaaatatttatcctacttccttgtcctagcaaagataaaaaaaaatgtttttaacatgagtacttatgtgtactttccaacatatttaaggaactaacaattctaagaagaaaaatccaacagatatttcttaagattttacaaatgcagtgtaaatatttatgctagtatttaacctaaggtacatgaatgtccttatggcatgtgtgtatgggttatgcatttgtacagaaatctgagaagccaagagataccagatagagaaaaatacaaggtaagattcaggaaagtcagattctatttttagttttaccactaaaaatatgtgaaccttaagtaactacttgctatctccagtgctaacaacttcatctttaatggtgcaaaggaaatgaaacaaatgctttctaagggccgttctatcgctaggtccatgttctagcgtatatattctaataacagaaatatgtaaaaataatactaactaaaatttattgtactcctactttttgtcatgaactggcatacattttcttcatggattatctcatgtactacttatcccaaatcaaagagtaacatagttattttgcttattttaacatcaggaacagaagacttagaaaaaaaagtaacttgcacaagttatatagctagtaagagaaattatgaataaacgcaagactcagtgattcatcagcccattacacttcaacttttttgtgtgtgtattatacttatgtataccaatatgtacattacgtacccttattatttctgttaaccccactaccactactcctatcccccagtatgattccgacgatgcaaaataatttagatatttttactggtaaatattttaggcaacctttaaaatatattcagctcaaatttaacaagaaaaatagacaaaaacactttgttgtacaaagataattttctctaaatccagtgcagcttcagctcccctcacaacaacttcctgctaaagcatggtgtttggatctagctcagtggtcctttattcaccatcactcacagtttattgtccatctctatttaagaacagtacagatcccaggatctgctgaatataaaaattgaactccttatatttatcaccaaaccaaattggaagaaatataaataaatacatacatagattgcattccagtgtatttcccttcccctttctgttttttttttttttttttttttttttttttttttttttgaaacggagtcttgctctgtcgccaggctggagtgcagtggtgccatcttggctcaatgcaagctctgcctcccgtgttcaagcgattctcctgcctcagcctcctgagtagctgggactacaggcacgcgccaccacgcccagctaattcccttcccatttctttccgattcactattttgtttttctaatacaattttataattttattttacttttggctccttactccaatgaaatgaccaaacataatgtaagaataaactcaggcatgccattattaggcaaatcacatttacgtatttactttgttttataccctctgaaaaagtttaacttgaagactgaaggataatgtttcaacaactggaaaaaaacaaagtctatttttcaaatctgattaaatttgtgttttccttaactaaatttaaaagtaatatactagaaaaaataagaaaatacaggccagccatagtggctcatgcagcactttaggaggtgggaggatcgcttgaggccaggagtttaaaaccccatctctacaaaaaatgcaaaaattagctgggcgtggtggtgagtgcctgtaatgccaggtacttggaaggctgcgacaggagaatcacttgaacccgggaggtggaagttgcagtgagctgagatcacaccactgcacttcagcctgggtgacagagcgagactctgtctcagaaaaataataaataataataataaaaaccaaccataaaattgaatcactctaactactgttagtatttggatgtatgacttttcgttatttttagtactatttatatatacaaattttcaacttgtgtgtgtgtgtgtttaaaaatgcatatcaatatatgtttaaataaatattagatttattgattaccagcaacagaaagaaggatattggggagattagagatcgaggcttcttaaaaaaatgcagcaagtttgaaatcaggtagcgtgatgcctccagctttgttcttttagcttaggactgacttggcgatgcgggctcttttttggttccatacgaactttaaagtcgttttttccaattctgtgaagaaagtcattggtagcttgatggggatggcattgaatctgtaaattaccttgggcagtatggccattttcacgatattgattcttcctacccatgaacatggaatgttcttccatttgtttgtatcctcttttatttcattgagcagtggtttgtagttctccttgaagaggtccttcatgtcccttgtaagttggattcctaggtattttattctctttgaagcaattgtgaatgggagttccctcatgatttccctctctgtttgtctgttattggtgtgtaagaatgcttgtgatttttgtacattgattttgtatcctgagactttgctgaatttgcttatcagcttaaggagattttgggctgagacaatggggttttctagatatacaatcatgtcatctgcaaacagggacaatttgacttcctcttttcctaattgaataccctgtatttccttctcctgcctaattgtcctggccagaacttccaacactatactacaaggctacagtaaccaaaacagcatggtactggtaccaaaacagagatatagatcaatggaacagcacagagccctcaaaaataacgccgcatatctacaactatctgatctttgacaaacctgacaaaaacaagcaatggggaaaggattccctatttaataaatggtgctgggaaaactggctagccatatgtagaaagctgaaactggatcccttccttacaccttatacaaaaattaattcaagatggattaaagacttaaacattagacctaaaaccataaaaatcctagaagaaaacctaggcattaccattcaggacataggcatgggcaaggacttcatgtctaaaacaccaaaagcaatggcaacaaaagccaaaattgataaatgggatctaattaaactaaagagtttctgcacagcaaaagaaactaccatcagagtgaacaggcaacctaaaaaaatgggagaaaattttcacaacctactcatctgacaaagggctaatatccagaatctacaatgaactcaaacaaatttacaagaaaaaagcaacccaattaaaaagtgggtgaaggacatgaacagacacttctcaaaagaagacatttatgcagccaaaaaacacatgaaaaaatgctcaccatcactggccatcagagaaatgcaaatcaaaaccacaatgagatacaatctcacaccagttagaatggcaatcattaaaaagtcaggaaacaacaggtgctggagaggatgtggagaaataggaacacttttacactgttggtgggactgtaaactagttcaaccattgtggaagtcagtgtggcgattcctcagggatctagaactagaaataccatttgacccagccatcccattactgggtatatacccaaaggactacaaatcatgctgctataaagacacatgcacacctatgtttattgcagcactattcacaatagcaaagacttggaaccaacccaaatgtccaacaatgatagactggattaagaaaatgtggcacaaatacaccatggaatactaggcggccataaaaaatgatgagttcatgtcctttgtagggacatggatgaaactggaaatcatcattctcagtaaactatcgcaaggacacaaaaccaaacaccgtgtgttctcactcattggtgggaattgagcaatgagaacacatggacacaggaaggggaacatcatactctggggactgttgtggggttgggggagtggggagggataacattaggagatatacctaatgctaaatgacgagttaatgggtgcagcgcaccaacatggcacatgtatacatatgtaactaacctgcacattgtgcacatgtaccctaaaacttaaagtataataataataaaataaaagaataaaaaaatgcagcaaggacagagaacagaaaacacagccaaagtcataccagtctggttaggatgctaccactgttattacagccactcccctcatgtcactgacactgcagggcctttgacattttcatatgtgcctagattaatttccccaagaaactaggtctttgctttaccccatcaaaagtcaaaagcaaatcaaagactggttgcttaaacctaaaacatacccctctatcttcagctatatggcccttttgacttttatatgcgacactggacctacttcccatcaagattaatacaatggggaaggcttccaaaaggaaaagagaacctaaaatttggttattgactaaaatgcaattggttctagaacattagccatgcaatagctacatccatctttcttatcactgctcctgtgttagatattgtaactatctctcattaaaccatcctctcaaaagaatagtcccatattttcatcactcacctagtgtcagctacggtattcctggatgatgcccatttcttttctcatttattatgatccatctcattatcttgcaaactgggagctacattgaaaatttaccaccacacacatacttaatacacaaaaattggctaaacattggggaaagtgaagtgaatatttactctaatacacataacatagggaaaagaatgtatgtagagctactatagacctcatttctgcacctataaggatataattagttttcatgcattcacttatgtttatcttcaattaataccacacataggtgaggctttttaccaactggtgtgccccacacattcaatcttgaaagaggtataacagtcatgttataatctattaatttatctacctcttgatatggtagttttctatttattgaaccattacatggtatttgctatatatctgtcactgctctaagtgttttacatatagtaagtcatttaacaaccctgagacataggtaagttttcttccttattttatagagtttatataacttgctcaaattcacacaggtagtaagtagtggaaccaggatgtttacccacgtagtctatgctgtgtgaaagaatgctccatagaagcacacagtttttctctatgttactctctgcatcctttgaagaggattgatattactttcaggttcaaccacccaataaactacaattttaagttcagtcaccccataaactagaatgctgatatctattattggcaaatttggcatttatcagtggtagtagtcaggcgagatttggtaagagaaagttcaaatttttgagggtttgcattaatctctgttactgctactatgaccacgtgggtaatgagcccattcagcagtcccatcagagattagagaatgagagcttctgagatccactgagcagatcgtcttgtttacctgatattgtctacatgatattaaaagtttcctccattctggaagtattcaaataagccttaagttaacttgtacatggagcactcatatgctcacattctggggctactctaggatgtccttccatatgtttcttccacgagctgccttgttactaatcctggactcttgatattcccatttccttaaacatttgtccaaaccattgggctctgcccatgatttagtgtagatttttgctttaggccatcatctcttccagaaagatgtgagcagtaacatacacttttaaaagttccttgtactagaagaattagcctctttttatagtctttcaaagaaaactgatagtgtaattctataagagtaatttccatctagtggtagaatatcattcatcacttattgtaaaactggcaccagcattttcttctcactgaatgatgattgactactctccataagattattatagaagggattacaatatggcaggagggtggcactaagattgagaatgtgtgccatctgcttatctcattccttcagttgattccactcctgtgttatgatggagtcctgtgctggtcactctgaccttcagaatgaagtagatcaggaaatacttactttggtatggtcacaatgtcatcttctgtcctgtcattaggtattttcatactcagactctgtcaaattccagtgcaggccaagagctatttgtcaaaagaagatgagctgcttgctaaagaaggcatgaatttgtttcaaaccccatttgtctccagtttaattctcatttgggagtttctttctttccgcatactctattccagtgtgccaacaatacaatgtacatcactgtatcttcttaataacagagattcttgcactgccacctttacaagttagaaagccttcttttgctctgagccttcttcaaaagtggcatcctttcaggtaactgattaatggatcatatctatataactaaatgtactgtttattgaatccaaaatgtaaaaaaaagtctcaggggttgtatggttatctcatggcagaggcacaagtggccttcattttggaatgtattatcctgctggagccaagattagtggatccgcagaaatataactgaaattgcagatacttgtattttgtactaacactatgtattaaatttagatatctaggatataatccttgctgctttggtactagcaatatgatgccatcaaatagtagaaaagtttatgcccttttggatgattatgtaactaagtaccctatctactatataacaataaaggaaggtggtagaagtactctcttgctaccagataaaacaaagtgaatctgctcttatctgggatggaacaaaaaaaaaacaaaagtacctgttaggttaatatttatttactttgaccagaggacacagtttttgctccaggaaagaaaccacatctggaactctaactgttatcaccaatcaattaaatatatgctaatctagtgtccctctttagcagctatcttcactaacccaaatggacaattaaatgaggatgcaataggaatcaccatcctaggtttttaaaatcttaggtggctgtactaatgttttacccttcctagagatatgcaattaatttttattaactgtttgaataagaaatgaccccagaggctttgggttgctccttcctgccaaactagtacttatttcagaaactgatggaccagtaaaataatcctgctggtggctgttatcttttccaaatgcatacttaggaactggtagaataaacacagggtgaattggagatctcactgggctgattatgaggcaaatttgggggcaaaacttcacctgaccactataaactttcaccctgattggtgaatttgtggagttcagggttctcaacagttaatgctaatgtcaatcagagccactatgcaataatccatggtagatctgggcttttttcttttttcatagcatggagattatgataaatttccacactacatacagtgaatgactgttacatagtccaatagtagtacctgtgatttagaaccctgttgtgggaagtcagggaccccaaacagagggaccggctgaagccatggcagaagaacgtggattgtgaagattttatggacatatattagttccccaaattaatacttttgtaatttcttatgcctgtctttactgcaatctctaaacataaattgtaaagatttcatggacacttatcacttccccagtcaataaccttgtgatttcctatgcctgtctttacttcaatctcttaatcctgtcagttgaggaggatgtatatcgttccaggaccctgtaataattgcgttaactacaaaaattatacagcatgtgtgtttgagcaatatgaaatgtggacatcctgaaaaaagaacaggataacagcagttgttcagggaataagagacataaccttaagctctgaccaccggtgagccgggcagaacagagccatatttctcttctttcaaaagcaaatgggagaaatattgctgaattctttttctcagcatggaacgtccctgagaaagagaatgtgcacctaggggtaggtctctgaactgcccccctctccggagcgtacctgtctcttatggttgagactgcagaggtgaaataaactccagtctcccatagcactcccacgcttattaggaagaggaaattcccgcctaataaattttggtcagaccggttgatctcaaaaccctgtctcctgataagatgttatcaatgacaatggtgcccgaaacttcattagcaattttaatttcgcctcggtcctgtggtcctgtgatctcgccctgcctccacttgccttgtgatattctattaccctgttaagtacttgatgtctgtcacccacacctattcgtatactccctccccttttgaaactccctaataaaaacttgctggtttttgtggcttgtggggcatcacggatcctaccaatgtatgatgtttcccccggatgcccagctttaaaatttatctcttttgtactctgtccttttatttctcaagccagtcgacgctttggaaaatagaaaacctatgtgattatcggggcaggtcccctgatagaacccttaacagattgtctagttattttgttccttagaaatatatctgtattgctattacctggccttgccccttctcttcattacagaggttctatgtttgtcaggtattattagaggaaccatgaatttctaccattttggctccagtaaagcatctttcttccagcaaaacaggcctggaattattttcccacaagtataaaataatattacttaaaatttctaaaacaataaggactttttttcctctctcatatgggaaaaaaaaaaacatagaaaaaaagcttcccattctttaattgaattcctacaaaaactcattgaggagtctttgtatatttttgctctgctacagtcagcatgtaatcctggtccattggctagttgcctcatcatcactggatggctgctgcagttctaggcatcatccagagaggttatgttccactgataggaaagtgtctatgtcttccttgcatttattttaaaaactctttttaaaagcttcctttccaggaagtcctggaagttctctcttatgtttcataattttatcacagacccccaaacctaaattaccctagaagtatgaatgaggtaaccaaagtcacttagatatccacatttttgtcggatgagggaggacacataaattaatttttaggcatgctatgtacctgaaaataattagagttctgttaacatggaacagtaaatgactatgactgttacatagtccatcagtaatatctgctatatagaactttaatgaattatctattattttggtcctgaaaaatacacagttacatatcttcagatatccatccctatagataggggtattttcttagcaggctgtgttgcctgctatgcattgtctactttgcttctggtacttcattgtagatactctttcgtctgctactccaagatctacttcccattaaaataaatggtttgttttcaactacggtgtttttcactagcttgatagtcttcaaaatagcacatgtcacaacaccagcttggctcacttatgcatttttcaagattataggcaagttattacccttatatactggagaggtgtttttagggagagaatggtaggttaaagacataaaatgtcatctccaacatttccatttactcaacattttggattccttattctatggcatacccagtaatgtctgacattgaaatgccacttaatgagattcgcggttgggtccacatttttgccaaccagccaagaaatctattgcatcatccagagattcaaattagcataaagaatatagaaactctggcaaatgtatccatattaataaattgaacctgatctaaaaatacatccctccaccttggtgaaataacattagaagccaaagatttactgattttcaaaattccttattgatgatataaattagggaaattacgcagtttgtctatagataaaatgcttcagcctgtaatcagctcttcaggttatgctggaatctgataatacaggtaaagaacattgagaggtagttggttagcaagcatgtggattactgactttctgttgcaagtcaactcctacaggaaaaagaatatcatcatcttcaatcttacgatgagcaaccctatcagacaagttataaaagggtacttgtcagttaagggagagcagaaactttagatgattggggtattcccatttcaatttcagggtataactctttccaaactcatactctctcatctaaaaaatgtagtaaccttgtgaattcagctgacattaaaaatcataagtaataggatttaattttgcttttgtattttggttacctcagcctgaggctaaaagagataggagatgctttaagcaatgtcaaaaaatgtctctaggtttcagtctgttcctttagcagagaatttagaagtgtgtgtcgttcactgtatttatgctatccagtgcattttaacatacctactcaaccatgctgtcattaaattcctcttaaccttcatagtgcttaatgacgacatcagtgctacaccctgaagctttgcttctactgggtgaccataggctataataaataaggcatttcaccttccatgctaaaatgcatgcaatttaggattcctttcttaaattgttaatgaaaattccctgtctccaatcctaatgcagtcagctaacaaatccagagttcttgcatattcttgagggtctgatacctacaatacattttacgttggacaattttgattctaagaaacagtaaaaaaaaataattaagtagaaaaggaatatattggatagattttgaaaacaaggctagaaatagaagagtttgtaatggggtcacagctaaggacctgccttgaaagtctgcttaagactactctgttgataccacatcagtggacttcacaccatttcactgccagtctttcaatattatattgtcctgatttatttgtgccagtctgtcaatatgcaaagattatgaatgatcttggctaacacactcaggtgctagctgcagtacatgagaagaggaagctctgttccctttgttgacttccatagttggaagtgaactctacttctcatttgattaataaaattaacaagtttttaaatcataaagatgttacaatgctaggagtcatgaaaacaaggtaaatgtacatatgattatctatcaaaaataggatcatactttatgtaatcttttataagctgcttcccttcaccccatttaacaaatatcaggtatattttctatgttgacaaatagtgatctgaacaatcattttaaaatgaaatgaaaacaaataaaaaggcaaataaaaaatgggatgtggccatgaagataaatttataagtgaaaaatatatttcaaatagacatttgaaagatactctatcagtagtaataaaactttttaaaaatatttgattaattttacttttttactttggattcacaaaagccacacaaatattattaaagttttaagtaaaaagatatatatgaatttttaaaataaaattataaaacaatattatttttacttaataatgccaagaaatagagatgaatgtttaggaaaacttgctgaggcttttagttgataccacatggaactattaaccttctgctatactttaacagataagcatgcaaaagaaagtctactctattgtaagcactcagtaaaaatttgttaaatgaatatgagttctatgattatttgtaggggctcaaaaattttataaacataatagaaatagtagcaaatgcttgatgacagaatattctttcaaaacaatggatctcttaaaagtaataataatgataatgtaggtttctatagttgaaagtaatttccaagtctattgtctgccagatttcctttctgagctaaaaataaagaaaaaataaagaattgtaatctgcagctgaaacattcagtgtctaaaattgagcctcatttaatgtagtggttttggttaatgttatcctgtatatggaaaaacatgtcacattgattttgtggctaactgcgtatcaaaataataggtaacatactgccaaatagccatccatatatttaaaatctttctgtaacaaagattacaaatattattttaggaatttttctctaggatcatcatttgaccacattaaagccagaggaattgggatattaaaatcagaacaaaatgaattccacaacacctgtgcttgtatacatttattacagatttcactataaaagcttaatacccatgaataaatatggacttgttttatttgatatatttatcacagatcagttcttatagattagtagaaatcaaaagataggtatttttagattatctgtaaacattcagaagacgaacatcactgtaggtattcttatgttatacatgctaccagtttatagaaatatgtcaacaccaatttgaattcatctttcctaacttttaatacaatgttctacgtaatattctttagtatgccttataaatataaatagcaaagtcatagataaatgtaaaatatgtttaaattttttattccccgctatacctcattcatttaaacatcaggatgcatcagtagtaaaataataatttgtatcaactcatttcagatgtattaggcaggataaatctgcaagataatgtttccttacaattttaaatttatgtaagtctacatttacagcaaaaatttcaattgaaacagcatatataaagatagagttaaatggaagtgagcaccatctaatacattttgtggttatcttctttctagcatgaaatgcttttaattaccaataactagatgatggtataaacactacttcaagtagttatattgattgttggaaggtaaagtaactaactacaagcaaagtaaaaaaaaaaaaaatcctgcttaggttcttacctttagattttcattaggaagtaaattagcaaaagatcttttattattatactttaagttttatggtacacgtgcacaacgtgtaggtttgttacatatgtatacatgtgccctgttggtgtgcttcacccattaagttgtcatttaacattaagtatatctcctaatgctatccctcccctctccccacacctcacaacagaccccggtgtgtgatgttccccttcctgtgtccatgtgttctcattgttcaattcccacctatgagtgagaacatgcagtgtttggttttttgtccttgtgatagtttactgagaatgatttccagtttcatccatgtccttacaaaggacttgaactcatccttttttatggctgcatagtattccatgatgtatatgtgccacattttcttaatccagtctatcattgttggacatttgggttggttccaagtctttgctattgtgaatagtgccacaataaacatgcgtgtgtatgtgtctttatagcagcatgatttataatcctttgggtatatactcagtaatgggatggctgggtcaaatgttatttctagttctagatccctgaggaatcgccacactgacttccacaagggttgagctagtttacagtcccaccaacagtgtaaaagtgttcctatttctccacatcctctccagcacctgttgtttcctgactttttaacgatcgccattctaactggtgtgagattgtatctcattgtggttttgatttgcatttctctgatggccagtgatgatgagcattttttcatgtgtcttttggctgcataattgtcttctgttgacaagtgtctgttcatatccttcacccacttgttgatggggttgtttttttcttgtaaatttgtttgagttctttgtagattctagatattagccctttgtcagatgagtagattgcaaacattttctcccattctgtaggttttctgttcattctgatgatagtttcttttgctgtgcagaagctctttagtttaattagatcccgtttatcagttttggcttttgttgccattgtttttggtgttttagacatgaagtccttgcccatgcctgtgtcctgaatggtattgcctaggttttcttctagggtttttacggttttaggtctaacatttaagtctttaatccatcttgaattaatttttgtataaagtgtaaggaagggatccagtttcagctttctacatatggctagccagttttcccagcaccatttattaaatagggaatcctttccccattgcttgtttttgtcaggtttgtcaaagatcagatagctgtagatatgcggcattatttctgagggctctgttctgttccattggtctatatctctgttttggtaccagtaccatgctgttttggtgactgcagccttgtaggatagtttgaggtcaggtagtgtgatgcctccagctttgttcttttggcttaggattgacttggcaatgtgggctcttttttggttccatatgaactttaaagtagttttttccaattctgtgaagaaagtcattggtagcttgatggggaggatggcattgagtctgtcaattaccttgggcagtatggccattttcacgatattgattcttcttatccatgagcatggaatgttcttccatttgtttgtatcctcatttatttcattgagcagtgatttgtagttctccttgaagaggtccttcacatcccttgtaagttggattcctagatattttattttctttgaagtaattgtgaatgtgagttcactcatgatttggctgtttgtctgttattggtgtataagaatgcttgcaatttttgcacattgattttgtatcctgagactttgctgaagttgcttattagcttaaggagattttgggctgagacaatggggttttctagatacataatcatgaagaagtcaaattgtccctctttgcaaaagatctttttaaaaaagtgtttgaaaattacacatcttgcttaaagttttataagagaatatcactactaaggacactaagtatactatgagtaccaaatagcagaatatgtatacatctacttttccatcattttataatcaataatggctatttgaggaactgaaagtctctattttttgataaattactttataatggtactgtctctggattagctaatttcatactcaaaataaccatatgactgaaaataaaatctagccagtaaagtctgccttcaaaatacttcaaaattgtattttttttaaataattgaaaggcaaccagtaaaagtaaacaataatgagcaacattaatcagtattagaaaatctcagaaaggagctgatggagctcaggaaagaaatatagataaaagaaaatcatttcagaaatgaagactgaactagaaagaagataagagcaaacaaatatacctgatggatgaagcactaagaaaaagttaaaggaagtcatattttagaaagtaaaaagaaaagtgtagaaagacgtaaaaactattaaagacaaattaataaatattaaagatacacaaggaagaccaacatacaagcaggagtccctgaagaagaaaaacaaataaaagagagcagaacagataactcaaaattatgatcatgaataatttcctgctgatattggaagctatgtattgaaagataatctaatttcatgtacttaaggatatcaacctggaattattagtaccaagaaatattataataaaataatagatcttaaagaaaaaagaataaatgtgtcatttggacacctatggaaaagaataaattgactaataaaaggaagaaaaattataattttaaaaatataaacccaatttttgaagaaaatgtggtaacataatggagatacatgaagaaagaaaatgagagttacgtgaaccaaaaaggttatattcagaaaaaggaactttgagttgttaagggcacagaaaacctgttatcattgtactccatcgtttctttaagttttccctgagaataccccgtagaataagcttcagacaactagttaatggtgaacatttaaaatgtgattactcacagaaataaagctaagtaatggttaaaagtcagagactacagtatgcagtgtctatatgcactgactgcctacctgtctgtttctgtctgtctttctctctgtctctcggtctctttctttctctctttctctttctttcttcctcctttctccctttttctttctctctctctttctctctctgtctctctctctctgtctctctgtgtctctctctgtgtctctttgtctctttctttgtctctttctctctctctttctttctctttcttcctacctgccaatgtatatttaaatatatttcagaggttgagaagctcttaaatctttattttgaaaactagtaaataaaattaaaatcaagcatttattctgtctttcctatatgaactctaccactgagaagaaacaaaatggcagataggggaattgtctcattatataaaagtatttcatcaaataaataacataaaaactgcagtatcagatgatcacatttgaaactagacattaattaatggatttaggaactgagcataaatggctactaacaaataagaaactgacactcagatggattagttcaattgtgcaagatttcacagctagtaagtaccagtgaggattcaaaaccagatcatctggtaccagagcccactttatatgctttgtcttaattcacagttttatctgggcctttcatttttgtgcctggacatgaatactggtatagagcagtttgtattttgtgatgagctttgtcttaccaggcaagattttaaatgatcattaatacaacttgtattgaagactcacaaaatcatctcagtaaatttaaatcacatattgagaaagttattacctgtttaatttttcagtttttctgattcctaacaataaaaacatgttttgatactagaatatcttttacaactgaaatatgttccagttgttttctttgtaagaaagactaggtctcatactcacaaagtgatctaaccataatttattattaatatgcttgggtttttgctgtattaatttttacagttaattcataacagtaaaactttatatattttattacagaagtaatataaagctgtattcatgtaataaagcacacaaagcattaagcaaattgtagtatgaatggtaggtatgacaaaaattatttagttctcaagtaaacagcatgtgaaaaatactgtgctatgtcaaattctattcagaaattatgtagtttaatataaaataaatttcagtcataagtaatgaagaaagtagaaatagtacatttgggaaaagactaaggataaataaagatgcaggttgagtatttctaatccaaaattcctggcttgagaaatgttttggatttctgaattttttttttgataacttgcaaatacataatgagatacctttgctaagggtccaggtctaaacaaaaaattcatttatcattcttatatgctttatagactgaagataattttatataatatttttaataattttgtgcatgaaactaagagttgactgcatttcttttcatttttacatttttatgaatgcataatagttgtacatatttatggggtacatgtgatattttgatacaaacataaaatgtgtaatgatcaaatcaacataattgagatattcattatctcaaacatttattgtttctttgtgttgggaacatttcagatttgctcctctaattattttgaaatatacaatacattatggtcattatagctgtcctattgtgctactgaacactagattttatttcttctatctgactgtatttttggacccatccctctttatcacccactataattcctagcctctggtagtcattattctactctctacctccatgacatcaaattttttaactcacacatatgagtgagaacatgtgatatttgtctttctgtaactggattatttcatttaacataattttctctagttccattcatgttgtttcaaatgataggatcttattcttttttatggctgaataatatcatatagtatattggtatagtttggatatttgtccctagccaaatctcatgttcaattgtaatccccaatgctggagatggggcctagtgggaggtgtttgggtcatggggacagatccctccaggcttgtgctgtctttgcaatagtaagttctcacgagatctggtcatttaaaagtacgtgtcatctccgccctcactctttctctcttgctcctattttcaccatgtgatgtgcctgctccccctttgccttccatcatgattgtaagcttcctgaggccttcccagaagccaggcagatggaggcactgtgcttcctataaagcctgcagaactatgaactgattacctcttttctttataaattacccagtctcaggtatttctttatagcaatgcaagaatggccgaatgtatgtatatgtaccacattttctttatctgtccatccattgatggacacatattttgattccatatattggctattgtgaatagtgctgcaataaattggagagtgtagaaacctcttcagtatactgattttctttcttttggataagaatgcaatggtgggattgctggaataaatggtagtactatttttaacttttctgtggacgtaccattctgtttttcatagtgactgcgttgacttacattcccaccaacagtgtatgagcattcccttttctccacatcctcaccagcatctattattatttcgctgagaatcgtcacatgaggtcatgtcagcactcaaaaaattgcatattttggagcattttagctttcagaattttggattagtgattctcaatctgtagtacgtgtaggttgtgattattttctgttatgaagatatgttttgactgtaagtttaaaaatatttaataagccagaatatctttaaaaaataacattacaaataatttaacaagaagaaaggaaaaaaataaatggatgatatgatactatttgtagttggttattttaactatatataatatattatgtatatattacatatatattatatgttctgtatatattatgtatatattacatatatattgtatattatgtatatattatatattatgtatatattatatattttttgagatggagtcctgctctgtcaccaggctggaatgcagtggtgtgatcttggctcactgcaacttacgcctcccaggttcaagtgattctcctgcctcagcctccatagtagctggaactacaggcatgcaccaccatgcccagctaacttttgtacttttagtagagaaggggtttcaccatgttggccaggatggtcttgatctcttgacctcatgatccacccacctcagcctcccaaagtgcgaaaaatacaggagtgagccaccacatccagcctattctatctatatttataaggccaattttcaagtgagtttatgtgataaatttacagttataatgatttttggacatgatgcctttggcaaatgtacagataaggtgatatttactaccacagagctgaataagacttcagtcacagatttgaattatcttatcctacaaaatttaatatatataaatatatataaatattataaatatatatgtcataaatcaaggaaagtattcagtcatgcacacatacatatacaggcatgcacatgcatgtcctttatttttggaagttttaagtgaaaagttgtaagcatatttaaattcaaatccttgctttactgcttattatctatgtggtattggccaatgtagttatctctcaaagtcttcagtaaaatttgaataataatagtaacctatttcagagggctattgataatgctacatttaataatagatacaaatgcttaaaaatacgtgtggcaacaatatcagtatttttatgcataggaagaaaacacattacaagaagagagaatagcctatgcaataatcattatgatatttatctatatcttatatattttctcttcagcctctctgattctctatacaaaacatgacagtctttatataactacatatctagggaatattcaggtaagttttgaaagctttccaaacataatggatgtattggtccaggtaggctaaaagttgactagagggaaagccacacacaaatgtgtgtacaatcccttccaccctaccacataccccaagaagccataaaattcaattacatttgacatttcagtggttaaatgtctcaaaatactgacttcagtaaagtttcagggtacaaaatcaatgttacaaaaattggtagcatttttacacactaataaccttcaagttgagagccaaatcaagaatgcaacaccatttatagtagccacgtatacacacaaaaatacttaacagaaaacatagatgacacaaatgggaaaaaatttatgctcatggattgaaataatcaatgtcattaaaatggacatactgcccgaagcaatatacagattcagtgctattcctatcaaactaccaacatgtttcatggaactagaaaaaagaaaactattctaaaattcatatggaaccaaaaaatagccaaagcaatcctgaacaaaaagaacaaggacagaggcattacattacccagtttcaaactatgctgcaagtccatagtagccaaaacagcatggtactggtacaaaaacagacacataaatcaatggaacagaatagagaacccagaaataaagccacacacctacaggccatctgatatacaatgaagctgacaaaaataagcaatggggaagggactgcctatttaataaatagtactgggatactggttagccacatgtagaagaatgaaactggactcctaccttttgccatatgtaaaattaactcaagatggattaaagatttaaatgtaagacctcaaaccacaagaatcctagaagaaaacctaggaaatgccattctgtacaggggccttgggaaagaatttatgactaagccctcaaaagcaattgcaacaacaacaaaaattgacaagtggaacctaattaaactaaagagcttctgcataacaaatgtactagcaacagagtaaacagacaacatacaaaatgagagaaaatgtttacaacccatgcatccaacaaaggcctaatattcacaatctacaaggaactgaaacaattgaacaaccaaaaacagccccattttaaaaatgggcaaaatataagaacagacactttttaaaagaagacatatgagcggtaaacaaacatctgaaaaaaatgctcaaccttactgatcatcagagaactgcaaatgaaaaccataatgagataccgtatgcaccaatcagaatggttattactaagaagtcaaaaaacaacaaatggtagcaaggtgtggtttcaagggaatgcttatacactgttggtaagaatataaattacttcagccactgcggaaagcaatttggagacttctcaaagaacatagaacaggactatcatacaacccagcaatcctgttacttggtatatatccaaagcaaactgttctaccaaaaagacacgtactcgcattttcattgcagtgctattcacaatagcaaagatatggaatcaatctatgtgtccatcaacaatggactgaacaaagaaaatgtggtacatatataccatgaatactgcatagccataaaagaaaaaaaaattgtgtcctttgcagcaacatggctgtgctggaggccattatcctaagcaaattggtgcaggaacatgttctcactcataagtgggagctaagtgtcggatgctcatggacatgaaaatggcaacaatagaatctggggactactagaagagggaaagagggagggggacaagggatgaaaaactaaccgttggggactatgctcagtacctgggtgataggatcattcgtaccccaatcctcagcatcacacaacgtacacaggtaacaaacctgcacatgtaccctatgaagctaaaataaaagctgaaaaaagttatttcaataaaaacttcacagaagtaagttatgtattacagcaatatatgcagtagaaattaattatcattaggcttatgtccttaaaccaaaggtgaatcatatcaaatctgcaaagtgcaattcttattaaacctccgccaaagttcatttggggcttcatctcattctggaggaatttatactgtaaaagcctttaaaaataaatagttatagagacctgtaataaatcgttatagagacctgtaatttctgccgatactccagccaaactcaacatcaatgaagacacttcctcacattggagagaagttatgaggggcagggagaggctgaagtcagtgttccttaccaatctctgcctccagccttccaaagccccagcaagctcagtagatcatgatgtgggactgcattattcaaatatatgctacctatcagggaacatttcgacagtatctcaggatcaagtaaaacatgttggtgaagtgctttacatttaaatgagaaaatgataaatctttgtcagctattacaataaaataattgaaagacatacatacgaactttttttttttttttttttttttgagacagtgtcttgctctgttgcccaggctggagtgcagtgccacaatcttggctcactgaaacctctacctcccagtttcaagcaattttccagcctcagcctcccgagtagctgggattacaggcgcacaccactacacccagctactttttgtatttttagtagagactggatttcaccatgtcagccagggtgacttcgaactcctgacctcgtggtccacccatctcggcctcccaaagtgctgggattacaggcatgagccaccacgcccgacccattttctttactggaataataatgtttgttagtattggtctaatggcaatcacaatcacaatgtagttttcctaaatcgtctgcctctttctatctctctctgtccttccctacctacatttctacttatatattatttctcctagtaacatcaacattactcataaactaaataatgtttctggaacctctgtaattaagaggaaacatagcatctaggagttgtattcccttacttgtcacaccagcttggttaatgagcagaagaaacacaaggctgaaatgctcagctgataaaaaggcttacctccctcaccaggctttaaaaagtttgattttacacattggcagctatgtaatattgtctaggggatatagaacagcgtacattactgcaattttggagatttcaccatttaaagaccgatttctttaggtctgacacttcttgttggtgtgggtcccattaaaaatacatattatttctaaatccttgtcattctccatgtcagtgatactcagagggcatttagatggattatcagctaaataagtatcatatccaaacataagccactgtgagagaaccaaagttacatacaacatattaacttctttccccaagatcagcccttggaattggattgaagaaagtccctcaggagatcaacattttgactctatacctaaaatgcctcataggagtccttaaaatggtggagtatcctgtacattgatcttgctaactagctccacaatggcaggcacagctcttctggtttccgtgagacacaaggggctaattttaaatttctttaacacttttaaaagcctgtgactttttgacactgctaaagcatctgatgtgctttcaaggcacccttgtatcaggacagttatcctctttgtttttctctctgtaatcatcacagaagacccctaaccccttagcccgtttgttttattccctgtggacaatgggtggacaaaaataatgtaaataagatgaaagaaacaaaattaactgtcatcagtattttacattcagttttttatggacctatctgtgtaaatacaggacaaaagtaaacttgacaggatgagaagaaatatatttcttttagatttggcctctaaagacatatttgaagcaatttttgagtagttagtcaaagtggaaataaatagttaacttgtagtttattaaatatctataaataaccaacttacttccacttttcgtgttgaaagtcatcccttactctgacctacaggaatgacatgtatactatctaagttaatattatataagtatgttaatctaaaaacaaatcagagttcattgaggcatatttagtctggtttacagtagtccctaatcgttgtagttagttgttaaaagatttagcaatgagttttaagatttatttttcaagttagtctacacagtcatgattaatttaaaatttgttttatttatatgacttgtctccctcatgattcatttttgagccagccttcaggcaaaagcaatcttagcttgcctaggggaagctcatttaatttgatagtgataatttttttgacagctggtaatttacttatttacagcttcctgattatgttttctaatgctgtagttacgtatataaaataataatcttcagttaaagaatccttattttctattaattgttccactaagaaaaaacaaacttttttttctttattattattagtatcttgtgatttttgttctcaccttagtgtaatggtgattaacatttcatgcataggataagagagatccagctcttactattgaaggattttttttccagttcactatctattactaaaggaatgcaccttatgcatgacttttattgatgatagtggtttagccacagtgatattttggggtaaggcatcccagaaaagtttaagctacgtgtttataggcttcagaatacgcaaaaggtcttccctttttccatcttttttaagctcataaggcatttgaggggaaaatattactttaaatatgttaacaggaaagtattatattgttcaatatattattcaaatatattgttcaaatatatattcaactatattattcaaatattcaaatatattattcaaattatattgttcaaatagtgagatttatgtaaatgtaccaaagcactttagcaattatgatgcattagatagcttatttgtgtggaacataaggctatttattaaatcgataatgtggttgatctttccaataaaagatgatttttgtttgttttaatgtggcaatatacattataggtctttattataagtagttttctaggtttgaatatattgatttatatttctttaacggaaaaaatttgtttagcataaaacatgttagaactttaaacatgaaaattgtctgcttctttcagactagccaagaaaacaaatattttgttttccagctttattgaagaataaattaaataaaaattacatataatttaaggtgtagtatatggtgatatgataggtgaatatattgtaaaatgatgaccacaaccatgcttattgaaacattccttgcagtgactcttgagtacacctgcatgtccctttcttcagtgtgtactttcgctttgcaataaatctccacactttcacttaaaaaagttcacctcacatagctaccatttgtgtatgtgtggtgagaacacttagtatcttggacttagcatctttcttagaaaatcttaagtaaaaaatacagtgttactaactacagtcaccatgtcatacattaaatccccagaacttattcgtcttataagtctggactctttgaccaacatactctcatgccccatcccctacctccttccatccgctaaaatcaaccattctactctctgcttttcagagttcgactttttagattccacatataagtgatatcatacatcactatatgtatcttgctgtatctggcttatttcacttagcataatggaagcatataaggattgcattttcccagtctgtaggatttctttacattttgtttattgtttcctttgctgtgtagaagatttttactttgatatagaccactggtttatttttgcttttgttgactttgctttcggtgtcatctaaaaaaatcatttcccagatcaatttcaaggagacttttctctacgtttccttttagttttatagctttagttctcatatttaagtatttaatctattttgatttaatgtttgtgtactatgtaagttaagtgtccagtttcattcctttgtctgtgaatatccagttttccaggcaccatttattgaagatactgtcctttctccattgtgaatccttggcactctcatcaaagattagccgaccttatatgtggacaatgtatgtacgcatgagtatgggctctctattctgatccattagtctatgtgtctgtttttatgccaatatcatattttttattactatagctttgtaatatagtttgaattcaggaaatgtagtgcatcaagctttgttgtttttactcaaaattacttgtagtttgggaggctttacgaacactttgggaggctgaggtgggtgaagcacttgagcccaggagtttgagaccatataaaaattagtcaggtgtggtggcgtgcacctgtagtcccagctactcaagaggctgaggtgaaaggatcgcttgagcccaggaggttgaggctgcagtgaaccgtgatcgtgccactgtactccagcccatgtgacagagtgaaattctgtatcgaaaaaaaaaaaaaaaaaaaaagtcactttggtatttggagcgttcatggtttcatatacattttagaattgtattttttatttctgtgaaaaatgctattggaatttggtagggattgcgtggaacctgtagattgtttgaggtagtatggacatttgaacattttatttacttgtgtcttcttcaatttatttcaccactgtttgacagttttcattgtacagatcttctacctccttggttaaatttattcataagtattttatcctttctgaagttattgcaaatgggattgttttcttaattttgttctcagatagttaattgttagtgtataaaaatgcaacacgattttttatgttgattttgtatcacaaaactttactgaaatcatttattctaacggttttatagtggggggttgagggttttatctatataaaatgaagtcattttcaaacaaatactttggcttcctcctttctgatttggatgcttttttttttttctttcttacctaattgctcaggttaggacgttattacatcgaatagaagtggtaagagagacacatttgtcttggtcccgatcttaaaagaaaacctttcaacttttcatcattgagtctaatgtttacttttggcttgtcacatgtggcttttattatgttgatttacatgtcttctacacctaaattcttcagagttttatcatggaaagataataaattttatcaaattcattttctgcatctattgagatcatgtgatatttatccttcattctgttagtgtagtgtacaaaacttattgacttgcatatgttgaaccatctttcagcccagagataaatcccacttgattatggtgaatgacccatttgcaagggataaatcccaattgatcattgtgaatgatccttttaaagtgatgatgaattaaatttgctaatattttgttgaggatttttacatctatgtgcatcagaaatgttggtctataattttcttttcgcatctttatctgggtttggtatgagggtaattctgaccttttaaaatgagtttagaagtattcccttttcaaatttttagaaaagtttgaaaaggactgcttttaatcacttaaatatttggttgaattcattcgtgaggacgttttgccccagacttttctttttgggagattttcataagtgcttcaaacctttgcatgatcattattagtctatttatattttctatttcttcattactcagttctagtaggctatatgctacttggaatttattaatttcttctaggctatccaatttattggtgtattgttaataacctgctataatcttttgtattactatggcataagttcttagatcttctctttcatttctaatttattgagctctgtcttttgttctatttttgctaaaggtttatcaattttgtttttctttagaaactctcagttttgttgatcattttaattgtctttctagtatccatttcatttatgctctaatcttcattattttctttctgctaattctgggtttatttagtttgttctttttctagtttcttcagatgtaaaattaggttgcttatttgagatctttattattaataaatgtaagcatttgtcactatgaacttccctcttaggacttcttgtactgcgtcttatacatttttgcatgttgtctttttctttttcatttgtctccttatactttttgatttcttctttggcccattgattgcattaagagtgtgttgtttactttccacatatttgtgaattttcctattttctcctcttatagacttctagtttcttaccactggattgataccaatcttaccaaatatgataacaagtatcttttaagatatttgatataatttcagtcctcttaaatttgctcagatttacagtctaacacaatataccctggagaatattctgcgtacacttgagaagaatgtgtcttctgcttttcttaaatggcattttctgcatatgtctccaaggtccatttgatatagtgttagtcaagtctgctgtttccttattgattttctgtctggatgatatatccattattgaaatcccttactatttttcctttcagtcctgtttatattttctttacatatttaggtgctccaatatagagtacatgtatatttacaattgttacatccttttgatgaattgattcctttatcattatatagtgactttttttgtgacagattttgactgaaagtctattttgtctcatataagtactactgcttccttttggttaccatttccatggaatatctttttctgtcccttcgcttttagcctatgtgtgaccttaaagctaaagttagtctctcacagggagcatattgctgcaactttttttttttcaaatccactaagtcactttgtatttcttgattggataatttcatctgtttacaattaaagcaattattgattggcaaggacttattacaggcatacctttgaggtattacaggttcagttccagtatatcaccataaagcaaacatcactatgaagtgagtgatacaaaatttttggtttcccataaatataaaagttacgtttatactatactgtggtctatgaagtgtgaaatagcatatgtctaaaaaaaaatgcatataccttcattaaaaattaacttgttgctaaaaactgctaacaattatatgagccttcagtgagttgtaatctttttgcttatgaagcgtcttgcctcaatgttgatggctgctaactgatcagggtggtaattgctgaaggtggaagtagctggtgcatttttttaagataacagtaaagtttgccacgttgattgactcttcctgtcctgaaagatttctatgtagcatacaatgttgtttgatagaattttatccacaataggacttctttcacaattagagtcaatcccctcaaactctatcactgctttattaactaggtttatgtaatgttctaatattttgttgtcatttcaacaatatccacagcatcttcatcaggagtaggttccactgcaataaaccattttttgttttgtttttgagatggagtctcgctctgtcacccaggctggagtgcagtggcctggtctcagctcactgcaaactccacctcctgtgttcacaccgttcttctgcctcagccttctgagtagctgggactacaggcgcctgccaccacacctggctaattttttatatttttagtagagatggggcttcaccgtgtcagccaggatggtctcgatctcctgacctcatgatccgcccacctcggcctcccaaagtgctgggattacaggcctgagccaccgcgcctggcccactttctttgctcatccttaagaagcaacttctcatttgttaaagtttcatcatgagattttggcaatgctgtcccatcttcaggctccacttgtagttctagttctcttgcatttctaccacatctgtagtttcttctttcactgcgttcctgaacccttcaaagccatccatgaaggttagactcaatctcttgctaactgcttttattgatttattttgagacagagttcattcttgttgcgcaggctgaggtactatgtcacaatctcggctctcttgcctcagcctcctgagtagctggaattataggtgtgcaccaccatgcccagctaatttttgtatttttagtacagatggagtttcaccatgttgttcaagctggtctcaaactcctgacctcaagtgattctcccgtctaggcctcccaaagtgttgggattacagacgtgagcgagtgcacctggccgcgaactgcttttaatgttgctattttgacttcctcccatgaatcacaaatgttcttactggcatctagaatgctgaatcctttccagatggtgtttgatttactttgcccagatccatcagaagagtcactatctatggcagctacagctttaaaagatgtatttgtttaacaataagacctgagagtcaaaattactacttgattcatgggttgcagtatggatattgtgttagcaggcataaaaacattgatatcctttataccttcatcagagagctctttaggttactatgtgcattgtcaatgagcaatagtattttaaacgaaatctttttttttttttcttctgagcaataggtttcaacaagtaacttaaaatattccatcaaccatgtggtaaagttttgctgtcatccagtctttgttgttttatttctagagcaccgacagagtagatttaacataattattaagggccctaggattttcagtatggtaaatcagcattggattcaacctatggtcaccagctgcattagcccttaacaagagagtaaaccagtcctttgaagctttgaagccaggtattgacgtctccttttttgccatcagagtgctagatggcatcctttttcaatagaaggctattttgtctacattgactgaaagccttatcaataacacaagcagttgattaacacatattttgtatagtctatgtagtatatattcttacaataaagtaacctaaacaaaataaaatgcttcttaaaactatcgtgtggaagaaaaaatatatttgcttttttttttttttttaacctggaagtagatcatgatagggttcttcatcttcatctttacactgagtagcctgaagaggaggtgcaggaggaaggggaggtggaagggtaggcaggagaggcaggcacacttggtataacttttattggaaaaaatccacatatatgtgaactcacacagttcaaacccatgtgggccaagtgtacttcaactctgttattgaatttacataaatgcttctattgttaactgccacttgatatgtatttgataatttccaacctcctgaatgttttgctccaacctcaaatttatatccagtatcaaagtcaccattttcccttctgatttcctgtccctgatcatggaatgtcacctgtcttggtcagacacattctgaatgtcagtgttagcttcatatttcccttttccttctcttctagtgtttagccaattatttgaaaaattcaactgatgttacattctcactcctaattccattacccctctcatgaacaactgacaagattcattcaaacttttatttatttactctgcataaatcattgtaaaatcacttgatcctgctgggagcagtggctcacgcctgtaatcccagcactttgggaggccgaggcaggcggataacgaggtcaggagatagagaccatcctgtgaatggtgaaaccccgtctctactaaaaatacaaaaaattagccaggcgtggtggtgggcacctgtagtcccagctacttgggaggctgaggtgggagaatggtgtgaacccaagaggtggaacttgcagtgagccgagatcaggccactgcactccagtttgggagacagagtgagactgcgtctgaaaaaaaaaaaaaaaaaaaaatctcttgtggctaaggccctttatctgctgaaggttcactgctgaaatgaactgacaatagacagaatagacagaaaaaaaggcctacaaacctattaacatgcacattgacatgggagacccacaaatatgagacccaaaagaagggccacatagttggggattaaatgccctcttcaggctaggcacggaggcttctgcctgtaatcctaggtctctgtgagactaaggtgggagggccagttgaggctaaaaatttgagactagcctgggcaacatagtgagatcttgtttctacaaaaaaaaaaaaaaaatacaaaataaaaattagccaggcattgtggcatgtaccattaggcttagatgctcaggaggtaaggtgggaagatagcttgagcccaggagtttgaggtttcagtgagctatgattgagccactgcgttctagcctgtaaaacaaagcaagacccagtatctaaattaattaagtaaaaattaaactaataccccagtcataagggagatgaaagttgggtctctaggcaattttagagtggatagtaaataatttttagaggaaataaatggaaccaggaggcagacattatcttttaaacgattttatttaaaaaactgaatgggataagcaagttaaaggaaaatgaggggcaaaactgcactgtaaacaacgatggtcttattatatagataaagtctcccaggcagtctctctctgtgctgccctcagaaaaatagatacaaagcctatccgggtacggtggtgatattttgtcttttcttttctctagtggttaatcttttctggtcaattgattaggttcctagaaagggggttttaagacaatttcatttctatggaaaggagtttcctggtcagataaggaaattccaaagttcctttcagggcttcaggtggaggtgggcaagaagaacaagagattaaaaagttcttgtatctgaggaagatgtagggacttccaatttaatttaattcgaaatgctcatcagaccaaagctctatactttggagaatcgttctctgtgccccaataacctataaaacataatagttatgaagtatgcaacagttacacacaatttcaaacataaggattagagaacctgattaagtgtggcttaaacaaggattcataatctcatatattcatatattctcaagctggatagttgcctattttggtttcactcctttctcatttagaaaaacaaaaggggacagctcaccatcagcactcatttaatttttacataaacattctttgaggtagaagcaaatctgactttcaatatgaaaatacaatataaaaactgctcttagggttatttctaatcagaacaaacatcagaattatatgagtcatcagaatcatctgttttggaaaaatcggattcttccaatgaatcttcagccaatagcagttccctaatgatgttagcatcatgagtagaaatcctatgttttccaggatttgaaattttcagcgatcaagaatcactatatttttgtaaatgaaaataccactagtagaaatagaatgctgtaaatagaatgatgtcttttgtttccgaagtgaatatgctagagcaatgtgtaaataataataaaagcaagatattttcacaaagttatctcagggtaaatgctgtagctgcaagcatcagtggagagtattcttggggcatatgggaaaatgcttaacaaggggagaagtcagagcagagggaatctatctcttcacactactattgccttttctctgaaatcttcccacaagcttcctagccaacatcgcatcttgtttgataaccataactgaactcatgcccacctgtttcgtgaaatcaggattttcaatacttatcttcacataagtatgtgaagtgtgcttgcatgtgttaacaagaagaggacagggaatagaaaatgtgtatttggtaattaagcacatttgtagggtatcttccaccacaccactcagattgttacctgcttgctcaaaatctttagtaactcctgtagcaactcaattcttgcctcctcaatggaaataattctgctgaggggcataagatagagactgaggcaagttttgcagcgggagtgaaagtttattaaaagattttagagcagaaacaaaaagaaatatacttggaagagggccaagtaggtgacttgagagatccgagtattccatctgactcttgtcttggggtttttacatattgtctttgttctgaggtttgcatttcttttccccaggttcttcctttggagtgggctgttcacatactcagtggcctgccagcacttgggaggggccacaagtgcagtgtgtttactgaagttacatgcatgctcacaagagctgtttttctcttacctgttcagtgttcctagaggtaggtcagataccagtcaaaccccgccattttgcctcttagtgtgcatgcttgagcccactcgctcaactcctgagatctttttgggaagctgctgatcactgttaggcatgtctgtataagagaccgcctgagcaggcttagtgtgagcagcaaggctctttattcacttgggcgcaagtgggctgagtctgagaaaggagtcagtaaagggtggtgggattatcattggttcttacaggtttggcataggcggtggagtcaggagcaattttttgcgggcaggggatggatgttacaaagtacattctcaagggctgggagaatgttacaaagtacattcacaagggcggggagggtgtattgtcacaagagcggggaggaatgttacaaaatacattcacaaggatgggaatatcacaaagtacattatcagaaaggcgggggaatgtcataatggcttgacgatggtgcggccagctcagaggaccttaaaatcaccaccagcttcacgtgttttctatgtatcgggagactgcctttttttttggcactgtctacaaccaactattattttagagagacagtgtgataacggcctgaccatcttctgatggttgcctgacattcctgggggtgaattggagctctcttgccttgctcatggctgcctacctactctaacaccagcaacctttaaataagacccgtgcatcttataattcttatgcctctgtaaatttacttcatctcctgttactattttctttagtaatcctttatatgtaatggcttttgcatggtaaaccacttgagggttaggatcaccattccctctaaaagctacctctgtgtaagctatttgttgagtgaatatattaatttggttcactttatgtttttttgtacttcttttctactttgtgccttttcttctttctgttcttcttacagaagtctgttaatgttgtttctaagctctatttctcactcaataggagtatttttctgagttcaagaggaacattaatgttcttaagcaagacgctgataaacaaacgtttgaaaggtcattcttcctttgagaatagagtaattaggtaccatttcaaccaaattgctttttaagctgaaaaagttaggatctagctttcactgaagaatagcttttctagcaccaataataaaggcataaaagtgtactttaagaaatctcagtatgtataaaccctgagttataataaaagaaaagctttaaatattcaaatttacttttttattttgtaaaactaatctgaaagggttccttcagatagcaaatatttacattggatctgttttccacttaactgagctggtacagagttgatctaggaataaacctgtgaagtcaaatcaccttgcgtttgaactcttcctcttttctaatactgttgcttcctaaccggtcacttaattgacagcccaatctctcattaataacaatatcactataaagactgatgctaataatgaaatcattattgtacatttaccaaacaaagggcactaggcaaagcactttatatattacttcttctcatactactaggtcattgtgaggttgttaacatcattcatttgggggttattgagacatttgcttgaggccacacagtaaatggcagaatttgggtaagcctggccccaaaacccaaagcctggccccagaatccaagctactatggtatttattttttctaattaaaagagagtgtttacacttaacttcaaagtccctatgaggatcaatttagatattacataattgcactatataatctgtacaatattttacaaatgtaaggtgttactatcagtaaattttaaatatattttatgcatgatcacattttcacctttagaacaatcatataaaattataatacttaacaaggaatttcttctatcaagtaaatatttcaattgcttatgtaaaatgtggatgaaatttaacataatattataaaaattatattttgaatcatctgattataatcaaacattttatatataaaaagcacacctcatatctctaccaagtgcatggtatgctaaagaagtaagctttttattagctcaaagtcttgtttagattaaatgcctttatgttcatgagtttcataatatgctttctccccacaaataatttaaaattttatgtatgaattcagtaaaaatttattcaacacctactaggtgccaagaactggttgaaataaaatctgagagtcttcctcaaaagagttaaggaaagataaaaagttcctttctggttgaaaatttataatgttgttaaaagccatataaaattttttgttcatagaaattttagaacacattcataaattcacaattttagtagacattcaatttacccatttaaactttttttattagtttcctgtgtgctgatacattaatgtgtgattcagtggctggatccatatttccagccatttccaagcgggctttagggatgggaaattcagtgcagtgtactgctattttatgaaatattgcatgattatataattatcttgtcttacttcagaatcaaagcttctttcagctaaaagagccctatgtgactgaaggaaatgtagagggatgagactgggtatacatagcagtagttgattccagtgaaaaatagtttttcttgaggttagaagctgatcaaaaacagccatcagataatctttgtgtattaaaagaaaaaaaataactcacacactacatttctgataatgtagattttaacattggaatgaagcaatgtgggcataattcttgttccattgctccagtaagagaactcagttaagataggcacccataaacttctagtgagatagtgaaacactaaacaaaatctagatctcttgtatgctcttgtgtattgtaaaactactatgtcaggatctttctgatatttcattacactactccaagctcattaacatatgagcttctctttaaatgattaatccttttttatttgatttgttatgtttttacctttaataatcacatgtattagttttacaggaaaaccagtttctttcctgaaagaaaagagaaaaaaatgcatttataaattaaaaattttgttttctcctcacagacatcattggtataccaggcagagatcctagacatcaagaaggcaccagttacaattatatttatttgtcagatgccttattaaaacagtactaactctgctggccatgaagttttatctatttgggatgctcatcatgataagttgaaatatcactgatgtatttaaaatgagaaaatgcagaaaaactattgttggaggtgatatcccattaatttaagaaaataaataattatttctgaattgtagatactgaagcaatctaatgaaaaaatagtttcttcaattctgcagctatattgagagtgacttaaaaattttgtgtttctcataagagtttgacattttttactaccaatgaggattatcactgagcggtttactgacttgctttttttttttttcttttttatcaaaacgtccagttcagtgaaggtgaaagtaacattagtattttccccagattactccaatattagaccaccacaattttcagtgatttagcgtatctttttctatttgcgtaatgcttacatgtctggcaatatatttacctaattatagatttttaaatttacaataaaccgatatgcatatgctgcaaaatatgtcttaggttttgctggatcagattaaaatattttgtggaactaggttttccaagtaaattccttgtagttcagtaatagtaaatttaccatgcttaaaattaatataattagtatagtatttggtactcttaaaatagctcaaattatatgcattattagtgtaatgcaaaagaaaatgtgtgtgagaaagagagaatgaataaacaattgtaagtttgtttcattagaatttttttctgagggagggggaggttgccagcatgtgttagaagtcctcagataatatatggagaaaaaactgataggtgtattcattcaacaagcatttattgagctccaactataagctaggtcctattctggatactgggtatggagagttgaattttttttaaaaaaaaacgttcctagcatcctgggctttgtgtgatatgagttactatatggctaagctttcccacaaaaagtttccaaacatacatttataagagttccctagtctatagagccagagatgtataaagtggagattatccaaatgttagaacaacaagatatttcatattttgaacctggagtttaagtttgagttctgtggctaatttaggagcaaattatggcctaatataaggtagtgcattaacttcaaattctaaggaggcagggagcaagctataattatgtgcccttttgacctaaggacatcttagtttatacaattgctaagaatacaaaatatggacatatttggatgaaaaacgagggaaacaacaggattcctatcaacccataggaatcttgatctcaaacacttccattacatttgcatttcaggagtaaagtaaaagcaattttaaactgagtttaaattatcatattggacctcacacctggaccagactgtgtctgcaccaattcaaggagatgaaacacaatattctaataaaccttaagcaacttgagtcgcaattaagcaattggtgctaaacacattcaatttgaaatgcataagatgaaacagactatttttttctcaatactcaccaacttgccatatatccttgaattttgaaaattatccaagctgactccattcttgtataaacagaacaataacctttatttgttatcattatagtattctgattgtaagcactgcttgcctgagttttgtgccaacatgtatcctgatggaaatgccttaaagggcatccttctgatttatagacaacggataaaagaacttgcagtggccttgtcaatttcttaagaggcagttaattagtatcctcctgtttggtgaatttaacctttaatagttagctgaaatgtgtcctccaataatttccaacagtgaaattattaccctataaactcaaaacaattattgaccaatcagttaataaaatgaattttcagaattgcaggtaaaactacttttcttagtccaacaaaagttttgttcacttactctccagtggccacagaaatatgctccctttatataccttggtaaacttgcctttgtacagattatttaaaattaacaactaaagaggtgtaataagagcctcagtgagatttgtttgctttataaactcagaacaggttatagaagggcagcctttgacaaaaggaaaatcccattggagtttaggtgcagagcatttccattcctgttttatactgaaagttacttttttttttttaatcctctttagcttgcttatacctgatacagcatagagaaaagtgggtcagcttaaagctagtagctttactttgtcaagagaggacttatatgcatgaaagcattttcctttctatgaatgtataccgggtactaatgatttaaaaattgcttttatatttgtcactaaaaagacctctaaaatcaaagttgttacatgatggaagtgcctaatatttacttttgatataagatgacttttaaataagtgtctgattcttttttccttctcaaatgcaaataaataaataataaataacagttgagtagctatttataatatctttcttatttaaatacattctaaactcttagtatagaacaaggagattagtgcttggacagttgtcaaaaagctcaactaatcgtgtatctccttcagagatgtaaatgcttctgttgcatatcccttaagaaatgtttattaaattttgagtggctgttgttttacaagctttaaattgcttattataggtactgctatcagctagagatgtggatgagctcctttattgacccttgaacacctttcaacattggataaattgggcaaatataattaaatacctaatattaatgacatatcattcaatcagtcaaaatacatttatcaggtacttaccatgtgctgacagagctacaaagtatcaaacaagtggtttctgtcttccaagacctcatggtctatagacaatgatccttcctttgttcatctattaaatttcaaataatccgttctctctttacagacctataattcattagttataaatcattaaaggatcttttaaaatcatttaatcaattggccgtttgcttttaccctttttctccagggatcctgtgattcaggatcacactagtcccttttctttccaaatggctgagttcatatacatttatgaaatattaaatacagatttttgcaaaactggggaatatcttaaatattttatttttttagagacaagatcttgctctgtccccaggatggagcacagtgactcaatcatagctcactgtaggctggaattccttgactcaagccatccttccgcctcagtctctggagtagctggtactgcaagtgcaccaccccgcctggctaatcaaacattttataaaacaaatgggcattaagataatcccaaaagagtgtggtatgcaggacttccaaaatgtatttcactttggaaactttattttacttattttgacagaaatctcttcgggaattcaatattttattattattttttcttttgacaagaatgtcaagtggctcatccacctgtaggaatagttgagaatgaaaatttggagactgaaaggaatttctttttgtactttgaagcaggtttaatccttgtcctttttctctgtgtttctaagtctttttcttttgtcttcgtgattaatcagagttcaaaaagaaagctctccacctagtctctctcagtctagattccctttagatgactattttatcttccttgctttgtccttttgttaaggcctcaaactcttttgttacttttaaccctttatttatattcattgggacatcattttatttccaacttttattgaagcctaaccttcctctaatgcttacccccctttttattgtttgtaaagagacagttcggtctcttgtgaattttagcattagcaaatgtatgctttaccttggttctcattagtgtttatggaatattgaactgacaacacttaggttatgactcttccttatctgcccccaaggaaacacagtgtatcattctttcaaaagcaaggcttactgatttgcaagtggttactttcatttttagaagtatttggcctggcctttagagtccctttctacccttagggcttcaaaacattgtggataactttagtatcctctgaatgttccattctgaactctgaagactttcaaattccagtggtctttgattctattctattgattaactcatttaaagagctacattctataattgctctctctgtaagatctttaatttttaagtttaactctccttccaaaacatattatctcaacctaatctattagcatttaatgtgctcttcaacctgactacaaacctatctcatttatttgctatatggaagttaattgcatttatttttaaaatatataaattggagggaaccttctggtcaaatgaattttaaaatgtgtagataagatatataagttttgattctgcagtcattcccgtaataataacaggaataatgttctgatgttacgttaataagtaagatggggatctaatgtgaaaaatgtcccaactttcaaaatatttttgagaacaaagcatttttaaaaacattaaaagaaaaaccaaaacattttacctccattatgtctcaggattagagattcacacccactatgctttggtaatttgggtgatattttctaatctctgattatatctccatatctaagacctctacctgattttgcttccaatttgctgtgtctgcttcataaatcagtcattttacctgcgctctcagcaactactttatttccttcttgttctcttctctacatatggcttattccaaaccatttcttactgcatttctacttctaggctgctgcatgctgatggaattcagaacatgataccccaaaatatggcatcttaacatttgagaaaaatagcagaagcagaaaggtcattctctgaccttctcccatgaaatgggtcataagattcttgtctgagaagtcccttccctatccttggaagaaaggaacgtccttatgtctgaagacacaaggacacagaggaaactgaacaaacaacccttgataaattccccccaatttattcccattagatcttatcctttttgtccaatcatacttcacaactatttacttcatcaaatgtagcgtaaaaatacacaggtttctctatttctttgagtcttcatttctgaaggtgtctgtgtcaggtaaaactcatattaaataaatatgattttcccttgttgacctcttttattacatatgtctcagccataaatctagtgaggaatgaataaaggtttcctcccctacaatgttatcgaagaaaataacatagtatttattaatttattaaaatttatgattatcagacactgcttgggcccccaatatcacttggtaaattcttttgttttatttcccttccttgtcctctctccctggtggctattctgtgaggttccaatcgtcttttgactttttcaaattttgctgaaatatgtatctctaatatgatcaagaacattcgtgtattcagacattaactctttaacttacttttatttcacctcaaatccatcattttctaactttattactacttccttcccaattttatgacagaggatgattttttttattttttatttttttgagattaagtctcgctgttgtccgccaggctggtgtgcgatggcgcgatctcagcttactacaacctccacagcctggggtcaagtgaatctcctgcctcagccccccccgagtagctgggattacaggtgcctgccacaagtcctggctagtttttgtatttttagtagagacagggtttcaccatattggtcaggctggacttgaactcctgacctcaggcgatccacacgcctcagcctcccaaagtgctgggattacaggcatgagccaccatgcacgacctgacagaagacgatccttttcgtcaagtatagcctcatcagttttggattattcactctattctttctcatttttctagatttttggtccatctattatctttgatgttttccttattttccagaaccttctaatcttaactactactttcttaaacaataattaccttcttaaattttataaatttgctttgcacattttaaatatgtaatttatagtattttcttataaaataatttaatttttttaaaaatttgaaatacatgcaaaaaaacccaaacaactaaactgcctgtttaaaaaaaaaaaaaaaaaaaaaactgcctgaaattctgctacctagggtattactattttggtataaatctagatattttatgcatatgttgtatttttttaaattaagctaattctgtaccaaatactttgtaacactctcttctaaaatgtgttttttattccttccccatgtatttctttaaagtacagtgtgtgaccactgtctttgctctcagatatcccatctactattcagaaaactatgttcaatcttccatctctattagttgataaaaacttcttacactgagtttaccaccatccttttaaatattactattcagatgatgaataagtttatggccttgattgtggcaatgacgtaatggtgtatacttctctccaaactcatcaagttgtatatgttgaatttatgtagctttgtatatgccaaatcatacctcaataaagtggtttaaaggaaccccaaaacactagcatccttttctcagtcctcatggccctttcattcctgaagactttgctatttttaggtttttcatgaagtcctttccgactttaccttccaaattcagctttctactagttcttgcctacctttttgaatgcaatttttgcttgttttttcttcttttatgtgctttggttcctcattttactccacacatttatcaggctacaggttttgtacctctcttcatttcttccaactgaaaagtccctccctgagaattctcatctactttcttagctttagctgtcagcaaatgcttagtttcttcaaatttacatgactatttttcaattttctcctgaacatcagagccatcatttcaacctcctcccggatatttcttcccgtaatttcattgattcctcagacagcacatatctaaaattgagctgtcttctatgcaaaccttgaatccttttcagtactctatccatgataggcaccatggaattttatcttactctccctgcaactggattaagaagtattagcaagtttatcttcaaaacgtttctcagatatcccagcctccttttcttcttcttctttcaactgaggaaaggatttgtgtttcagaaacaaaacttagtatccatttggggatcctctttaaaaatacagcctctgtttggaagtgaatatttgattagaatgaacaaagaaatcacaataaattgcatattaaaaaaactgaaaaataccttaaaatttagaagaatctttttcttaatataattctgtaattctatatattttcttttttcttgtgacggtggtgcatagtcattgatatattcttcacatagaaacaatcctgtgatagtttctgtagagagactagaaatgtactttttattttttctagtatatttggatcattttgttatgtcagtggcaattttacctactgtttagtctggaactcccagacattgtcagaagaagatgtgtcagatgtggtaagacatgatctgatacaataggatacaataggaaacataaaccatgcaacttcatacacaggtgtatttgcagtttgaagtactgctggaggtttttgtcctaccacaaagaaatactaatcaaatctattttattttatttccatcaaaaataagaaaaaggttaatgacatgtttataattgtatatgcttcattatctagcatgtatactcccttttgacgtccctttttgactaagtatcaatgataacacaatactatgcttatactttatttgtttcatgaatacgaattttcctcagacttgtttttggttccttaaatacaaaccttgtttttttccactatccaaatgcttccttggctgggtggcaatggccctcaatattgtgatcagatctctagccctataacagtatttcaaagctgggtgagttaatatctggtgatagtattcctaaaaactttccctacaatgggatagttaggtcccactattctaaaactcaatataccccactatttccaaattaaatatattctcaaatatttctctatccagatctccaaatacatgtggcctttccaacaccataggacaggagcaaaagtgtgacagattggaagacaaagtagaaagagacaggagccttaactatacatagttaaagtattctcacgttttaaaccatatatgatcatgtgaagcccacgcaagggctcctcccaggggcttgggagtggcctgtgccagtgagcacattgaagctcaagctgttggttttaaggtgaagctacctctgctctttccactccctcattcatttagacctgtgatatttctggtttagatgattgcagcatcttctaaactgttatcttccccttttaggttctcttcccttcaatttattctaatttagcactgccagtaaagttatcttttaaaacaccattctagtcaggttggcagtttagcagaagagataagacctttagagagatactcagtttgagttacttactacaggtttgattccagacagaatatttatcttctctaagccatggttttattatctgtaaaattgagaacatagtaattcttatatttcagggctcttttgaagatcagattaaatctcacatgtgaaatagtcgacaaacaatgttagtcatgattatcatcaagactcatctctttaaagagtctaaattctccttgtttgattagcttatcgttcagtatccctcacttacctctctatttttgtcatctacatataccccccatgccttctctgctctagccacattgatacactcacttttgcctctgccaccagtaccccaaataccataaatcgttaagtctccatacctttcactatattactcatgttttttcaaatacccactcatttgccttgcaaaaatctaagcatcctttaaggcctagtccttatgtcatttcttggtaacaccttccatggtcaacatgggcataattaatgggactgtaatttgtactttttggaacaccatatatatatatgtatatgtacgtgtatatatatatatatacacacacacacatatgtatatatacatgtatatatatatatacatgtacatatatacattcattgtattgttttaatagatgtttatctgtctaactctcttgatgagctctgaacacctgagggaaggacaagtgccaaacacgtattttttaacctagcttaatgcctcgcgtaggacaaaagatcaatacatgttggtggaatcagattaagtctttttatttcttactccttttgattattcttcagctctttgatactcttatattttaggaagtagtgggttgaatttcataaactatttccagtaccatacaactaaaagtcccattttatcctcaaaactttttaattttaatattgttactattttatactttttgtccatttattaaagttaactggaatttgggatttaatctaatggaaaccaagtaggaactacacagaaggaagaacaaataagatactttttaccattacatttttttttctaaaataatatattctgagctgaatttgaaacctttgaaaatactgaataaaaaatttttcccgcttgattcacgtttaggatatatataataggagtaaatttctgaataaataatttatgctttttactaacagagataatctttcttaacagcataaaataaatttaggaaacacatgttgacagacgtacatatctatctgtccgtccatccatccatttgtctatctacttatattgataacatatacatatgtgtgggcattttaatacatttacttctactttgctgctgataatagaagatcatgagtttgaccaagtaggagttttacttttgtttctggatatgaaaaaagattatgtcttcgtaattggaagaaaacaaaacaactcagagaaatggatcaaatggcacgttttatagatacatccattttattcatagtaaagctatgggatgataaaatttccattcaattggcatctatcaacttatgataatagcaatttttgtgaatataggagactaaaaataattttgtcatggcaaaataatggaatttcaggtcctgtattttagtaaacaaatagtaatcaaccatctaggtatggtacaattcacatccatatccattcacacacagtatccagaagttacaaggtcatttttgtgcctacaataaatgggccaattttgccatttaaatttggtatatgctctcagaggtgttgattattcaaaatacctgtttgcccaagtctattaagcttaaaaactccattttaataccccttaaatttagaccatgtttatatgacaaatgtttcagagttacttataaacaccattaaatttcatcactaattacaaataacaggattgaaattaacacctgtcccagctgctttagattttggattgctcttaataaacagttgagaaaatcctctgttgctaaacatttactggggccatttgcattctgattttcaatgagctattatgatttatactctcatatagtcatctgaaaatagcacagagcttgaagccactgagtgtacttcctcatttgaatttgaagcaatgtatgtaatatcttacattttaaaatcagttttcagtgtgagacataaatttatctcctaaaattgttctattttttcctccagggctactaggagaagaatgccagtggggtaaatgggaattttcacacatacaaaaattgaacatcattaggttacactaatgtacaaaaaaagagtgctataagtcttaatgatcacttaaaatgaaaaagctcttaaagatagatgaaactctcgcttccttctacccttcctttgtggcccttggcctgcactataggtgctggcagagttttcaaatgaaataagacagttaaattggcaagtggttcagtgctacctgaaacagcattaaataacatgcagtactaatattaacaggaactgtggatttggaaaagtttcacactcactgagggaagggtggtcatcttgctgccacactgaaaagctgtgaaaaaaataaagagtaatgtgatttttttaaaaagtgtcagaaaatctcactggcctccaaatcatgggataaaacattttttttaatccttggagtcccattcgattataatatttaaaatgataagacttaagtttttatttgctttaggacttcaggacaacagaactctagatgcagtgctctaattattcaaatatgtgtccttagtagacataaaaaaaaattcaaggtacatcaagatgcattttaaaataaagcttctaagcataagaaaattcttacaagataaccagaagatggcagcatggctgctatttagaaattggatagcttataacttcccataagcaaaaaatgatttctcgatttttgtaaatagtatactatttccaatcaaaaaaagtctcaatataggaaacataattaaaaggaaagactgttggtaagatctaaatgatagcttgaccaaaacaaaattacaaagaaacaaaaatggattcttcctccctgcaaataatgtaaaagaaagatgaaaggaagaaagacagagaatgccaaggctcttaaaaatgtgctttcagaacatgttaaataagcttgatagagaaacttatcatcaggggtgatagaacccattataagaaagagactcttttatgattccacacaagatgagccctgatattgaaataaccaattaattccatctaggccattagaaaagaattaaaggtcgttattataattgcacaggttcaaaacaaacttcttacatttaccatcttttaaagtctatttcagcttaaaaaaaacatgattctatgatcttatgaatttcttaaagaacaaacgtgtgcagttaacaaataattccagaacacctttttcatttttaaaggtataatccgattttagctaacacaattaactgaggatataactaaactaaaatcttttaaaaccagctgagaatccccttaatgatggctatatgcagcataacaaaaagacagtgggaaaaaatattttatagttcctaaaaaaaatctgtaacaaaattttactagagtagaaattttaaggaaaatcctttaatgcattctactataagctgttaaaacacagtgcatttatctattacgttttctggttcattatatatatttatgatatgtactgaaccatctgtcttccaagatgccataggacctgttcaaactgaactagttaccatacttgttataaggctagtttgggtttttacatgtacttgtatattagtgtagatccattcatttattcaaaatatatttattgcctattgtcatacttggtcccattctaggcaactactgaaacacattacaagttttgaagagattcattagacaattttaatatgaaaatagccaaaaatataagaactgaatttgacagacaaacatttgtgtgaatgtctaatttcaagctaacataattattgatatacattaagtccttgttatttttctttgttatggatttaataattgatcaaaacttatatttatacctattaaactagtattgagttcataggaagaaaatatctataaatgagattgtttaattagcaacagaataacttacaaaacatttgagataaagccactgaaatcaggcagaagggaattgatttattctcctctccacctgcagtgggcagcaaagccttagttaggttttaagatttcatagagaaaacaataagcagggaagcaaaccaactggtgacacagtggacaggtgtcattctcaagcccctggggaaggtggctttcagcggcaggaaacaaattagatgatgaggaggataaacattttataaaattctttgccatattttttctcatttaagaaaaattgtccaatgtccaagacaatacatcaagaaaacaaaacaaacattcactttttaaggctatgaaactcgagacttgggtacattaaatctgaggatggagagctaacgaatagtacagtctagattcccagccagatattcccacctctacattaaaattagaggaaattgggaccagattagaaagaggttctggcctgctaagatcatctttgatcccatgaagttaagaaattatgtgtgttcttttagttgtttcacaaagataaataaaatatttgctcaaatgattaacctctgtttttgaagacctgaatataattgaagttcatccagagaatttatgagagatttcagtagctacaatgtttaccttaagtttgatttgcacttgtcctgataaattacgactcgatttaatttttttttttttttttttttttttttttgagacagagtttggctctgttgcccaggctggagtgcagtggcgcaatctcggctcactgcaagctctgcctcccaggttcacgccattctccttcctcagcctcctgtgtagctgggactacaggcgcccaccaccacgcccagctaagtttttgtatttttagtagggacggggtttcatcgtgttagccaggatagtcttgatctcctgatctcctgatccgcccgcctcggcctcccaaagtgctgggattacaggcgtgagccaccgcacctggccgatttaaaagttttaatcacctagggaatatgtcgattatctccccctcagtagagtgtcttggcctgtgaacagggaaaaatagtgcagaataaaatattttggagcaagtaatttattgtttgagtttatttatattctgtgaacttcttatgtgacatccagtgcacttcccaagcttgaatagttacgcactgaaaatctcatacgctacgggaacttgcctataggccaaggcattccgcttgatgatgcttaccttggatgtatattaatgctttctccaccaaagttagagcctggtttctgaaacgttttaacatgtaattcctatttagaaaaatatataggcatacaaatataaatatcaactcaaagtagactacaataaatactatgtatggaaaggcaaaaaatgttataagatccctccagatgtccatgtagccagccagaaaatatttaaacatgtataatgtgtcaggtaggctgataggtgatgaaatatagacataaacttaatgaaggactttgaatcaatttttgaaagtgttagagaggcaccggaaacttgtgagtaaagcgataactaaagcagagggttcttttagttgtttccactttagatctaattttgaccctagatgaagaccatgaaagaagagttagatagttgtttaaacacttcactgattattgcatgtcaacttcatgcagaaaaaaaaaatattctttaaaatatggccagatttggttatcacatttcctaaaatgttataaccacctggagctcacctggtggctatttgggcttttctttttacttctccccctttaaacatttttttcttttgtatcagattaatattatatactgtgtctacgggatttaaataaaatccattaccaccccttagaaagctgttttagttttcttttttttttctttcttttttttttttttgagacggagcttctcactgttgcccaggctggagtgccgtggcccgatctcggctcactgcaagctctgcctcccgggttcatgccattctcctgcctcagcctccccagcagctgggactacaggcgcctgccaccatgcccgggtaatttttttgtatttttagtagggacggggtttcaccgtgttagtcaggatggtctcgatctcctgacttcgtgatccacccacctcggcctcccaaagtgctgggattacaggtgtgagtcaccgcgcccggccagagagctatttttatatcttttttcatggcatccttttgtgaaagaaaatttgactaggagcttgtcctctgtacattcatatgtgtataaaacaataaaaggaaagaaacatttttagaaaaattataacttcatgatttatttgtatttcccaagtgtctactgattgtaaaagtggtatacaggctgggcgcgatggctcacgcctgtaatcccagcactttgggaggccgaggtggggtggatcaccttaagtcgggagtttgaggccagcctggtcaaaatggcaaaatcctgtctttactaaaaacacaaaaaattagccaggcatggtggcaggcgcctgtagtcccagctacttaggaggctaaggcaggagaatctcttgaacctgggaggtggaggttgcagtgagccgagatcacgccattgcactccagcctgggagacagagcaagacactgtctcaaataataataataataataataataaataaaaaattgatatacgttgttcagattcaaatttttctactgtttgtcatttcttttgtgtctttaatctttctcaggtctctgaccttttgtagtagcattattttatcctcttttcctttatccaccttattgggtgtcccaaatcccttttacctggtatgtttttctccattcctcaatcttctttttctttttctgaaatcttattttacccttcctttgctttatgaaatgatgtatttaggagagtatattagttaaactgtgacaaaagaaaattgacagaaaaaaagtaacattaattaaattttggactgtaaaggatttggccttttttttttttttttacatagttgacataaacacttcctgaatcttgatacatatttgtcaatgcgttatatgtcatcatatatcataaaccaattggacctttacctggaagctgacaaagattttgagcttggtgaggtagcactctctaccacccaactattttactactgagagtgtcactgttgtgtagtactgtttgttcttttttttttaatgaaatattttataaaatctagttaaatgagaaataaaattgatttttaaacatttttatgtattttttttttattaaattgagatggaatttcactctgtcgcccaggctggagtgtagtggtgcgatctcagatcactgcaacctccgctgcccgggttcaagcaattatcatgcttcagacttccaagtagttgggacttcaggcgcacaccaccacacaagctaatttttttgaatctttagtagagatggggtttcgcccttttggccaggctggtctcaaaactcctgatccacctgcctcggcctcccaaagtgctgggaagacagatgtaagccactgtgcccagccaattttataagtaaaaatatgaagttaataaaaattagtattaagatgggaatctctagagtgcaacttacctgcaagtgatttttttttattatactttaagttctagggtacatgtgcacaacatgcaggtttgttacgtatgtgtacatgtgccatgttggtgtgctgcacccattaactgatcatttacattagtgtggcgattcctcaaggatcgagatctagaaataccatttgacccagccacctgcaagtgattttaaagtactcctcgtcttgcttctaccagcaagggaatgtccactgtgatttacttctgtgcctataacattctgttgtgtttctcacatgctgttttcagtattagcatttatggtacaaaatgctgattatgtggtaatttattttactcttatgcttatatgacctcataccattatatacaaatctattacagtaaaattcttcaggttcttgatactctctcgatgctaataaagttttccaccatgaatataaccatgaaatgcatgcaaatgtatcaataattctcaaaatagttttaacttataatgggttagagtaggcatagaagatgtaaatttttctagttttcattagtttatgcaggtaaatgtaatcatcttacagctgcttcagtgcatggcaaataatggcaatcaataaatgcttgtcttgaatttgatgaaatactctaatagacatgaaaaatttttaggttaggtaaatataataatagaaaacaggcttaggccattggtttgtattattgataatgaaatatggagaagtaatatattctcatcattgtatttggagaaaaaaccaggatagtgaataattataacattagcaaagtggtaataaataacttagtggttacaaagaaaatgttggagcatgttgccttcatttcatcatgacctacttgaagcattggctttgaattttttttgaataattattgactagcaggaattgtgcaaaaatggtaccttttgtatgtaccccatatccagcttcccctaatgttaacaactgacatagccattgtaaaatttatttgtacaattgtataattaacactggtactataatattaattaatatgagacattattggaattttactagtttttcaacaaatattctttttctgttccagcacccaaattactatgtcgaattgcatttaaatgctccatttccttagtttctgctgatctgtgaccattgctaaatctctctttatctttcattatcttgaaacattttatgagtaccatttagttgttttgcggaatgcctctcactttggtttatgtaatatttatgaatgattagactaaggttctgaattttgggcataaagactacagaaactatgttgtgtccttttcagtacatcatatcaaggtacatgataatgatatatactttgtctatgagaaagtagcatgtactaggtttttccaccataaatttagtgtttttcccttcatagctaataaatatactgtaggagatactgtgagattatgcaaatatcctgcttcacccagtaattttggtatcccttgcgaatcttgcctgcaataattactactgtagtgtttcctgaatggcaattttgtatttttctgatcctttctatatttattatacaataagatttttgttacttaaaatagtatttgccatcaatattgagcagaaacaaaaatatacaatttcatatttttgttcctacttattttataaaacttttctttcattctttctaaagactctagctaggttggactagagttttttttttccaaaacatgtttttagctaaaccgtgttggtgaaagcagttatattcacccaaaccctgtacatagcaaaccctgctcaaaccatatacaatttgttgataaaatgtaggagagattatatgtgtgtataggtgtgtgcgtgtgtgtgtgtatatatataatatataatacattattaagacatcatacatatatctaatatatgttttatgatatagatataaacatatatatatctatatatacacacacacataaaattttaaatgctggtaataaacatggacaatatattttgacactggacttcacttcagattttaagctagcacagttccactaatgaacaaatactttgtaattgctttgagtgagtcagtatggtctgctaggttattgatctgctaatttaaaaaatcttgaaataagatgtaccttgatggcttaatggatttgactttagagctcccttatggaagtttaccatggctttggaaggaaatttgtgaaacaggaaaaagaaagtagtaaaataagttgtagttctagaatgtgagattagaatgacttaaaataatatctttttccttcagtataattgtggatgctgtggttgaaagcttatttattgtaaataagccataaaaagcttgcaaggttaaataaaaattacgtcactagatttttttcttaatattcactttaaaattttccatagtaaattccaagtatttctctgatttatgaatgctttgcagttgggaagaatatcttttagatatgttagctttatcctttgtacagctcttcctaaactatgacccttaaaactatgcattatatgtcaaagaataatttaaaaaatacttttataaacattaacagcaaatatggctttgcttatcttataggaaatctttcgcacttgtgttagctttctgtaaatctgtctgacgacatattgatgcaaattacattttcatgttttgtgacttctgcagttattgttcagctttatcatgactcaccaagaattttttccccactatttaaaatcactaatggatttgcagctaacctatggctttagtctctggcagttgccttcagtatcacttgcgtatgcactgagctgataagtactgtggttcattttactcttgagcaaaccaagtttaattaaaaaaaaaaaaaaaaaacgaagcaggagagaaaaacagatgaataattaccttagcctgggataaaggtggtgaaaaatcacttgattgctttctaatctttggcaagatatattaaaataaggcttgggaggggaggaactggcaaaagaaggtagaggagacaacaaggggtacaaagtagcgttcttgtgctctttattatgacttccttggatttctccaactgtattttattctgtattatcagtttgataaaattataattaaaatgtacatcttggtttaattatagatctcttcccacatcagtggctattcctcagtattcccagtgccatcgtttcacattacattttaatttgtaagttcatcaggaagaacagtgtaccccagcatataaaggattacttgtcatgattcagtaggctaacaaagcttttgttgaaaagagaagtctaatgaaaagaaagattctacttctcctagtccaattattagctcagatatttcatgcaagaaagaaattggaaattttcctcactgcactgtataatacgctcactttaaaaccttggtaaaaaaatatacaaatgcacatctcctataatggggaaaatcatttgaggatagcaaatatgcacagaatcaaaaacaaacagctttacttttctaaataaactttaagaattactgttgcgtgggagaaaagtttcaacattagtctttttttaattgtcaaggaatgaaaatcactgataatcttggaagaatttaaacaagataattaaacatacatataaaggcagaataataaattccatgatgatttggttactttcatgtatttagattatatgacttcataatttgggcttatctatccagatatcttaaaatacaaaataagtcagtcaacatgtatttataaagtactggaagaatagcattagacaaattccaaggaagcagatgtatccaatcacaaaacagtaagatgaactttcgttttgtgggtttcctgagtattcagaataccatgctgatttcaaatttcgataacttgttatacactggagttttattataataactgtgaggacttgagagaatgttataattaagaaggtcccacataaccttttgtttccttcttttgtcttccacataaataactcagagctatctatactcattgcaataatttttccccaggaacagcatggttaagtcaaaggattactgggcagggagttcaaagttgagggagtccagttttatgtttcttaatttatcacaacctagggtttcctcatctgttaaatgtttagaaaatattctttcctcagttaatcagttggtaacatacctcaattagtctatgattctcaataatcatttaaagatgcaaatgtgttcctccaattgacagactgtcaatcaatgaacaatcatagcaatagacattgtgattagtaactttaaggggttaggaattcttagaaaatcttaatctcatcggcattttaaattataatttaaattaggacttagaggtacctgtaagacagtatatcttatgacatccagggagtgtttactgagatactgaccatgttcatgcatacatatacacactgtgttgagatgactgtaggatattatgaaaatttctggaaaaagaaaccaagcaaccaccgggagtcaaagaatacttctggagaaaggtatcaaaattgagtccaaaggccgggtgcggtggctcacgcctgtaatcccagcactttgggaggctgagacggcagatcataaggtcaggagatcgagaccatcctggttaacacggtgaaaccccacctctactaaaaatacataaaattagccgggcgtggtagtgggcgcctgtagtcccagctacttgggaggctgaggcaggagaatggcgtgaactcgggaggcggagcttgcagcgagccgagattgcgccactgcactccagcctgggcgacagagcgagactccgtctaaaaaaaaaaaaaatatgagtccagacaaaaaatgttagtcaaaagataatagagggagatgggacttagcaaatcggattgtgtaaaaacctactggatagagagagaatagtcttttcgagaaagttgtaaagttcattaaggctaaactccaaaagtttcagcataattcagggaaaggaaacacttgttgagcacctactgtatttcagtgtgcttggtgcttcagacttcctgtgttacatgccttcacatgtcttcaaatagccacacctgatacttcaattaggcaactgtatattattggtcaattagatcttactgatttgattaaatttgactagatttccttcttccaatgtcaccgttgtctttctttttttcccattacatagcatttaacttgagcatttttgcgtatttttatcgaatgtttataaaatcatatatactattaaattattttaaattacttgtgtatttttagaacagtgttagatgtacaaaatattgagtttataacaaggaattccctcttcccactgtcagttaaacccattattgacatctttactttgatatatttgttacccctgatgaaccactgttgctgcattattattaactgaattccatagcttacatctgggctcactgttgttcttgtacattctatgggttttgactaatacctaatgtccaccatgaaagcatcaagcagaatagtttcactgccctgaaaaccccctgtgctcctcctatttgttcctcggtctccaccctccctgccaacccctggccatcactgatctttatgttgtatagctttgcttattacagaaagtcatacacttggaatatacagtgcacagattttctagactggcctctttcactcagtcatttgttattcaggttcctccatgctttgtcttggcttgatagttgatatcattttatcaatgaatagtattccactatgtggatgtatcagagtttgtttataaactactgttttcatggatattttagttgcttccagtttgtgagaattatgaataaggctgctctaaatattaatgcacaggttcttgtcaggacttaaattttctaatcattctgataaatacctaggtgtgtgatggttaaatcatatcatttagctttgtaagaaatcaccaaactgtcttccaaagtgcctgtgccatttttgcattattataccagcaattaataagagtccttgttattctgtgtttgctaacatttggtggtaactctttgttaccaatgatatatgatcagcatcttttcatatgcatatttgttatctatatatcttctttggtgagatgtctgttcagatgctttgcccatttgaaaattgggtattgttttaattgcttttatttttttaattttaaaatttcaacttttattttaaatacaggggtacatatgcagatttgttacatgggtatattgcactcaggtagtaagcacagcacccagtggtagtttttcaaatcatgctcccctccctcactgacccctcttggaatctgcagtgtctattgttctcatgtttatgttgatgtgtgttcaatgtttagctcccacttataagtgagaatacgcaatatttggctttcttgttctgtgttaactcaggattatggtctccagctccatccatactgctccaaagaatgtgatttcctaccttttaatggctgcatattattccatggtgtatatgtatctctttaaaaaaagaaatccaatccactgatggacacctaggctgattccatgtcgtcttcgctatgatgaatgacacaatgatgaacatatgagcgtatgtgtctttttggcataatgacctattttctttggggtatatacccagtaatgggattgctgggttgaatggtagctctattttaagttttttgagaaacctccaaactgctttccccaagtggctgaactaatttacatactaatttacatagctggtaagactgtggagaaaagggaacacttaaaccttgttggtaggaatataagttggtgctcccttttctccatagccttaccagctgttgtttattgactttttaataatagccattctgactagtgtaaaatggtatctcactgtggttttgattggcatttttctgatgattaatgatgttgagcattttttatatatgtttcttggctgcctgtttgtcttttgtgaagtgtctgttcacatattttgtccatttttttaaataaagttatttggtttttgcttgttgcatttgtttaagtttcttatacattccggatattagacctttgttggatgcataggttgtgaatatttcctcccattctgcatgttgtctgtttattctgttgatagtttctttcgctgtgcagaagctgtttagtttatcccatgccacttatcagtttttgtttttgttgtaattgctttcagaacttagccaaattttttttgtcaaagccaatgtctggaagtgtattttctaggttttcttctaggatttttataatttgaagtcttacatttaaatcattaatacatctcaagttaatttttgtatatggtgaaaggtgagaccctaatttcattcttttccatgtggctagcagtatcatttattgaatagggagtcctttccccattgcttttttttttttttttttttttttttgtcagtcttatgaaagatcacatggctgtaggtgtgaggctttgagttttctattctgtttcactggtctgtgtctctgtttttgtaccagtatcatgctattttggttgctatagctttatagtttgaagttgggtagtgtgatgccctggctttgttctttttacttaggattgcttttactattggggttctttatggttccatataaattttagaaatttttttctaattttgtgaacaatgactttggttgttttgtaggaataactctgtactcccatactttgtgccatagcctggaggcaccagaacatggcctaggtcaggttccagctgtatttggggatctgatgtaattctcggtcaccaggagtgtatgaacgtagagcattcaggctgggctgctaaggctacactgtgtacctgttcctgcagagtggctatgcgtggcccctaggagggggcagacagggagcatgggaggggcagacagacagcaggacttacaaaacagacatgccttagtcatggggaagccagtcttgccctctcctgactcggaggtcagctgagaacaatgcctccgggaatcggggagttcccggggatgggcgtctatggctactttttgctggagctgcccagcacacaaacatttctgtgctacacaccacctgaaggcctgtctctgccttttccccagggaaatccccctgccagatcacatattcatggaggacacagcttaccctgtagctaggatcctagaggtccacagagagagtgagttatcccttagttcctgcactcacccctctcccaggagccattcggggctgggaactagccctagcattcccttatgctgtgcagggttcctaacttccttcctcttcagccttgccttcaatgtcacctctccatccaccacagctttttgtttccaaacatctgcccatattatggtagtttagtcaataactggatctctctcaatgggagtgtcacttcctagctgcgtctcttcagccatcttgtctcccctctctatcactgcctttcttgaggaatcacagctagtgctagtcctattcttggaatatcctctttgtccatgcttttctagcattttctttctgctattcagatggcattatagacaatgactcatgtataaacccatttggggtaattgtgttgaagggtatgatgttttcacctgatggtactctaattctctttatagaaatttacaatttatgcattttactgattataatgcattttacaaaaaaaaccattaaaaccttctttaatattagtatacaatatcaacatgtttccagagttatttatttaacttttttgtttttgttgttgagatagaggctcactctgttgcgcacactacagtgcagtgatgtgatgatggctcactggaaacttgacctcctggctcaagcaattctcccacctccggctcttgagtagctgggacaacaggcatgtgccaccataactggctaaattttgtgttttcttctttaaaggcagggttttttcatgttctctaggctggtctcaaactcttgggctcaagtgatccacctacctcggcctcccaaatggctgggattacaagcattagccaccacacctagctggaattatatatttatcttaaatagttgaatttatttttgacacgtaaacatttaggggtgtgtgtgtgtgtgtgtgtgtgtgtgtgcatgtatgtgcatatttttatttgtgttggggatgcttcagaggaaagtggtaccagatatttatgaaagatttttctcctccaaaataagtatcctggacttagaatgtttttaaaaatgtattttgatcacttcattttattgaggaacatctgaggaccagaggtaagagtgtttctaattttttactttccagtgttcttactatattacatgttagccataacaactagcatatctgtttcaaaatgtaaagttgtacatgacaagctatgtgtttataaaacaactcttcagtggtacccagactgtcctcacatggatgttcaatttaaaaggtatttttagtaaatgactagaaaattgatcccctgaatttatgcctttcaacccagaggacaggagaaagtatgtactgactggaaaatgtgtgtgtaaaattagctggttattatctagttaacgaatgggctttgctgtctggtgtgctatgaagtggaagtgagcagttgttggaaagagaatataaatagtgctttatgagactatattgatcttccttttgttttcaatttaaggttttgaaaaaaagtaattttaaagtaaaggaaaagtttagtaaaagtcactatcttcattttaacatgtaatggctgattaggttgttaaactagcatgttcttttttttcttgttagctagaagggagtagatcgtattttggattcaacacatgcaaaaagagcaacaaataataaattacactatgaatcatattgtttattttttcacatatccattcaacagatgttttctcagtgtctgttgtgtgccaggcattatgctagatgctagatgagaaaaatcaaaaagcaaagtttattagggctggaagctcataagtataatggaagatacagatcagtaaagcaacaattgcaggaaagggttatggcacacgagttcaagagatataagaggaattaggaacatacaactaagactaggataaagatggaaagggggatggtatgaacttagtactgaaagaattagcctcagtagagttttagataggaggataaacaggaaaagggtattccaagaacaaggaatagaatctaaacattcaaaaatgaaagagaacatacatattcagtggacagcaagtggtttagttttcctccagcagaacgtgggcatggctaaatgtgggcatgtaagactgctgagcaaggcaggagtcactcacttgatgaaatcttttactagaaagtgcttatattaacctaggtgatgagaagctctttaagaactttagtgggagtgacataaaaaggatttgctttttttttttttttttttttttttgagacagagtcttgctctgttgcccaggctggaggcagtggcccgatcttggctcactgcaagctccgcctccctggttcacaccattctcctgcctcagcctcccaagtagctgggactgcaggcgtccgccaccatgcccggctatttttttgtttgtttgttttctattttcagtagagactgggtttcaccgtgttagccaggatggtctcagtctcctgacctcgtgatccacccgccttggcctcccaaagtgctgggattacaggcgtgagccaccgcaaccagccaagaattcgctttttagtaatctccctataatagaatgaaagggagattggatgaagataaaattgaaggtggggagatcaattaggaattctagcctctgaatgctgcatgaatcttttatctactactcttctctccagaagaaagtttaggtgtaaaatcctagaaatacagaggtgaattaattatttgattgtaattctaattattttattctatgatgagggaaatgaggtcaaacaggttaaataacttgcccaaagatggagagattctgactaaacaagaatttaggaccctgatctcctccttcttaaaacccgtagattaaaattcacaaggaaccagcccttcagcttcagagaaatattttaactcaagtattaatggtgatatgtctgtgttagcagtacaataaaacaagtgaccttcatggataaaattctctgtggttaaaattaaaaagacacaggaaaatgggattcgattattaatgcaattagttgatgaacttgtggggtgacagatacgtaaatgcctgttacagactgatgataatggagcattcgactctccaaactggtgctcaagtttagctctcagaaataatgagggacttacttccttcatcttgtctccttttcaggtactaatgctacatttcgataatgatgtacaacccagcataatgtcagagctgccattactccacattaattccattattactttgttttctgttgctgtagcttatgattgttttgaagatcaggcatttatgaggtactatcatgcataaaacagcaaaagaatataacgattaaccctcctggagactgccaggtttacaatatgttaacaaaacggagacaaaagaaatatgttaaggctatgacacactgtaatgattagcatttacttagaatcttttttaaaaaaataactccctcaaggcttctatatgaatgcctacatcacatttaaaagtataatggatccttcaaactaaagagctcaatgcctgatgaatagaactagtagctcatatatagaaagaatgttttataggtacagatatttatttaggctggtggccttagctggctgttgaagttgatggtattcactatgagattaatcagacaactacaattcctagtaaggacaagtgatttcttaaagaacataggttaataaatgatggaacctcgtgcttgaacccttggaccctgagcccaaatcatcaccctatccactgtgttaaaaggattttgcactttcaccagtgcactgttgtttagatagtaaaatacatcttaaaatgtgaatgtatgtaaatatgtatcaatattctcttagcccccaaaattctaaatttaggaaatttgaattttagataaaaagtcctctaggatgatacaaattaaaatcaaactccatgtgttttaatgatcttgaagagccaagtagcacctgaagattcatcatttctagctgcggggcacactgtgacctggaactcttgattccgatatccttagcattgtcagtataactcattttgagcactatgacttgaacaaggcagaccttagtgcaaaggcagagtagatgtccacttacctgcatgagtccagcctatttttcatgtttgtagaataggagattaacacttcactcctctggaataaaacattgacattgcctgtacaggcaatataatattatggtggaaaaataatttaaagatgcagaataaagaaaatcacaactcagagataaccactaagaacagtgcttatctttttttttccccaagatttctgtgggtagagtataccaaaagggccttgcacctgtcttcacagtttataaaagaattggatgttggaatgttccaggcaacctggtatcagtcttgcttcagcagcataaattggcattcatgaccaggtgccttttacaatgctttctttatttgtaaaaatatgaatttgctaaactctcacttggagatcatggtacaacaaggcttagactgtttcattctaatatagcagtgtatgtaccttataatgagggaatggagcagaggatggaatactctttattctttatgtcttatgtcatgagatattctataatacctctcttagagaattaaggaagattaccttttgatcctccaaatgagaaaggggaagttttaattggatgtcatcactgtcaatcatcatgtatatattagagagaagcaggagacttcaagagtgaagcagttaccacattgtattcatatattataactgtgggaagaaacattcttctccctgggcttcctaagaggatggagaactgtgctgaaaaacccttgtaaggcatatatccttctttattctgagtgttttactctgatttataaaaagaaactattcatttggggggatgaggagggaaaggaggtttacattaaagggaattcttgattttcttgtattaatatagtttaacccaatgagatctttttatacacttatctcttcatctaaaaccataaaattcacttgatattcatatgacagtaagttatctttgaaaacatggtttacaaataaaagcacaatatttcctatgtgctatgggaatactacagtttgtttattctatgataaggcatttagcttatttccttttttagaaagaaggggactagcataaatagtactgaaatggatgatcagaatacatcaatgtttgtcagcatacgtgaatgtgtcgttttgagagattcctagaagtgaaataactgagtaaaagggagcaaatattttttaagactttgatgcaagcttgtaaattgcttttcaatttatagtgccaccagcaatgagtgaagatggcaattttatcacacctgctcattactatcaaaacaatgtgaaagacttgctatatgaaaaaagataatatttactttatatagacagatatcatcagagacagatatatactaagctattctcagtaactaaagtgtttgtgatagacaatcttcaggtcaatagattgctttagaaggcatttgcagagcaggaaagagaagcttgtgtccactgatggacaaccctttgaaacctaggaatatcaagagagcttctattatatgagcccgtgagagataaatgttaaatgtaaaatgcaagaacactaaggataaaatttacccgtcgcatatttgtgtaaagctacactctaactggaaattatcagttgtattagtttactagaactgccatagaaaagtaccacaccctgggtagcttaaaccacagaaatgtatgttttcatgattttgtaggctaaaagttcaagaccaagctatcagcaaggttaatttcttctgagagtctttctccttgtctcgtagatggccgtcttctctgtgtcttcatgtggtctgtcttctgtgtatctctcgctgtgttctagcatcctcctctttaaggacaccagtcacattggattagggctcaaactaatggcattattttaacttaatgaccctttaaaatatcctatctctaaatacacttatactctgaggtactgggggttaggacttcaacacaggaattttatgggacacaattcagcgcataacaccaatatgttgaaatttctagtttcttcttaaaatgtaatacaaataaacaatgatgcttatctgtttattcactaattattatggcatcattactgtcttttatgagagtaaaatatgttgcacacttattgttctggatttattttgaagtcattctgtttacaacacatctggtttaagcagatacaaagacattggatttaataataattttatttgatttcttaaattcggtttacacactgtatagagcatctttctttggaatacagaatgtcattgaaacgtcacacatcagtagggatgtatgctcttgaaattgggttgtatgtcagtagggaatttaaaatgaagttaaaagttcctccaagataggttgaaaaaagtaagttattttaaaggcttaacatttaaataaggtgatgtggagtaactctgctgcctatccttatgatcttctgacagctttgacagggaaacaatgatacaactgagagaaaggcttccacgataagctcaacttcttatggttataaacttgtcatgtgtgacatggttggttccattacagtaacaagatggatacatcgaattttgaccacaaatgacataaaataattatgtacttcagaatatgaattaggtttggaaatatgttttttaaatgcagcttatatatacacacacttatgaatgtgttaactatcagataccttaaaagaaatagacagtgatgagaaatgatataaaacattgactctatgtgtatctctggaaattatatagatatattatgtagtcaaatttattagatactaatagttaataaaggtgggaaaaagaacataatcttgagcaactttacaacattcagattgggcataaggtgcataaatcattgtgatgatcatttaatttgttttggagtaaaatagtgattctgctctggtgaagtaataattgttgacttccatctgcttttgtaagaatacctcttattgtagtcaaaacacaggaaagatttgtagttctaatgatactgcattactgtgcatatttgaccatttccaagtaggctctaaatatagacctctcttttaaagcacagtaactgtaaaataacagcaacaaaaacaaaattcccctcacctcctacccttcctcttctcatttcatcaatatacttctttggctctagaaatccatctgtaattaatgaactgttttatggaattatttttttctccagattttcaacctgtgcagtgaatatacttggaagcaatcaacaaacaaacatggcctgttttttatgttgtcagcatcactaaatcaatattaagaaaacattcatattttacaggttaagtactctgagtattatgataggaatgagacatttgaaaacaagcagaatgagaatagtggaaaatttcactttagattacattaaatggtgacaaaaaataatactgtgttcaaggattagttttatttcaaggcactgaacatattgcatctttatataactaataccaatacaaatgtatcttagttttgcttatggaagttcagttgttattttggtgtaaattttaaaaaaagtaagattaaaccaccgtatttttcttaaaagtgactttggttgttacttgttaaattgtgatgtaatataaaatttctctcacgctgtaagaatggcaatcattaaaaagtcaggaaactacagattctggaaagtatgtggagaaataggaacgcttttacacttttggtgtgagtgtaaattagttcaaccattgtggaagacagtgtggcgattcctcaaggatctagaactagaagtaccatttgacccagcaatctcattactggatatatactccaaggattataaattattctactataaagtcacatgcacatgaatgtttattgcagcactgttcacaatagcaaagacttgggaccaacccaaatgcccatcagtgatagactggataaagaaaatgtggcacatatacaccatggaatactatgcagccataaaaagaatgagttcatgtcctttgcagggacatggatgaagctggaaaccgtcattctcagaaaactaatacaggaacagaaaaccagacaccacatgttctcacttgtaagtgggagttgaacaatgagaacacatggacacagggaggggaacatcacacaccggggcctgttggtgggtggggggctaggggagggatagcattaggagaaatacctaatgtagatgatgggttgatgggtgcagcaaaccaccatggcacatatatacctgtgtaacaaacctgcaagttctgcacatgtgtataaaagggcttctggtggccgggcacggtggctcaagcctgtaatcccagcactttgggaggccaaggcaagcggatcacgaggtcaggagatcgagcccatcctggctaacacggtgaaacctcgtctctactaaaaaatacaaaaaattagccgggtgtggtggcgggcacctgtagtcccagctgctcgggaggctgaggcaggagaatggtgtgaacccgggaggcggagcttgcagtgagcggagattgcaccactgcactccagcctaggtgacacagtgagactccatctcaaaaaaaaaaaaaaaaaaaaaaaaaagggcttctggttaaaacatagtttacaaaatatcttgtccaccctgtaagcttgacaccaccagtgtataaaagggcttctggttaaaatgtagtttacaaaatatatcgtccaccctgtaagcttgactttcagaacttttcttattaagctcatagtcgttttatttttcttctttccttgttgttattttgttcattttttctttttgtcttctgaagtcttatttcctcctaatattagcctatattaaagttaaattaaaccaatcttaaatagtaaatatgcctcctcctttccttcgttctataacttattcccatcctagggtgtatgtgcctatcagaaaaatcagaacaagtaaccttaatccgattataatgccgaagctattcctaatggctagagagatgtgcatgttacaaactgaagtttgtctgtttactctttaagctcaaccctgattacgttcgtaccacgtttctctgtgataaattcatcatagcctggcagtaatgctgactattcagaggtttaagcaatccctttaccccatacttttgttttcatggctattagacaattggattcttatgtgacctgtggaaaactttgtttccttgtcatttaaggaggttttctgtttctctagtcatgccagactgcatgtaagcatagaacataaaattatagctattaggaagaatttaaaatgcctcatttcgtccctgccaaaaaaaaagtactgccatttttactttgatttctctgatgtaaaattcatgaataaagtttatcatccatacttgtgtttctcaattaatttgaacataataagagaagaaatgaaacataagctaaggtttttacactgacgggtggtagagtagaaatatcatttatgaataagacataagtatatttaaaatatcaaaattatttaatattttacttttcaaatgttaatagttttaatagctaacatttattagtcactatgtcccaaaaactgttctaagcaatttatttgtaatgactcatttaatctttacaactgcttcattgtacatgaaaattcaagtctcagagagggtatgtaagtagtctacagcgttggctgattagctatccaaggaaccaagattcaaataaaatctagaaggtgtgaaaaagactagttttggccatcaaataaagaagttggcctaggggattttatatatgtataaaaccacaagcataaatgtattttaagcaacaacatcctgttgctaattattatatgatctaagtgatggtgtatgtatggatgcacttgtattttgtgctgtttcgatgatagcttacggagcattctagaacacacagtaacctgatttccttccatcacccagtagctccatagacatcttcatataacaataacaaccaatcccttaaatcataagtctgaatccagtttactggatggtccagttaggtttcttctagaactgaaattctttgagtttgagaatattaaatatggaagaaaattgcttatacttctatttttttagggtgttatttttcattcatagcaaaaaattttactccaaaatagtggtagagatcacaagataaatagattttttctggaaattttaggcagatagaatgccagaacatatgaacaaagtgattttttccttctacatttaattgaaattcttataattagatttatcacatttgcaatgtgagttctcagatttagataatctgtgcctttaggtagatgagtttctgaacatatttagaaatgtgacactgcatctgatagaataataagctagaaataatagaaatttggtgcttcaactcagcaattctattttctcttttgatgtttaaagtactcaagttcattagaacatatttaaatctattatctgtgccttcattctagatgcactgcctgaaagtttttgaaacattattactataaaagtctatctctgttaactttaatgagtgcttcactgccactttttgatgaacaaacattataatgcttttattataaaatctatttaacctgcttcatctttctgatttaaatctaataattcatgtagcatttttgaaaagcgatgtttgattttttgcataaaattgatatctgtatatgttctttctttctataattttttcctggaaagtttattttaagacataaaggaacagaagtcctttgggttcaaattatgaagtattacagagtatttgcattctgtcttttttgtcttaatgtgctttaattaaaaaaaaaagataagacatctttttgaaattaatgggaagatacacaatatgagcaatgatggagttttaaaatttgttcttattttagttttatatattggtatttctcaatctatgcatttactaagtatattaatagaaatattctttcttttatattaggtttctgtcctgagaccacagcagaatgtgccttggacaaaggtgagtatatttaaaatatattttaaaatttctccataaatgaagtataaaaatattatgacaataattatattactgttgcatgcttggaaatacggtatcatgggacatgcactttttgtctggtaatatgtaatagtgagaaaacatcagaattagaattctggctatcaaatatataccattgcctgggtacagaaagccttaatccataaaatctatattaaaagaactgttaacactaatgctcttgcaagttaaataatggaactattcaaaggttgatgaaagatgtttaacatgtctttaatgactctgaagatgaaattattgaaataggacatatgtaaattaaattatcaggcaagaactacctaaaagtatctaggttttgggggaacaaatagagaaatacatttagaattaaaaccaatttaaaaagaggaaggaattaggaaaataaacacattaacagctcagtaaacagtatataaacgtactacatgaaagataggggggatagttcaaggttaatacacaatgcctgttatttcaaactggaatgctatcatgaaaaaagatgttattaaagattattgaaaagatcatgagctataactgagttataaaagagagttgaaaagaaaatgtataagatgaataaacgttacatagaggaaaacctgtgagtactgagtaagggaactaagattcctgaggacagtcgtgaaggaggatgacaactgacaaaataaatatcacatacaggagctattaattatcacggcttctctaaagagaaattaacaagagaaaaattgcttgaactaacatataaagaatttacgggctgggcgcggtggctcacgcctgtaatcccagcactttgggaggctgaggcgggcggatcacgaggtcaggagatcgagaccatcctggctaacacggtgaaaccccgtctctactaaaaataaaaaaaaaattagccaggggtggtggtgggtgcctgtagtcccagctactcaggaggcagtggcaggagaatggcgtgaacccaggaggtgaagcttgcagtgagccgagatcatgccactgcactccagcctgggcgacagagcgagactccgtctcaaaaataaataaacgaataaaagaatttacgtaagcttcaggattaggtagtgggagaaggttagttatcatttttgtagatatatttaaatattgaatagattcacaatgtctgacaagggtttctctaaaacttctctacatcagctatcctattcaaggttcttccagccccacacatgacttgatgagtcactgttctttatttttccctgtattagagtaattttacattgaaataaaagttgggcatccttggtttgaggttatcagaaaaatgtaggcatatatactatcattagtaattgatgcctgttctatctcatgcaaacgtaatgcttggggaaatacggttatatgtacatactcatattttttatttggcccaaaacatactctatgttttctgcagtgttactcatatggaagaagaaagcctcctataaatgcgtatgttaataattttctgagataataaaattgaaaactctcccagatattttttttgccactctttttcatataattttttggtcattttccatatctgtaaagagactaatgtgactttagaatatccaaagaaaataagccagctgacgtgcactgccagacagggaatgaatggctccaggcacaaatctctgttgtgtcaaggctttggcatgacatttggcagggacttaatcaaacatagcacaatgcaaataatctcagtttcccatggatgtgcagcttcaacctcgagcctgctgttagtcattaccactcttttctcctgatattccagaaaatgatatttctggtaatgaactgaaaactagaacatttcctaggtgttattacactgtgaggcagttggggggatcgtgactttgaaattggaccttcctgggtttgaagtatgagtctgtcacttgctatccgtggaatcctggagaagctacctaagatataaaatgaatttattaacaataatcacaggggttgtggaggcattaaaatgatacaattagcctaaagtgtttcttatatctgttatgtaataaacatataataaatatgattttacttttttccatttctgtaatcagctggattttgttttaaacttcttaataataatctcaatcatcctattaatagaagaggaatgattctaatatacacttgtaagttttgagttatgtaagcacatgtgataatatttgtctttatctttttaggtgggcactcttttctttgaagtgggggcaacggtttttgcgaacttcttttcaaaatttcatttattttttaaagatttgtgtgtcatacataaggggtcttcatgttgcacaagcatattttgaatgcatttgatttaattttaggttttgttagtatgatcaaagatggaacaccgcattataaaatgtagatagattagaaaaaattatacctccatagcatgcccataatattttagttcaaatgtttgtttcaactctcattaataaataattatgtgtcatatggcattaggtgctaagggtacaaagaagaaacagatacattatttgccttcataagagttataatcttagatgggaagagacatgtaaatacattaattttaacacaatatgctacaatggagaggtgctcaaggaatgggggtcgtgcaaatataaaataaattttaatcaatctggcttcttggaggggttgacacctcatatattttaaaaaatgaggaattggccaaatatcagtcatatatagaggcatgagggtgagaggtcgtcaagaatgcataatatttcaatgtgattgtgtctatttaaaaatatataattttcaattctttctgtgacatgacaaaaggaattaaagtacttaggggttaataaactttttaatgcaaattatcaaaaaagaagaaggacagtgaaataaagaatgtgttgtctgaagtcaaacaatgatagtagcagtaagtgtacagattggaaagtggggagctgaacccttttactttgttcttgaaggtagatgtagattatagttaggttatttttacagagctaagatttatgaatgatgtgtttatcatattgttatttgtaacatgataatgggaaacaaaataataaggaaccttttataaattttgataaaatgtgggatattttactgttactaaaattataattttgaagattttttaaagaagactgttcttaaaaacaggacaaattgtgaaataatattataataccatacccctttaatacatatatattatgtatgtaaaacagatacatatggatgggtactcagtcatgtatttgatgtgcttttgttaggggacagggttcaggaaaatgcttagaaaaagactgaaaagaaacacacccatcattattaacagtgattatctctatgtcatgggtatgcatatgtgtgatttctattttttcttgaaactttgatgtgttttacattttgtaggatgaatccattgaataacttctaacacagctgctataaagacagggttttgaagaggtaattaaggttaagtgaggtcataaaggtgggatcctaatttgatagaattggaggctgtataagaagaggaagagatcgctctctctttccctctctgcttacacacaaaggagagatcatgtgaacacacagcaagatggcaaccaccaacaagccaagagaagagcttcagaataaaatctaccttgttgtcaccttggtattgaacttcccagcctccagaaatgtgagaaagaaatttcatttgtttaagccacttggtctatggtatcttgctatggcaacccagctgattaagacaaactttgacatcaagaaatagggtgctgctatgaataatacctaaaaaatctggaagtgtcttcacatcttgataataaaggctagaagagttctgagttgcatgaaagaaatatatgcggttctgatgaagtcttatgtagaaatgaggatcatgtcagtgtaaactggaagagaatcaatcctttttataaggcagcaaagaacttggctgaatagtgttctagtgttttgtggaacttatgagcaataaaattagatgtttagctgaggaggtttctgagcaaagtgttgaaagggtggcttagtccctcttgattgctatggtaaaatgtcagaggagagagaggaattgaagaacaaactgttaaacaaaaataaaaggaaccaaacctaaagatttggaaaattttcagtctgtttatattgcaaaaaaagcaagcgtactctgaagagaacaccaagagtgtagctagactgtcacttcaagaagagcttttgggattataccagctgaaatcctgccagtttttactgaagggacaaagatgggacaaagtgaagaaagactgttggacttcttggacttgacaggacaatagggctttttggctgcaaacattcactattcttccaagagggaagttatcagggctactgccacagtttcaacaggtcagacaacctctgttcagagccttgagggcaggactgtcctggagtgatgtaagggtggggtttcctatagccttgggattcggacactggcctacagttatggaggtggtgctgccacacttgatcttggactttctctcctccagaattagaaaataaatttatgtttaagtcattcagtctttggtattttgttaagccagcccaagcagaccaatatcccaaagcaatgaatattaaaatattatattttgcaaacatgatcaaaataaagaggaaagaggtggagcatggaataattcgcagattttgatgtaggcaattgggactaattctgttcagtttatgtagaaatacagagtggggggaaggggagacaatttgatggaatgataatgaatagtttttttttaatttcatcgaaatttttattgagataattttacattcatatgcagctataaaacataagagagtctgtacacattgccaagttttccctaatggcaacattttggaaaactatagtataatatcacaaccagcatattgaaattgagataaacccccaatattgttcagatttaccccatgcccattgtaatcatgtttgtcttcattatgttctataaaatgctatcaccttgtaagtttaagtatcctaccccacagtcaagacattgaatagttccaacactacgagcatttgacaggttgcctttttataactacactcacctccctccatttttccaccccaaccctcttcctaaacaatacttcctggcaacactactctgtcttccatttctaaaatgttgtcattttaaacatgatatataaatggaatcataccttttgggattgggtttttgcttagcctaatttttggagattcacccaagttgttgcatgtatcaatagtttgttcatttttatttttgatcagcattccattgtatgtatgtgctacagtttaactttttatctgttgaaagacacctgggctgattccagtttttgtctgttacactaatgtataagcatttgtatacgtgtttttatatgaatatgtcttcctttatctggaataaatgcccaagactacagttgctagattgtatggcagttacatgtttagtcttataagaaactgcccaactgtttttcagtgtagctgtaccattttatattcctagcagtgatgtatgagttagctcatttctctgtatccctgccagcatttggtggtgttgatcgttcttattttagccattctgataggtatatactgatatctcattgaattaatatttttaatttgcatttctctaatggctattgatgttgaacgtcttttcatgtggttactcaccatctgtctatcttcttcagtgaaatcttcatgtagtttgcctatttcctcatcagattatttgtaaactgctgagttttgagtacacgtatgaacagtgctggaatatatatatatatgtgtgtgtgtgtgtgtgtgtgtgtgtgtgtgtgtgtgtgtgtgtgtgtgtgtgtatgatagctgagtaaagatgatggggaagaagagatctctcaaagtccagacagacaatcaggaggctgtacatataagtccgaagtcctgagaagcaataaaggatagaaataaaggttatgaacatgtgacagttaagaaggtattggagcaggtcttggagggcaaaaatatcaagcccttgtgtctccttgaaattcagaataatgttttaccctcaaaaattttactgtatgtaaataaatactcttctatttcctggactttgtcttacataaaacactaaggttttctcacttatcatacaccttaaatactaccagcatttgagtggtttcagtaagatgtatgaatgttttcagtaacaaaaaaaaagtagatgtatttttgatatgtggcatagacccggggagacaggaaaagcttgctgaggctacaatctagaactcagattacacacagaaatagggtagcgatatccactttgtaacgagatccttctcaagacactatgagaaacttcagagggaaaatccattatcttgaatgtctagtgatagacaatcttggcaatctagttaagcaggcaatactggaagtttaacatgagcaaaatgtacaacaccaggttagaggagaaggaaagaaagatatatttgaaattatagaaagaatagagcatatttgtttacagaggagatccagtggcaaaggaaacaatttatcatttcagacagaccttggccgggcacagtggcccatgcctgtaatctcagcactttgggagcccgaggcaggggaatcacaaggtgaggagtttgagaccagcctggccaacatggtgaaaccccgtctctactaaaaataaaaaaagttagttgggcgtattggtgggcacctgtaatctcagctacttgggaggctgaggcaagagaattgcttgaacctgggaggtagaggttgcagtgagctgagatcgcgtcactacacttcagcctgggtgacagagtgagactccatctcaaaaaaaaaaaaaaaaaaaagacagaccttgactatttgaagatgtttgcatcattttctgaattctacattacagactgagtttatactcaaaatttaaaactaataaggtactggtgctaaccaaacagaactccactcagtagagcagggactgggaggctcctcagctgtactagcattaacactttaattactgggttgtggggacttcttgaggagcgaccaagactaccagagcactaggggctggggtttgcggcagtcagtgccagtttaccaatggtacatagtagtttaatattttaataaccaatgtaatcattaccagtacagactgactgaacacaggctagaccatatgtgtattactataggatctcaggggcatcaggctaggaatagatttactgtgaaaaaggagctagggacctgcttgctcaaagatagaaattaaggaataagttatttttgaaaattattttactacggaaatcatcaaaattggtttgataaaaagtctgaaatcttgagggtataaaatgatacaactttttttctttaaacaccaccttccattctctgacagcattcctttcttgctgggtaacatacttgctaccttaatcacatttgacaattctatagcttttcagtcactttttgttattaaagtgtcttatttttattattaagaattagttttgattattttaaatcttcaacctcatatttgattcagagatcttccccttgcctgtacacaagagagacttgatgttccagttgctctgaatatatggggggtgggagtagtgggatgggggttgggggtgggtggcgatgagggaatggtaagaggttctggagcgtccttgctttctcatgtctttttctgcttccctgctgtctgtcttggttggggcaagggaggaaggagggacacagtccttccatatgtaactctccttggcaagtgctgtctctcctttgttggttgtagccactgttctatctttggctttatgtactttctgagaacctggaactcacacgctgcctctctcacaatcatttggtgattcttcagattacttcttgagggcacttctatagtgttgcctaatgtggcagagctggctgaggtttgaccttctcctacccatccctacccctcatcagccaccatcacaggtgggcatatagcagtcttcacatatgagaaggtacatgggtttgtgttgctttcataaaataaaaactgccttaaaagtaaacatcaataaaaatatacaaaagccaagcgaatggaagtaagagagctacattgaataatgtctgtttttttataaggaaataagtgatgtttttattcaggaataaaaaaaaaagtctgctaagggagaatacaatttttttttttttttgccatttttactcttgagatgtgaactgagcagttcaaatacagcccgcaggtgttaggatgtgtttgcaatacacccaatcagtattatttggggacttttccccagcaacacgagaggctcaccggcagatatggcagtggaactatccaaatgtaagcactgataagttggtaataattatgacttagatcagagattcgggggttctaggaaccccccaggaaatggcttcacttgggctccacaatgtgcaaagaaggaagtgaagtcaataatggcaggctggtaaaaattagcagagtcaaaattcttagttatgatgagtaagatggttaaaagtatatacatatttttggaaggatggcttatgaattcatgatgaagattttataagataggcatatcctttcttatatttatatgagaaactgaataatagaatgcataatatgtgacaggcaaactgagttttagctaatcccaaaccccacatcctttctatgaaattctagtggctaatatattaaaaagagaataggaagattgggttataagttattttgatcaaataagagataattatgttataataaattattgctctgaatttccaagtgttttaactttttctgaaatcgttgtcttccctattgagaaaataactgaacaaaaatgatactgaaaatttacattaaacatccatttgttttttcaaattcataaaattagtgttttcagttgcttatgaaagacttatttaagcccagaagctgctgtgttaaaaattgcagatgccaatgtatacttccttacatcttttgtcttttatcatgatatttaaatagatttatgtgcatgtagcagagctactatttgcatgaaacttaaccgaagagtaaatattaaatgttttcaagcagagaataaaagataaaattgattagtatcctttgcacttttactctttatattatgaacaactgctaaggaatggtcataaagggaatctcggtaaactgcccaatctttgttatagggcctgaattcctgtgaacttttgctgtcatactaagtagaccatctaagataaaataattctgtaataaacattcttttcattggtttgaagaaaacagtgattctataaaagtattttatgaaacacattcttgtggaaactttccaggtaaaatgagcttcacagaaaaagtaatttgaaaacgactagcatgtttttcagcacaacaaagacattgaaaacttctgcagtagaaagtcactaatgttcagtctagaaaaatgtggagctagcttaaccacatgggaggcagtattttgtaatctttaagactgtggtctctggaatctgacagggtttaattgcttgctctactaatttttttattgaggtaaaattcatataccataaaaataaccatgttaaagtgaacaatgcagtggcagttagtacattcacaatgtattcacaaactctatccagttccaaaacattttcattaccccaaaggaaaactctgtatccactaaacagttgttccccattcctccaacccccaccccctatctgctccacttgaataagttgtgtggaccttctgcttaccctctttgaggctcagtttcccacttattcctatatagatagaaatggcttttaccttatatggtggttgtaagaattcaataaagtaaccaatacaatgaacgtaaaccattgttaaaactgaataaatgttacaatgttaaacttgtgtagctctcttttgaatccaaaggaactagtgttctagcaagcactctccaggaagtgtggatcaaagtcatcacaagaggcaaatactgagagagaaaccatagactttgtcttatttagaagctaatgaatctcacataaccctctggtgctccagaagactcagagttagaatttatgttcatctctgtcgttcgtcagaatatttttttctaaagtggcttgaggtcgatattagaacagagaggtgttgaaagaaggagggagttttccagatatcctcaatctaaaaataagaggaatataaaggtttatgagagggaatgcatttcttcaatataagaattgaaggagataaaacagctgacagcagctctaacctcggtctaattattttctacttgataagaacggtattcatgattatataattattaaaagcatcattgacatggaaaagcaaaccataaaatgttttaaaatataaaattatatgttttatgtttatatatgtaaaatatgtaaatgtaattacaggtataattttatataaattgaataatatttgacaatgagtaagtaagtctaaatgaatttttaccaaaatgagagcagtaattcctatgctgtatcagaacctcaggtgtttttcgtttgcctttgtattcttttatacaattgcttaaatttccacgtgtgtaaatgctaccttactaatagaaacaaagcaaccaagctgtatcaagtaacagtagcgaaggattataataactgtactatatttgttattttacccaatttttcttcatagttgctggaagcacaaacctttagaaaaatataaaactgattgtgaaccttaagcagatcagcttgcctccaaaggcctgaggaagaaagaatgaggaagagtttgaggagctctgccttattcttccaaaaatacaatctacccttaaaccgtggtaacagacaacaaactgaagctgtcaattcctttttcctgtctttttagtacaattttttcccaatttttacccttaaaacaatttctaattccttctcaaattctacaaaaggtagcatactcagtgattttaaagggagatgatcatttatcaccccttggtacactgggaagttcaatttccttctcctgatcttctgcagtctgtactcttttcatttgcctcctgaaccaaaagatgcaagatctcactggggttctcaaacctgagtgattataggaatcatctggagatcttgtttaatatgcagattcttgtatatctccccaaaatttcttattccttaaatccagaatggggtctgtggctctgcagtacaatattccaggttacatcaaagcagctgattcgcaaattatcctttgataaacactggaagctttcaagtccttaaagtctaacctgctttgcaaacctgtgattaaaaaaaataatttcctccatcattttcttctaaaagcattggtaattctccttagcaccttttattgaagatgtgtttggtgattcaggtagaacgtgacagcttattcagcataccaatcacataggctgtcctcacatgctaaatgcagaaacaattgaacaatctactttacataaactttctttttagaatatagtccaactgcctgtaacaagtagaagaaacaaaccttccaattatactttgtgattaggttaatgtaatttcaacaatatagtgcccttaaaaataaattatttagtacatagcatgtaatatcagtataatattgtgtaatatatatagtttgtttgttaataaaatgtctcaaagatgctaatgcattttttgccaaatattcttgtgaagccgtcaagaactgctattatttatcaccatttgcagagagatggaatcactgagctgttaagtaacttgaagagggtcaccgagtcagtgactaagtcagaataaacatttcatctccttgctccttgaacagtagttttctcaacaaatcccattgcatttatttcttccagtaaaagtttacaagtcatccagtttcctgggaggttcttcattacggggcgtgtaagaatttgtaccctctggaagattgaaaactagaaccaggaagtcatattaaagatagtccctgtttttcaaagactctttcattcctccagttcccttgtcattaattctgtttcacagaacacatttccattcatccctccatcctttcattcaagcaatcagtttttactgagcatatttaatatttaatatgtctagcattctgctaataagtagttcttttcctcagatcatccagcctggtgaagaaaaagacacacagacaaatggtataatataataattgctatattggatctaggggatctaagtaagcttatgggaagaacatctgagtctatttgaggaaatccgagttttcttagaaaataggaaatttgagctaggttcttaagggaagaatttgcatggattcaatgtaaggataggggcatgaaaaagggaagacaaagctaaaccctaaacataatgcagtcatattccatccaagatataaatggtgacctctgaatttaaaatttagaggcccaataattacacctgtaattttcagagagcatctgcgacacattggaccttcctttttgaggctttgataacctccaggatgcacaatgtggatcacaccaactcttgtgaactttcataccctaagctcaccccattaaaaccaccatcactctggcagactgttgatttataaaaccaaaatttctttattttaaaatgtataacaagcaaacacacaagagagctagtgtttttaaatggtaaaaaataaacaaagggaacagtcactccccacattagccttgcgtgctttagcctgaagggtatttttgcaaccaagaacaaagccctcaaagtataatggaaacactgacagacacttaactataccagctctggcgggtccagctataattcacttcataacacaaattgatatgttgtccagaggggtccctgtattggtgttattgagtgttttttgaaacgttttggttctgggctatgaagctacaaaatgaaactgaatgattctttctggaatagattctgtactgggcccctcaattacagtagtgatgtccttggggaaagaccacatggaaatgtcctataaaaactgaaaatataaaataataaaccaaagtgaaaaaactaatgcaatgaaacaaagtttgttgtattaaaagtctaacatttcttctcacaatgcatacttaaaagcagagcacaccagaggtgaaaagggggcagcttgttttaatttaagtggggttagttgttaagtagagaacaagtacactctgtatttgcaaaatcatgcaaggggccaaagttcagccattccagtgaacttgccaagcaaagtatgctgtgtgttttattatataatgcaaatgacctcaatctgaggtagcagcatttccaaataccatttagggctttaatgacttgtcctagaaaggtcgtgccaggccatatttaatggatcttctaaacaatgtaaaacgatttttctaaaattgtatacagctgataattttagtgtaaaaatacttgccctccgtccccactgcatctccttccccaaatgaaacttttgaggtttctttactgaaaatgttaatgtcattttcttctccctggatctgagttccctcaacctcgatcttaaagttccatgtgcagaatttggagttctgataatttaaaaagctccacgggattctaaaaatcaaactcacagaattttgaaaggcacactccatttttacaagaaactagtacacaaggattccagtgtcagcttttccactgtaaactgttataataaaccttgagttcattataacctctatgggtctcaatttgttcatctctaaaatgaaggtcacagactatctcttacgtactttaatgttgttccatgataccatttaagcctgctaatgaattacttaaatatcgaagtccacattaagccttatggaaaagcataactggcaagattttcctctcaattacttgtgctaataggggccaaaatggcatagatactttaaattcacagataatccccaaacttcaatttagctaagtgttccaacctcctctcgtgccaaaccatttacaggggattgaaacaattagcacacactgactggtaagaaatttatctcctttataattccttcattgtctcctgacttaccactggaatattttcttatttaaattcctaaaaatagaaatgaagaataaatcgaatatagttgttgtataatctaccaaatggttatgtttcaaaatatcccaccactgttactatttttaatattaatttattaagagcttatcctgtgtgacatgctttatatatcactttatttaaacctcacaatcacctttttgagtagtgtgtcagttttctgagcctgctattgcaaagtagtacaaactgagcagcttaaacaacagacattgattatttcatagctctggagatgagacacgccccctcctagctctgatggtgtgctggcaatctttggcactccttgactagtagatatatcattccaatctctgtcttcatcttcacatgatgtttgtaccgtgtgtctcttcttcacgttattctttttaaaaggacgctagttatgttggataagtggtccatcccacttcaacatgacctcattttaatttgatttcctctgttaaagtttctctttccaaagaaagtcacattctgaggtactggtggttaggacttcagacacaccttttttgagggtgacataattcaatttataaaaggtagtcattattctcattattattcccattgtagagatgagttaactcaggttctaatgttgcattaatttttctggagttcaaaacccagtcagtggtgaagttggacttcatatccacttgttggagttaattcttagtgtctccaagctttgagcagtgatttaaaaataaatgaataaataagcctggaactaaagtcatcttgcaggggacttatagtaatcctaggaagtctaataatgggatactcttgtaaaaatattttttttaagttcaatacttagtggagatttaaaaatagcacctaggagcaattttctgtttgttttattgtgtggataagagtgtgcatgtttagaatcttcattcaagaacctgtctgctgtggcaggagaggccacgaacattctgaagtcgtgtaagttgcattggaaaatcaaaattaggcactgtatttgatttctttctccagtgatgatttaatgcactttaatgattgcgacatgtgaagccaactggctgctcattaatcttgttctgccctgagcacctccatttcatgtcctacacagaaatggaatagggcagaaccttgggcctttggaggaagcatatagacttcaggaattaggggaggggaaataaaatttagagattaaatagaaaagttcccattaagccctgagtccctggagttcatagttgtccttcctcaagatatcttgttagtgattgaaaatgtttcacttatttaagatttcttatgttttgttaaagggtaagctgcagaagaaactatgcacacacacacatacccacacccctagtgcaaacctctgtaggaagttagagtttcacattacaatttaatgtgaatctgttgggctcaccctttgctttaaagaactcttactgagattggttatggtgaggtaagtagaagtcttggtgcagaactgggttaaacaaagggaggagaagttttggatcatgttttctcatcaaagagaatgtggggtagaggcatcatggtttgtatataagctgagggagtctataatttctctgtaatggtgctatagattagatgtttaatctctatttccagctctttttttttggatggcttgataactaaagcaaagacagtttttaaaatctgtgattgccattcacattattttatttttgagcatttcaataatagttacataaagtatataattgctagaataaatttaaaacatctaatcatcacctttgattgcatttaggatatgcgctagagagaggaataaaggatttagcatattggcaaaacttttacaatttgtattagtaattgtgtaatgttaagtaaaactgctttacattaatcatataaaagtttatttttcgtagttgttttcaattaaaatacccatcttcaaaaccccagagctctttgttatgaaggctgtgcaagtagttccacacacatcagtcaacatatgagcatcttctattattttatataggcagtgaaaaaatactgctggttatttcaagtgaccttagctaaatccaacttcaacttatgaaacttattttctttcttcctcctctttttaatggatgaggggaggaaagagacaggaagcgtgactaacctgagagttgttctaataactatactcctaacttttgccttatgaggtttccaaatgaactgtcagactcttaatataaatctcttcctgaggccttccttccttgaaaatattggaacacacaaaaaatgatttattattaaaaaggcattcctcttttactgaccctgtggtgtgtacattctgtggattgtctatagaatattgtcttgttatggagtcatgaaaggaattaagactgttaaacaatgattgatctgataataataaatatctgataatgtcatccagtgttttattataatcactgctcttagggtttaggggatcaataaataattccctgttcttcccctcctgagcctggaatcaattcagaattaagactcaggagacagacaaatggaggtcaaatagttttattatagagatgattggaaaacgtggttataaaggcatgggcaaaaaggcttaataccctaccactgagttaagccaacttaccaacctgataattggtgcagctgaacaaccaaatgcctcccaaacagggcagagttggccctccctgatcatcacatgacagcatagaaattgactgagatttgaaactgagaggcatggagagaggcaggagtcaagagggggctgaagtggatgtgctcagggtcttctgccaaactttagaatcagaggagtaaagagaagatcaggtggattgttctaatggagacactcacaaaaaccagaggaaagaagaagaagggagattatactccacatcctgcaggtattggttctgttagcctattgggttttgccacactattgatttttcccacctcaaattatcaccagccatgttgtcaaatgtagattacagtagtacacaataaatgaatatcagtatgcagacaataatataatgtcactgatactgaaagaaccaaatgtggacactataactcttccattattacatttccagaggttgacataaatctccaaatgaaatcactttgctgtgtaaaaatccagtcaaatcaaaggccaaaattcgtaagttaaaggccaaagaaacgaaagcctgaaataatttttttatttgctcagccagacagctaactgctctgattcccaagtagtgtgggtgacttcagcagctatcagtcattgaaattggttgtagttccttcagtacctcagcagtactcctcctcattgaggtaaacaccatcctgcttttctgtcgttataattatttaagtatgtatcccttacgatgtgttgtttatttttctgttttcaaaataagttgaatcacaattgacagatcttttttcgtctttattttgatcttggtttctgaactgtccatgttaatgcacgtagcaatagctcattgatagaatatggcacaatttattaaacacttctatggatcattgtcccttcttatttttgttattaagaacaattctggtgtgaacattcatgcaaatatgcaaagattttagtgtaggatcccactgtttaaaaagtacagaggacatagaagtaataaaaagtaaataaaagtaataagacatagaagattattaccatactatctttatatgcaccaagttcagaaaacacagcaacccactattttacagcagtgaaccagtgattcactgatgaatgatggaaagaatatatcccaggaaaatcttgcttggaccacccttgctgagatgccattcagttcatgccatttttctggattccaagagctgtgatctccacgtgatctaattcttctgtcataagcttaatcacaacattgcatggacagtgactcagaggaaatccacctgtttatacattcctttctcaaagagtgtttttgaaacattccggccatactgctaagtttagaaatttgtaaaaatggtagactcaggccaggtgcagtggctcacgtctctaatcccagcactttgggaggccgaggcaggtagatcacctgaggtcagtagtttgagaccagcccggccaaaatggtgaaaccctgtctctactaaaaatacacacaaaaaaattagccaggtgtggtggtgggtacctgtaatcccagctactcaggaggctgaggcaggagaattgtgtgaacctgcgagacgaaggttgcagtgagctgagatggtgccattgaactccagcctgggcgaaaagagtgaaactccatctcagggagaaaaaaaaaaaaaaaaaacaaaaaagattcagtcaccaggtataatctgaggcaccatttttccccaaatagtatattcaaagcaatttaattttcagccccagttttgtaacgaatgtggattctgtcttgtagcatggctcacacactctattgtgagcagatatataaagttctgtgctgcacgagttgctgccatgaactctagaaatggagatgctgaaacctgtgcaacatgttttcttgggagggttcctcttttagccccatatttatttcatatcggaaatcatgagcctgaacagaagctgttgatagtcctgaaatgtgcatccccaggtggtctgctaagcccaatacctctgtcagtggctcctgctcagagtgcttcttccctcttttccaggctttgaaaaacttgtattcttttagggacatcagaaacttctttatttctacaatacatttctctccagcagtggagcatgaccccagtattctatttcctgctattgtttccttccacatttctaggaggctcaggtgaatttttaactgtttaacatgttaaacgtttcctaacacctacagggctactactgtttgcagattcagaatgtactgtttcctttttattcaactttgctttgcagtccaggaattcatatacttgtctatattttgtcttatgacagttaaaaaataaatgagtactgcatctgccaaaaaaaaaaaaaaaaaacttttcaagcacatcttgtctatcttcacaccctgaagtaaaaaactgtgacccaagatggacattcctacagagcgtgtgagctagctctggattcagtatattattgcctgctgggttcttgtttactgtgtttcatcttttctatgccttatttcacttctcatccaacttctcagaatccctaatggctaagcaacactcatatcccaatttgttataaattatgccaatttagtgaatatcgactcacaatatttacgtgaaacaattttaagaattctatattgatctttttggcaattttcctctcaattacagaagttcagatgccatgtggtctgattatctaagtactgaagaggtggttcctcattgtgctaattactctatctgcagatttgttcccctgatagatttttagatatgttttctccaaaagagttgagtctctgagactgtctcctttctttggttatatttattgggcacaagtaactttccaatctagtaatgattaaaacctcttctctttttttctgaaacccttctaaaaagtttgacctgagcatgtcgtctcttttattttatatgtgcttagcttaccctttaagatcacaacatacctcttaagaataatctttttcttcttctagatcaagctgtctttatttgttctttcataatttcattctcttgggcaaactgaagtaaacttttttaagcattgcagattttctcttgggtttcctgaggaaacttggtttctcatactagagtactcatataaaatcttatttcatttgcaaagttaattgagttctttttttccccatcccaagcaatgaagatgacattgttttaaataagaagggctaccattttatttaatgtgtttattattaaagcctattatactgtgatttcagttgttctcttgttctagagacaacaactgggagagctattctagcatttagctaccttactatatactatatgaaaagcactgtgatggggtcagggaacacactttagaaactgaaatatgtcctgtgtagctagagtacagtgaggaaaacaaaattgaggccagaaaggtaggcaaagggctagagtctacaagattatctagactgtgacaaggatcatgagcaataaggcactttctgctcttgagttcagaatcttcagaaagtttgtacaagggaatgaaatagttaaatttttttttgaggaattgcaatatgtaaatggataaaaatcatgggaacacagctgaagggaacattcatttgccctgccacgatggtgataaagagagggaaatttaatagggtgatgttttccaaattttaatttcatagtctgagtcattttgctggaagaaagagaaaggaaaacttctttgtgctacttgcctctctggtgggaccgaagccttcatttcacttctaggaagcagcttaacaaaaaaagtagtcagaattactgaatttttccttgaaaataagttcatatttagcatagtccacagcatttaaggctattttgtttccccattgcattgaaacaacagccacacaatctatttcatgttataaaaattgcacaagaaaaagtagagacatgataaactatagtgctttaaaaatatctgaattttgagttttttcttctggttaactatttttataattataatttttaataattaagttacttttcatgtttaaagtattttatcagtccacttttttgaagacattaaaaatgtttcaatcgaaatcacttatttgctctacatggatttgaattagcttgttgattatggaaatgagattcaagaaaatgctttctattgatttctgatgtgtagataatattccagggcagcattagaactacatgcaaatgatatactcaagcacatatttttagttgtaaaattgttggtattattaaaattgctggagggctcacataaaagctgtgtgatgaattagattatgatgtggattatattaatagtatttatctagcacttactaattatcaagcataccaggctaggagatttatattctttttctgttcttcattaatttgtttactcttttactcttttattcaacatacatatacttgaagatatatttatgtatatgtatatttcacaaagtatttgtgacagtagcatttttcttccaagcagaatttaggtagtgttcacttatgtcattagagaagacattgctacaatagcaaaggttatgggtattgaaatagaaaccttatgcaaatataaattagagatatttgaactaaattgaggtaagttctgtaagctcactgtggaaaatgtatcactggtcattaaattctcaaactcagtcttgcagagtaaaataactaacaaaattggtaacaatatatgcagtcctcaacatctacatgcaaggtttataaaacccatttgtttttacttaaattgtttgcctcaattgcagccactctactctaaaacgactcatttccctccaaaggaaaggtaaaatgtgtatttccaattagaagacttgtagataattgcacgaatctccttgacgatatatcgttgattatgacttgtttgggaagtgtgatcatttggaaggttgaattaaatctcctcaagtgagttaaaattcctatcgaaaatggtggtaataagtattcatgcaagaaaattcctaggcttaaagaaacgctgttaagttgaagaagtatatgtaaaagtcttacaaatagaatgacgtcatcaagatgctgcccactcagatgcattatgtagaacatatacaagttaggatataggaggtgtaggttatttaatgtcactgtttctataaggagtagagaggctacaatgtatagatttatcggatcaattagcctgcatattttcttcttggataaaaattcaagaccttatagagagtcaaatagaaatcatcgaacccacctttaattttttggagggaaatttatacagtcagtataaattgtgtgtgtgtgtgtgtgtgtgtgtgtgtgtgtgtgtgtatagactgagtttttgctatgaagaagtaagatttggactatggggtgccaaaggagtgttttcatttcttcttctgtcttaacatgacagttaaaggtcatgcctttggaaaaggaagagggtgtggattgtgaacaggtagtgtcaagaactaggtcatgatttatggtaccagagaaatgggcccttagggaggtcagatggcccatgaagtccaggattatctaatattaagccctcacttgagtacaagcgctgacctaggtgccttcataggaacaacttatttaatccttataacattcctgagctaggtaattagatctaggcattaagatcttctgtttatatataagaaaactgaaggttaggcaaattatccaaatgaatacatctaaaaagcagtaaagtcagaacacagactcttgacattttggttccagccctcttggactcataacatggctacctccctccaaaggatctgaaatatgcatttggcatgtgactttacatttatataaaattgttttatttatgaatgcatttttatcattcatacatattttataaacactgtctgagagcctatggctcatgagccattgcagggggatgtagagagaaggtaaggctatgtgggaacagagtatcccaaaaagcataactgaaaggacaagataaattatataaataagaatgtaaaaatacacatcatttggagtaattggtatgacatagaagtacagttatgcctattaattattagaaaggaagacactaaagaaggatagtaacagtataattgattttaggtctctctatgccagtataatgagtatgcataacaacaataaaaaagcaaaaccttgagattttagcaatagtagttgaatttaatcccacagatatgtcatttgaattacatatcttggtcaaaagaagctagtagaggaaggaaagagttgatatttataacaggtgtgtctaagtggaaacactaaggtctaggtataaaagtcttgtgttacatatttgagatgaaggaaggaacataccatgttttttgtaaatctgccaggtttttttttaaggttgataaagaatatggctcaggctctctgatgacctcaaagttttagcataacatgttcctaaacaagagctacctttccttaacccatatcctcattctcaaaaggtatgaatagtacccttttcttcctttctttatcaaaattacaaaaaagaaaatcatacattcaattacaattatatttctataaattaccatttattactgaatacatgatgcttctaatttgagtattctgcatacatttctctacgaaaggtgaaagtgaaggtcacatttctttttacatgctcttggaatgcgctgaagaacattccatcttgctgacaatcttgttcttggtccccatcatacatgctccttccttgcacgtctcttccttaagtttctcagccaattttactaatttaatttgaacagacacttctcaaaagaagacatttatgcagccaacaaatgtatggaaaaagctcatcatcactggtcattagagaaatgcaaatcaaaaccacaatgagataccatttcacactagttagaatggcgaatattaaaaacactgttggtgggagtctaaattagttcaaccattgttgaagacagtgtggctattcctcaaagatctagaaccggaaataccatttgacccaacaattgcattactaggtatatacccaaaggattataaatcattctactataaagacacatgctcatgtatgtttattgcagcactgttcacgatagcaaagacttggaaccaacccaaatgcccatcaatgatagactggataaagaaaatgtggtacatatacaccatggaatactatgcagccataaaaaagaatgagttcatgtcatttgcagggacatggatgaagctggaaatcatcattctcagcaaactaacacaggaaaagaaaaccaaacactgcatattctcactcataggtgggaactgaacaatgagaatacaccaacgcagggaggcgaacatcacacactggggcctgtcagggtttgggggactatgggagggatagcattaggagaaatacctaatgtagatgatgggttgatgggtgcagcaaaccaccatggcacatgtatacctatgtaacaaacctgccagttctgcacatgtatcccagaacttataagtataatcataatttaaaaaaaaaagccaactcaaacgtttctggatttttgttgttgttaacttgtaaagttcataaaaataaaagttaaacatactactccttgtaaaaaaaattctatttttgaaatttcattgattgcctgtgtatctattattggttattaattctgtgtccttcttttctcccatgtttcttctatcactaaagtactaataaattccaaatgtgtacctctaatttgtaaaattctcctgagccacagatttacatgtacagatttcagaactatgtacccagaaaaagctatagcgttttcaaactcaatacatttacattttactttatattcctctactacttcctcatattggtttgttttagtgaaggatatcatcacccggttgcccaaaatcttctttgccttatcttcaaattgccagttaccgaagtctttccattatcaagtctctcaaatcgcgtctgaaattctagtttccaatgttgggttatatctatttccacaatgaacctcagacttcagccacatagaatatactaccatctatgttgttgaatatggtattttctctgtttagaatatgtattcactccagtcaaagcattcgttgactttccttggaagagctggtagcttccactagtgagtttacagcccgagaatttactttaacatgtaatactttccactaaaattatttgttattgtattgagaaaaaacaatgaaaatactggtatggttctattaatttcaaacaaaacctacttagaaagaaaagtggtcttagaggccaggtgcggtggctcaggcctgtaatcccagcactttgaaagggagccaaggcagacagatcacgagggcaggagatccagaccatcctggctaacacggtgaaaccccgtctctactaaaaatacacaaaaaaaattagccgggcgtggtggcgggcgcctatagtcccagctactcgggaggctaaagcaggagaatggcgtgaacccgggaggcggagcttgcagtgagcccagattacgccactgcactccagcctgggcgacagagcgagactccatctccaaaaaaaaaaaaatagtagttttagagataaaatggaacaacttcataatagtatctgttgaacaaaagactatgaatatttcaaatgtttatatattaatggctaatatgcataacaaggaaaaatgatgtagcttatagggaaagaaagatgaatcccaaatcatggtgggatatgacaacatgcatcttctaatatttgaataaaccacaagatcaacacatttaaggtaatttatgtatataattttacaatataattttaagtacatatagagcattcataaaaaatgaccagatgctgaatcataaggcaagtttcaatacattcagaggattgagattacatagagtaagtgctttgtgtacaaattaatatgaggtagaaaatcttcagatattaggacatttaaaacatagatatttatatttttggaatttcttaaaacacaacttgaaaatatttagaaatgaatacaaattaaaatgctgtttgaaaatgaaagccagtattacaagtgaaacctgtaatttacacacatatatatatatatgtagagaaaaaggcagaaaaataatataagtatctatctcaacaagttaggaaggacccagcacatatatctcaaatacaaaagaagagaaataataaatatcagaaggtaatataatggaaaatattatatcatatattgtactgcatacaacagaggggatcaacaaaaccacaactggcttttttttttaaataaactgatgaaagtgacagtgatgcaacttgccaagtaaaaaaaatagaggattcaaggaaagctaatgtcagttaaatcactataaaccctgatgatactaaaaggatgttgagaggatgttagaaattacttttctaaaaacatagaattttgaataaaatttctagaaaaatacaacttagcaaagatgagaagcgcaagaaaaagacactctaagtaattatgtaactatttaagtaatggacaacaaaaaaaccctttattataaacattcttatagaagtgtgctttcttattatgatataaaaatatctagcaaacgcttacaactaatatcacacttagtagcagtggttccttttgagataaagacaaggatgcccagtatcaccacttgtattcagtgttgtatttgtggtcttggtaaatgcgtgaatgcaaaatgtatacgtgcatatacacgtgaattcatgcatacacacatgcatgcctttttagtaaagttaaaggatttgaatagactagataaaactattattgtgtaagtgtggatagtaaattgaaaggaatgtaccagattattaattttaatatatgattttttattgaggttcctcactaagaaatcaaatgcatttctatatacaagtaatataaaaataccatgtctggtaacataaaaatatcaaatcagaatgcatctactgaaagatgtaaagctatatgtagaaaattctacattattgggataaaataataccatagagtgaaagacaacacaaaatgggaggaaatatttgcaaatcacatatctaataaaatattgagatcacttagaactcaacaataaaaagacaacccaattaaaaagtgagcaaagaggtcaggtgtggtggttcacgcctgtaatcccagcactttgggaggccgaggcaggcagatcacttgaggtcaggagttcgagaccagcctggccaacatggtgaaaccccatctctactaaaaatacaaaaattagtcaggcgtgatggtggcacgtgcctgtaatcacagaaggaggctgggtcaggagaatcacttgaacccaggaggcagaggttgtagtgagccaagatcgcactgatggtctctaacctgggtgacagagcaagactccatctcaaaaaaaaaaaaaaaaaaaaaagtgagtgagtgaagaattttaatacatatttctccaaagaagattaaaaaatgggcaataaccatatgaaaaaaatgttcaacattattagtcattagggagacaaacattaaaactacagtgagatccatcacattccaccatatagctatgattttttgttgttgttgtttgaatttttgtttttatcatactttaagttttagggtacatgtgcacaacgtgcaggtttgttacatatgtatacatgtgccacgttggtgtgcctcacccgttaactcgtcatttaacattaggtatatctcctaatgctatccctcccccatccccccacctcacaacaggccccggtgtgtgatgttccccttcctgtgtccacgtgttctcgttgttcaattcccaactatgagtgagaacatgcggtgtttgatttttttaataaaatagaaaataagtgttggcaaggatatggagaaattgtaaaccttatgccttgctagtggaaatgtgaaatgatgcagttgctgtggaagacagtttggcagttcatcaaacacatagaattaccagatgaccctgaaattcctaagtatatacccaggaggactgtaaacaaatgttcacacaagaaaacacatataggaatgttcatagcattgttattcataatagcaaaaaaatgaaaacctaaatgtccttcggctagtgaataaacaatatgtggtatatccattcgatgaaatattttttagcaacataaggaataaagtactattatattgcaacagtataaatggactttaaaaatattttaaattaaggcagacacaaaaggtcacatgttgtgtgattccatttatatgaagtgtacagaataggcaaatccagagagacaatagattaggagttatcaggggaagaagatacaagagaatcagatattggctgctaataggtactatatagggttttcttttaaggtgttagaaacattctggaattagtagttatctttgcacaaactgaacatactgaaaaaacaattgtagaattttaaatagtaaacattatgtaaattatatcaatatagtaaaaagtcaacacactcatattgaaagaaagggtagaaaaatctctaccagctatcaaagcatattattaggcatattgtgtaagacagtacaatatagacaaattgttcagtggaacacacaaatgtctagaaacagagccaagcacccatgggtactgaattcatgactaatattgtagagcagtttgaaaatgtcatattttcaataaattttgctggaccaatttggaaaaataatgaaattttaccccaactcaaaatgtaaatttcaggtagatttttggattagacgtgaaaggcaaagtaatcataacataaaaagatttttagaagcaaatacagatgtgtatatatgattattttatgtaataaacaggacacataagtaaagatgattcaataggactgcattaaaattaacaataggtgttcaacgtaagaaacagtaagtgagtaaaaaaggaagccatggagtagggaacagattttcacaatatataaccaacaaaggactcgcatctagaatacataaagcacttctgtgaatcgataaggaaagactacccatataaaatgcataaaaataacttaaaaaaaccttctcagatgaatacacatgtgtatgactaataaacatatgaaaatgcactaaaatttgttatgaagataatgtaaatgaaaagtacagaaatattccactaaatagtaaactgatagctaaaattaagcagaaaagaaatattttctggaaaagtgcaacaatggcaattctcgtaacactatttaaattatttgctaaagtagaacataggcatattttctgacccagtaatgtcactcttaacaaaggatgcttatggtagggtaattcttaataaccccaaagtggaaacaatccacatatctgccaatagtggattgaatatgtaaattgtggaatatttatccaatggaatactataggagtaatgaaaactaactgcagttatgagcaacaagatgaatgaatctcataaataagattttaaaggaaaggaagtacacagagagagagatgtagtacatgattccaagtagataaagtttaaaacttaagttagaaccataggctggacaaaaaatccagatactttgacaaatacagataattaatagtttactgagattacagtgtacaatatattcaatgacatcctatgatatgttcaaggtgttgtccctccctggtaacacacagtcaaatgacttgaaatattgtgatgaacatgagacattaatgcagcatgattacaaatctctgcacatgtatctttgtatatacatatacacttacccagtgtgacagaacaagccacaggcttctatgtactggttaacttcaaggtgtttatctgtgtaataattacatgagcattgactttgtgataatttattgagctgtatacatttctatttttgcaaatcttttgtggtttataacgcaccgcaaagaaataacttaaaatatgacaataaaagaatgtatcagattattttcttaggtcgttaatagaactaagatccatggacaaaggtttctaagagatagatcatccgttttacatctttgaagccaggctagagaattcagtaaggtctctaataatatgacaagatccattacttactcttcaaaagtgaagcattgatcttctcaaatgattttagacactagagaaggaatattaatagcttccttcgggatgatttgttaccaattagtggtccagcattatggagattattctggcccaacagaaataacctaatttaaattttctgacagtaagatgcagacacatattcatatgcacatataaaaccttacacaatagtgtcaactcctttcacacttaccgtgttctccattctctttcaaagaaagacatgtgtttttcaaatgtgtagtttcaaactcgattcccaagacaaaaggaaaaggctaccatcaaatgtttaaagaataatctcctttattttataataataatggttagaagttcaatatttctgctcaaacacagaagcaggcaggcatatttgcaaaaggcctcacaatgtttgccattttctttacacaagacaacatttataaaacctttgcatcccatggcaggtgctgggtctcctcttgggaatttgtgctgttcagatattgcctttcatttgaacttcaaacacctttaaaaaatagaggctgcattttagtatcatttaaaaattaaaagccttttatctttgtcattataatatctttcatggttttacttttcaaaaataaatcaaagccagaactaattattgtcatagccagcaaaaacctgaaaaatgggaaaagtcttttaaaatgaaactttggtctgcttctcccataaaaacattaaatttatgtactaattattagagaatttcaagtgcatttaataataatctcccttctttgagaacttaaagaattaaccaaataattatcgtcacctaaataattggaaaaaatattttctagagctagaacatttccttttttcctttgttttaatggcacaatgtaagttaaacacttcagtttaagttaaagacacattttcatctacagaaattatgtcttaaagtgtttattcagccagcagtacttgtaaatagaataatattgtagaattatagcattttattgtctattttttctgaaacaaaaactcttattttctgtctttcctctgttttgctttttatcaggcttggactccttgatcttctggtaacttcaaaaatctggtgagatatttttttctttgggactctcagtcttctgatatttttattttgtttgtcactattccttggagtatgtttttatttctgtgtcaggcttaatccttaaaaaaaaatctcccctcatttccatcttctgagtttgaatctcataagtccagttacatcttaaccaatattagacaatatgataagtccagatacttcttggagattcaacttcatgggttagaagaacattccaaacagagggagcatttgtttcttaaggaaattaaatccccactgaaagagttcgtgataggacagaggattatgcggtaaaatgtggaaaatttttctttaaaaatagatcaaatgcagaagcaagataaaaaccaaagatgagctgacacaaaaattgggtgtttaaaagtttttcagtagtacaatgctgagagtataatttacatgttgtaaagctagaaacacactgaacacactgatcttttccacatggaaactcttaaaatccttgcaacattttcctgggacatgcattacagggatgataaagctgtactggttgagataggaggttttctgtgaagttgtgtatttttccaaacagcagctttgtattcatgtttgaatccacccagtcttttttcttcaaatattattgaaatattgctcactatcacattcatacattgggatcctactatgttctgagtgtatacaagattatcaaacattttatctcatttaatactatgaagaaatctctagcttagatacgtgtgtagactggatgtcccaactcatctgacgcagtgaccctttccataatactgaaccaagaatgagattctaacttgatggactgcagaaatacaatcttgtactccattatttagtaataactgggtattgctggatgggagtgggagagcagtgaaggtccagtatctccttgctgttgttcattatcttcctaaaaccaaatgctttcaggatttctcaatatgttataatcatttcatttccatgtgggtttcatccttcaagttcacacttcccaccaaacagtaccacatttgatagtaaactgtcatgttgaacaaacgttactgaagacttgaggttaaacagaattattgcacacaaacagaaaacttaaagttgtatatcagatctcatcactaagaaagccactgaatgatgcctttcccatagagatgtatgctttgtctctctccatcatcagtgcaccatgaaccactggggtctgcatccctcccagaagaatacactttgacatatttctctctgtcttattccttatatttgagtcctgcaagatacgtgaagaataagttgacattaaaatgttctgtcataactttaaccagcccacagtgaaggcaagcttctgtttattgcgagactagtttagcctttcattgtgcaggcttttactaggcctgagtagaattttgcattacctttggagagtggtaaatagaaatttctaccaaacaaatacctattcacaatgatgaattcagtcctacatatttaaccataaatatgaacaaaaggaacttgaaattatattttttcttagtaatttttttttttggaaacaaggtttcactgtgttgcccatgctggcctcctgggttcaagaaatcctcctacctcagcctccagaatcgctgagacgacagagccacaccacggtccctggctgccttaatgatttttaaaagtattcatcaaagtattagtcaatatttagccgcaaaatgagaatgagggttagccttccatctccctcagcactttctgcaaatggaaagctttgcttaagcatttcttgaggaactggggtattttaggtagcacaaattttgcctccccatttccatcataacaaatcctagaggtcctctatactttttccatcctaaagctgtccttagttgcaaaagttggatctggaccctcctcctgtaattgtccttttgcctaaattccatcatttttcatttaaattgtcagtatgaatttccaattctggatggccaaaatgatcttttgggtggtcttctatcttctaatatatcttatttcaaatccattcttaatatactaccaggtgatggattctaaaacacttattctcctgcttgtttgtttgtttgttttttaatgtgaccagtgtgggaaaatgtatgagttttttttccctagtttgatatacaagttatacaattaagtattgccacagttatccaaaagcaatctttcttcagtacataccagaaatctcaaagctaataaggttgttcagttttctccctttacaagccccaccatcactatttctgcttctgtgaccagcatgatcagtgtgtctgctcgtatccccatttcctattcattcctcaaggccaaattcaagtcccactttctcctggaagtcttcattgttttcaatattgtagtttgattccccctgtccttgaactctttgtttttaagatgacaaagcatagcactttaccttacactgtcatatgttctaaggttcttgtgttgtgtgcatgttttctactcagcaattctgcaagtttgctaaatgaggaaacaatgtcatcttgttctctttactgcagcatacctaacacattgctctatgtttagtagttcctcaatattttcaattaactaacttatttaggatttcacctttacttaaaaaataaccttactgtgtccaagtgttctcattgttcaattcccacccatgagtgagaacatgcggtgttcggttttttgtccttgtgatagtttgctgagatgttttccagcttcatccatgtccctacaaaggacatgaactcatccttttttatggctgcattgtggggtgtagggaggggggaaggatagcattaggagatatacctaatgtaaatgacgagttaatgggtgcagcataccaacatggcacatgtatacatccataacaaacctgcacattgtgcacatgtaccctagaacttaaagtataattaaaaaaaaaccttaaatttccatttctagaattgcttgcttctagttatcattttgaaagaaaacaatgctgtgaatgtgaaggatggttaatagtatttgaaaaacattctgaattatcatgatacactctacaaaactgagtgccatttgagagaaatgaaaataaatgtaaaattaaaaccagagtactattgaaatacaaatgataatatgcaaacttagattccaaattaaatacattaaaaatactccattaaattatgatataattctcaagtaaaaaaaatatttactctggaactaaataccagcagtaaaaatttacttcaaagtaaagaactgacacttcctacatagcaggtaaaatatttacagaaaatcttattgcagcattttttcacttaaataaggtaatgtgtttaatgtttacgaatcactgaattttgtatctgtgtgtgtagttctggcaatttgttccaattcatgtattttattttctgcacctggattttggaccttttaagaggtcaaaataataacatatgcacaatgatgtacactcaaagagaatttgaattttcaagctttcaccgtttgtcaggtgcaatgctaggtgctttatctgtgtattctcatttcatgcttccagtctcactttgtaaagggcattttaatatcactttagagatgagactaatggtcagagagcttaattagttcatctacagtctcatacttaatgaatcaagatgctgagatttcagtctatcctttggactctaaagactatatatactgagatactattatcctagtaagtttttaataaaacccaattctacatatatttgagtagtaaccctgatctggagctcttaggaaagtttatacatagatagttaaaacaagattttatcttttgtacttatatagttattgagaaaaattcagagatagttactttaaatccaaggggaaataaattgccacagcctacgccccaattttggatctgtgtatacatatcttttatacctgtaaaaccatgtcattaataagtgaagcaaaatctatagaaacccacttaacccttctgcagtcacgcaatgatgattaatggctgtttcatttcctcattagtgttctcagttttctaatgcaaattttatgcaagtttggccgtcctgaattttttttaacagtattataggtaacttgcaaattaaattcatgtgcttagcattagtcatacaatatctttcaaataatacaaattaattcaaatgtagtattgtattttccaagaattgaatgctatttccatctagagagtttaaaaagtgtatttcttttatatgtaccaaaaatattctgatgttttatctacaagatactctcccctcaaaaattaaatgttttgtgttaaaatgatgttactgttttcaaggttgttatgttatgtatttaaattgtagagaacaaaccaaacatatataccaatctcacagttttgactttttaagcatatagtatatgataatgctttgcacattttaacattatacacagttattaaagttgttattactgctagtatgctatcctgatgtaaatttatgtcatgatatgaacataaatcatgtgttccctgaccaaaggaaggaatcatactctcatgaatttactaatatgttcgttctctcacaatttttttttttgttgcaaaccatttgatagggattgggtaatataaaaaggatatgacatgaccccaacttcaaggaccttaattttatgtttcctgtataattaggtgcttttatttatcatttttaaaaaagttatttaaaattatgagcatttgctttaagccttttattccctttagcttgctgggatagcaggttattagaaatcataaggatggtgagagtgatactattggtgtgcattaatatctgggtttctttctttattgaccatatagaaaatcatattttccttccaccttgcagttaggtgtggtcataggattacttttggccaagggaaaatggaagtaaagtatatcacttctgtgcagaggagataaaaatcctctatgtgcattttcagtctttctcttcctctgcaaaggagattgtagaggaggcatgcatttgagacagtagagccacaagactgaatcttcctaatccctgagtcacctgatggaggacagctgcagtgaagatactcccagtttcacagctaacttatctgaacaacagatgaattctgttttcttaagcaactgagttgcattttatttttgttttgtttgttacagcagcataaagcccgcccaaactactcaaacggaaatgggagctattatgtttgggtatttctgaaatctagagccacgtttccaaagacatattttgacaattttattttagactttgaaataattctctcctgacttttaccaaataacctgcagtaccatttacttgtgtggtaaagcaggcaacttaggcctccaaaatagaagacttgggataaatagtactacaaattttaataaaaatcaactatgaatcacttaacaaatgtcactagataaactaaaaaaacatgaaataggaaaaaatctacaagatacatatctacactcaaaatggtctactttctaataggaaaatggacagcattcttttaataatagttgaagttctttaatcttaactgtcattaagcaacaatccatattaaagaccatctaacaacaatttctaaattaaaggagccactgtatcttagataattttattttgatgtggtgcccaaagtttactatgttcaactcttgccttagtttctggaatgacctgaatcaccacctgcttcctatgtctttggctctttttaccttttagagtggaagtctccctctgctatttcatttttactttttaggatccatagtaatttaaatgccaccaacatgccaactagcatcattcatttctacaacagctaattagttaaacttcttttcttcacacataggactagagatcaaaaataattgtatacaattacctggaattaaaaggatttcaatttatcactaaggaaggaggcacaacaaattatgactcataaagtattttgtgtcaatcactaatagcctctaaaatattcatgggacatgtattagtttgttttcactctgcagataaagacataccagagactgggtaatttataacgaaaaagaggtttaatgggctcacagttccaggtggctgggggagtctcacaatcatggcagaaggtgaaaggcacatcttacatggtggtaggcaagagataatgggagccaagcaaaaagaggaaaccccttataaagccgtcagatcgcatgagacttattcactaccacaagaactgtatgggggaaactgcccccatgattcaattgcctccccatgggtccctctcacaacacatgggaattatgggagctacaattcaagatgggatttgactgagaacacagccaaatcatatcaggacattaaaatctacctctataaagtttattcaatgtgtaagaatcagaattcctacatgtggagttcaacccaacttgagaggttacatacctacgatagctttcattcactgagtatcagcttgcttttcacctaatttcaccatcaggatagcattcattaaacattcacaagacggcaagtttcatttcagaaggactaccagtgtttaaacatgtttctttggcattaagcaaaaattacattatattcataattgcccctcagggtagcataggacttatgcatttgttaacactccaaggaattgacactaagagtgttaataattggactacatggaagagtgatcacttagtgggaagttaaactatctacttttttattttagcctctcatctgacataaaatatttatgaatgcttttatgaagatattttcatttaatttaattttcagacagggtctcactctggttatccaggctagagtgcagtggtgcgatcttggctcattgcacccttgacatcctaggctcaggtgatcctcctgcctcaacttctgagtagctgggattataggcttgtgccatcacgcctggctaactttttgtatttttagtagaaatggggtttcagtatgttgcccaagctggtcttgaattcctggacaattcacctgcctcagccacccagaatgccagaattataggtgtgagccaccacgcccggccaagaataatttatatagtgattctaataagtctgacattatctatcatattgctaatacattgaaagaacgttttgtggttaattaagcacacatttgctgtatgatttcttgcctcctgtcctaaatcaagcagctcttctccaggtgttcaccaaaatataaatactatcctatagttcttccctaatttcaaaagctctctgcttattattctctgtttgttattgtacatactttttaacaaaaccttgggtactcagaacactgtacttattatttaacaagtattatgtgttcttgatacagaacattctacaattttcagctgacactcctatccatttttcattctcctcccttatttgtaataagagaatatttccactttgcctgagcctgtgtatcattcttgctatacaaactctaatgtcaaagaaagatgtaagccttgaaaagttatccacaaacatgttgagacatatgaaaatgtcttttcacatattatttctattttctagttgatgctgaattggcttaccatttttgcaaatgagaaatagtggaagatgattgagattcctgaaatgaaatattacacaataagtttaactgtttaacatttaaactaaaatggtttaaaaaatcatgcttaaagaataacatagcatcttcctaaagcactgaacaatggtaagtggtagggctgttaggcaggctttaagggaatgaggttatgctaatatggagtatagacaaataattttacactgtcctgcttatggccacctacctctgaatgggaatcccactttatcttcatttcttacttctgagataccccttacagcctgggaaggtgtatgatttggacatgtggaagacagttaaatgcttggaatgtgtgcatgccaatgtcagtgttatgcggatatccgatagtgaagtttttttggtgtaggatggaatggagttaaccgaggaggttctgagacagatcctaatagaagattaattatgggataacattttcttggtattatagcaatgtcaatgttctgtttaatagatgtacaagttgtccttaaaaaacaatgagaaatttcttatttttctacttaaattctaacaaatcaaattaatactgtttcaaacattcatagccatgtagttactgtattacccctaacgctggcttggttgggatttgtcttgtcttttacatgactgtcctgaagtcatctgcttccctaaacaatgcgtactgctgggaaagacagagagagaatgaaacatccaacgattagagacatagccaagttttgttgtgagggctatcttgaaagaagaattctcttgtaaagaaaaaatgtcctacagttccccaaagtataataatttgtcactaattttcacaaaaatatttgtcaccacagaaaacttctcaaatgtttattcttcttgaagaaaaataaacatacacatttgtttctttctacaaacatgtagttgaataattacaaataatgtcaatctggaaatgaaattcaagaaaccagaatatgagacaaaaatggaatggagataaggagaaccaacttattaagcaagccctgaatgtagacagaggaagtgctcagataaagtgcttatgtggttagagcttcagtgccttttctcttagcctttcttagtccattttcacactcttgataacgacataagctgagaataggaagaaaaagacgtttaatggacttatggttccacgtagctggggaggccttacaataatggtggaaggcaaggaggagtgagttatgtcttttacatggatggcagcaggcaaaaaaaaaaaaagcttgtgcagggaaactcccatttttaataccgtcagatctcatgagacttattcactatcatgggaacagcatgggaaagacttgcccccatgattcagttatctcttaccagatccttcccagaacacgagggaattttaggagctacaagatgagatttgattggggacacagaaccaaaccatatcacctttgaagcaaaagaggatgtgttaaggacactctgactaacctaccccagatattttaccagctctccccacttatgcagtctgaaatcttcctgtttccctcttgataatgtgggtgacaaagtagggaatgcaggaagggacaccaaataaactctgcgagtctcccaaagccaggtagtgttctgaccactcctctgccattgatcttcattgtactgtagcttagtaatcagaggacagtttggaagttagtttgcctaggctcaaatcccagctatatcacttgttacctgcatgaacttgggtgagttatttaatgtctgtgtacctccatttcctccactgtaaatggggataccttaaagagcagttgtaaagatattacatgcaacttttgtagtgcttacaacaatatcaggcaagaagtgttgtctatcatttttatcaccttcatccttcacattttgatctaatgctttcttcaactggatcagaaatactttccaagcattctgtgaccttctttcatccacttaaggatctgttaatattgagtaaagacctcacagttgaatatagttggctgctctatacaggatttaattatgggagtaaggctatccaagccttactacctcaatatatattcatatgtacatcaggttatttccattctgggaaagaaagtacaagtgacgtaactctggcaaaggcctattaagcacacaacttgaacactatgtttattgagttgagctttgagagatgataaacaccctcaaaagcatttaatctgtaactgtgatgtttccttgaatgactatttcaaatattgacctaagataaaagatatatctcaaactttggatgcaacctttaaaaaagaacaggtacattgaaacagagacaactttaaaggtgatccccaaaaatgtacaattcacattttctaaagactgtactgaaactagaagtcaatcacatgaatttagctacaacaataacaaaaaacatcttaatgtttttattaaaagaagacataaataattttggccaggagtgataagtggtggccacttctattcaacgttgtactggaggttctagccagggcaattgagaaagaaaaagaaataaaaaggatccacattggaaagaatctctatctctagattacataattgtatatgtagaaaatcctaaggaatctacttaaatatatatcagaactaatgagttcagcaaggtttcaggatacaagattaatactttacaaaccaatgatatttctatacattcgtaatgaacagcccaaatatgaaaataggaaaacacttctattcaaaacagtatcaagtaaaatacttaagaataaacttaacaaaagaggtgtaaaactgatattcagaaaacttcaattaatggggaaaaccaaagatctacatgaatggaaaaaatatattcatggattggaagacttaacattgttaagatggcagtattccccaaattgatctgcaacctcaatgtaatctcaatcggaatcccagctcacttctttgtagaaactaacaagctgattctaaaattcacatggcattgtcaaggacccagaatagccaaatctttaaaaaagaacaaagtaggaggactcatagtttctgatttcaaaatttactataaaaccatgagaatcaatgaagtatggcattgttacaagcatagacaaaattggcctaacgaataaatcaatggaatagaattgaatgtccagaaataaagccataagtttatggctaactgatctttgacaaaggtgccaagataacccaatggagaaagtaatattttattcccagcaaatggtgctgagacaactggatagtcttatgtaaaagaatgaagtcagatccctatctcaaaccacatataactcaaaatagatcacaggcctaaatataaaaggcaaaactataaaattcttagaagaaaacataggagtaaatctttgtgaccttgtgttacacagtggttcttaactacaacatcaaagaaaaatagataaattgaatttcattgaacttaaagtcttctgtgctttaaataatgccatcaaaaatgtgaaaacataattcaaagaatgggagaaagtgttgtgaaatcatatatccaataagacattagcatctaaaatatataaagagctcaactcaaacataaaaagacaacccaatttaaaaaatgcaaatgacttgcatagaaatctctccaaaggtatagaaatggtcaaaagcatatgaaaatcactagttaacaaagaaaggcaaatcaaaaccacaaggtactgcttctcacccactaggatgcctagaatcaaaaagtcagatattaagtgttgtcaaggatgtggaggaattggaattgttatcaattgctggtgggaatgcaaaatgatgcagacacttcagatgtagtttagcagttcttcaaatgattaaacacagcattactacgtgacttggaaattctactcttaggtatgtacacaagaaaaatgaaaatatatgtctatataaaaacttgcccccaaattccgaggaacattattcataacagctaaaaaatagaaacaatcacaatgtccatcaattgatgaataaattttttaaatatggtatagattttacaatgctatttttccaaaagtaaaagaaatgaagtactgttacgtgctgtaatatgaatgaatctggaaaacattattctatttgaaagaagccagttacaatagaccacatattttattattatgtttacctgaattatccagaatagggaaatccatagatttggttgccaagagctgaggaagaagaagaggctgtctgctgataagtataggatttcttttggggatttaaaaaatgttctaaaattaagtagttgtgatggttacacaactttgtgagttaacaaaaaaactgctgaattgtatactttaaaagggagagttttatggtgtgtaaaatatatcttaataaagtgattccttaaaaagggagaaaaaaaagaaactgggataaatatgatatattaaaacttaaggagataagactctctaacactcacacataccttaatctaggcataaaccaaaatatttaaaaaatcatatgtacaaaagccttgcctggtattcacaactcaaattcttatgtaagaactcagattttattgttttcctactctttgattattactgttcattccacatttcaatgcactaaaatgattcagtgctgttaatttttattactaatgtgattaattcaccttccaacaaacatagaaatgacctgaatgacaaacaagtgagatatgggtaagaatttatgtgacctcagggtctatctctttaataattttatcagggagagtttaaacacatgacatcataaatccagaatactaaagtcagattgaccaagactttagtaaagttgttcatttaactcccgtagcatcatgactgtatcttagcaaaatgcgggcttttcctatcaacttgtcatgtctaaggaattaaagtaaaaaatcctgttctcatagtggaaaataggtcaaatatcttgttttgaacctgtgccccctatagaatagaggcacatacttcaggctttattgtggcatattcttataaattatttctacaaaggagcaagactattttctctctctcattaaaaatagtatagtccttatactcttttgtccccttgtcaaatttagaagagaaaagtttaggggatctattttattattttgcaatatatttggtgggaatgaacatacattttataatttttaaatttaatgataaaatctgagatgtcttgaagatattccatgatcctctattgcaactttctatactctttttaaaagatgtttatccacactttagtattttatttaatttttactttagtttcaggggtacatatgcaggtttgttatatagataaactcatgtcacagaggtttgttgtacagattattttatcacctaggtactaagcctcgtacccaacagttatttttttttgtacccttcttgctcctcccaccctacaccctcaaatagtctccagtgtgttgttcccctctttgcttccatgagttcttaacatttacctcccactttgaagtgagaacatggggtatatgtccgtgcattagtttgctaaggataacatcctccactccatccatgttccaacaaaagacatgatatcattcttttttttggttgcatagtattccatggtgtatatatatcgcattttatttatccaacctgtcattgatgggcatttaggttgattccatatctttgctattgtgaatagtactgcaatttaaactcctgtgtatgtatgtttatgaacactcttattttttgcactgtctcaatgcagcaaatgaagccagattttctcagtagtagtcacctgcatgggatttagattcacgtatggaggtggcaggttattcccatcacttctaactcaaagcaacacacagtcattctatatatgtttactaccctgccagtattttctaagtctgtcctaacttctgactttcggcttcatgtccttaagtaaataagaatgtaaaacgcctagtgacatattcttggttggaacatatatagctatggaaatgatatttttctccagtaaactctttatgttccttgagattcagttgtagggctcttttaatactgacttcttctgtgactgttgacaatttgcaatctctgtatctgagatttctcatctataaagtgagagtataagtgtaaattatttccaattatgaagatctactttggatgaaaatgctcactgctaccccttttttatacctagtaaacgattataagatgttgatgcaggatgtcactttgccagctggaaacatctggggtcaacagcacctctgcttgagttttgctcatgcctgctgggctagtttcacccactcagccttgcagtctttgattggctcgtgctaccaacacagatcccatgcctgccaagggtgagccaggtgtggagtggcaagggtgtgtaaacaatcaagcgtggggtcctgccagtgcacacagttagtcatgttggctacttgagcagcgctggcagctccacgcactagcacaggtggcagcaccatgagagactgagactggaccaggtgtactgcaagaggcttctactgtaggaccaatgtccggatgaggggaatgcagtgcgcctgaaagcgtagagatgccagaaaccgcagaaccccaaagagggtgttaccgaatgacacagccctgacatggggagccctgaggtcggggatcccagaaggtttacagcccttctcccctcaccgccgcagcatagcgagctgtgagggggatgttgcagagcaggtgtgtttcagaccgtttgtgttacaactctttcagtcctgccaccttgttctggcctgcaaatcctgggctggcttgcctcgctgctgcttcctgtttggggaagctgcctggtaccagcagagggcaggagggctatgacgttaaagcagctctggcttggggaatccagaggtctgagcccccagaaggttcaccactcttcaatcctgtggtccaggagcatgtcactgcccatgacttagcaagctggccagaaatatattatggcttttttcactcccactgtttggtggatcttgagttcttgtcccatgtccaagaagaatgaggttatgtggacaactggaggttgaacatggtggagaggagctttattaagtgacagcacagctctcagcagagaggttacctgaagtgggtagctcctatctgcaggcaggtcatcctcacaagtctctggatctggctgagtctggagatgttatgggctcagaatggcagaagtgcatgctgttttgtcagtgagtggccatggacaggcctggaaaaagcaccattcaactggccataagacatcaaggaagttctgactccaggtcactgactccacccaaaactggcatcctggcccccaggcttcaggtcatccctggcttgaaggtgggtttcaccagggacccacagcttcccacttaggaacctgtctgcctccggctgccattaatgtgccctccatggtgtccaggctgtctttgccgagggtcaacaccaggcacgtgccaagccaatctcagacacccagcctccctcctgtgcttgttggcacccaaagttttagcctcagaagcagtttccagagggggccaagacagcaggggaccagcatgtcagtgctgcccccaagtacaggcacacctgaccaggtcacaacagcacctgggcttagctattgggacatgtccacaactttgctccaccacagagcaggtgcttggagcagggagaggccagggagtgggtgcagaggcacttctgagcctgcaggggaagggggcttcctgggtctctgagagcacagggatgcctgggtctggagccgtggctgggcagctgcagctgtgcctgggagcaggagctcccacctcactatttagttgggcgcagggctcccactgggatcacctgttcccctcccccatcagttccatggagcacacagccccagctgcacctcccctgctgcagctggcatcctcacagcggccactctagatgggcttctgcagccgtcagtgtttattttttacttcaatgcatacaatttcatatagagatgaacatgaaactcctgctagcatgatagaatttttctttaatgttgctattttcatactcatgttttcaatgccatctcctcttataaaagaaaatattttcatgtactttctttaaagaaagccaatgtataactcaagtatttgttgtatttgtgtctatttcttgataaactaaagaaggatatttgtaaaatatatactattttctgaaaagagcagaattcgtttagttagcatcgtttaacagcaatgcctatttcaccccagtaggtaaggaaattttgtgagggtattttttggaaagctgaggatgatttgaatttatacttagatttacaaagacaaaatggatttttttatttcaagtctttccaatgctaattttatttttaattttttgattcctataataatatatattttttgccctaagtgttttacagataaaagtatcaagtggtttgtatgttcccatattatttttataaatggagggtctgagaaatcaaaaacaagggtttaccttgctaagattaattccttccatccactgcacagaaatctggcttggtattcccattattccctaaattgtcaaagacttgtggagctaagttcatgggttaagtgttccatatttgtaataaaatattcccctgaaatcataagacatctttgttttgaatcattccttccatgtctgctgttttcaaaactaacttgttaaacactggttgaaatgaccacaaaagtaatgtaaacaaaatgagtgagttttatatatgcttacattgaaagatgacttcattaaaaagcttcttagctcaatatcatgaaaatggccatactgcccaaggtaatttatagattcaataccatccccatcaagctaccaatgactttcttcacagaattggaaaaaactactttaaagttcatatggaaccaaaaaagagcccgcattaccaagtcaatcctaagtgaaaagaacaaagctggaggcatcacgctacctgacttcaaactatactacaaggctatagtaagcaaaacagcatggtactggtaccaaaacagagatatagatcaatggaacagaacagagccctcagaaataacgccgcatatctacaactatctgatctttgacaaacctgacaaaaacaagcaatggggaaaggattccctatttaataaatggtgctgggaaaactggctagccatatggagaaagctgaaactggttcccttccttacaccttatacaaaaatcaattcaagatggattaaagacttcaacattagatctaaaaccataaaaatcctagaagacatcctaggcattaccattcaggacataggcatgggcaaggacttcatgtctaaaacaccaaaagcaatggcaacaaaagccaaaattgacaaatgggatctcattaaactaaagagcttctgcacagcaaaagaaactaccatcaaagtgaacaggcaacctacaaaatgggagaaaatttttgcaacctactcatctgacaaagggctaatatccagaatctacaaggaactcaaacaaatttacaagaaaaaaacaaccccatcaaaaagtgggcaaaggacatgaacagacacttctctaaagaagacatttatgcagccaaaaaacacatgaaaaaatgctcaccatcactggccatcagagaaatgcaaatcaaaaccacaatgagatacaatctcacaccagttagaacggcaatcattaaaaagtcaggaaacaacaggtgctggagaggatgtggagaaataggaacacttttacactgttggtgggactgtaaactagttcaacccttgtggaagtcagtgtggcgattcctcagggatctagaactagaaataccatttgacccagccatcccattactgggtatatacccaaaggactataaatcatgctgctataaagacacatgcacacgtatgtttattacagcactattcacaatagcaaagacttgaaaccaacccaaatgtccaacaatgatagactgaattaaaaaaatgtggcacatatacaccatggaatactatgcagccataaaaaatgatgagttcatgtcctttgtagggacttggaggaaattggaaataatcattctcagtaaactatcgcaagaacaaaaaaccaaacaccgcatattctcactcataggtgggaactgaacaatgagatcacatggacacaggaagggggacatcacactctggggactgttgtggggtggggggagaggggagggatagctttaggacatatacctaatgctagatgatgagttaatgggtgcagcgcaccagcatggcacatgtatacatacgtaactaacctgcacattgtgcacatgtaccctaaaacttaaagtataataataataataataacaaaagaagcttcttagcaacagtttgattattaaaggggtccgtgttagaattatatattctgtgaaaatcgcaatacacaatagtcttcagctttgattaacctctctttgaaataggattttaatattgaagtgaaagagctcattgttaggaacaaatacattctcttaatactgcgatgtattattttctccatccagatgaagtatctctatctagattctatttgaagttgagggtttccacagatttagttaatgtatattttgtcttttcagttttactggaacaggtgtttgttctctgatttcagaaatcaagtaaaactgtccatcttaattttttttgttgtagaaaatatattttttatttttttatttcttggctcccaccaaggcactaatacggctttctatcactaatgttatgaaatgatagagaggttatttataacacgtcatttctgcaaggacttggaagtaagataatcaacataagtcaattcaacaaacatttacagagcattaactgtatgccaaccagtgtcaagccttgagaatttagagttgaaaaatgtattgtcttccttcaaattgcccgcaatatagtaggaacagaaagtcataaattgcagtaccataattgtacgcataccagtggaagaatgtaatcaaaacatcttgctttacatacagaaaatgtgaagtccagtgacataaagtaatttgcccaaagtcacaaagttatttggacgaggatccagcataaacccaggtcttctaatttcttctctacgaaaccacagctaaattctgtaagaaatgaattattgctggtactttcttcttcccctaaaagctgaaaaaagaaacacaatagtcatgaacataagccaacaataaaaaacataatatactaaatattttaattcttcctccatgcccaatttacccccctatttaccacaacatctccatttttcatatcaggataaaggaaggaaaggaatattgagcatctaccctgctaaatgatatttctcaaactcagaaggaacattgctgccttgaacttttagatctttcacctccatgggctctgccacccacctcccaccatcagcagagaactcacagctatcagtatgatcagctccaccactcttcagtactcactgtattttctcttttcattgttagaatgttttttatttatttgtttcctttagatgaatctgaattttctgcaagatatgctaaagaaatacagggttactttacttttggcaaaacctagctaatagtctgaattacattactgagtaatcaatattcttactgatttaaactaacaaggtggtattcttattgtcattataatgttcattttgtatatgtgtatgccaaaatatgttccatgccaataataaaaacttttaaaatggtttcacatttgccaagaatgatatggctatggacagaagccaagtcaatccttgcagatttcagtttgtctttgtcttaatttttagtgatttagcagagcagtcattcctgttgctgtacaaaaatatatcaacctaatgacccttctctgaaaaacagttacaagacaacatgtgctatagccccatggtaaaagtagcatataaatcaattaagagtaaaaagtgcaacttcatttcagctttaaatacaggaagctttagtgaaggaaatcagtgtcccttgtattcaaatttttttttttttttttttttgcgcaagtgaacaacatcttgtaaaagatgtactggggtcattgtgccatttatatatctgcataagctacactgggtccaagacattctactttggagataaaaaccagcttgctggtgtctacaagtaaggagggtaacctaccttcctggaagttcttttgagagcatctcacacttacactgtagaaacataagtttggagaaagacatcccatgattaatgaggaagcctataaaataagactctccaaagccctgaattgtaacattggagacaagtggccataattttattgagatctgccaacatcatgctgaagattagttctaccaatattctgttctctttcctcccactgtccctgtaataaaagcatgaatggaatagtttatataatgtcctcatctcttgaaacggtgatttatgaagctctgcatttatttttctaaatcgacccatcctttcaaggaccagctcaattttgcttcttgcataatgtctcaaaatgtcaaaaatctctcatagtcttggataatattcatttatgctttgaaccctatagtttgcacttggcataatctgttgttataatatttttctaaatatttataattcctttcttctccattaattgtaatcaaggacaaaattatggctcacatttcttgctgtcctccataatgcatagcatagagtctagatatctaagaggacgagtgacatttttgatgcatcttacttaatcattcctaactcattagaaatattccctttccccattctaattttcttggtctatgattctgttttatttcaacaatatagaaggagaatttgtgtctttaagcttattcttaggcagacatagagtattgtattaatacacattttctgtctgaagttttctggcagaaataagctgcaagactgtgattatttcatttctaaaaaaccaaaggtggatatcagtgcaataggccatttgccaagtagaataatcttgcccatatacaattattttatttaaaagtttgtgcatgacttgatgagtgatgaatattaggattgtttgtcagggattacagaaagttaaactggacaagattagcgactgatttagcaaatgagttttttcattaatgttttgtgtatttcttatacaaggatacatacagtaggtcttttcagttctttctgtcactatagcaataacataacctattaaaaacaaataccataaaatagttttttctctttttgaaagctatgctagataataaactacttttaaggcatttcttaggtaggtctggcatattattgagttttaagtgctcagatgaagcaagaaaatctgcattattctgagaccaatggataaactaagagaacttttgtcagcctaatttgtattataatccattgtagtttctgaaggatacatgtacgttcaagaatggcagtgtatcatagaatagatgtgttatatagcaagatctgccgtctgccattgtttgagtttggaatgactttcttgacaagctgaggaaggaacctttactcgtggggtagtatttcttccctgcgggttcaatgtgtttttgactgaaagagagcatcatgcttttggcaagtgcatgaattaaaaatattaatgaactggagtaaaaagtaaaataattttttttaattaaattacaatcaaagtttatgttcctattcagatttgtcagcctatcactgtgtccctaggctgaagcaataggagaaaaaaatctgatgaattttatttctttgtgcttatggttattaccgaattcttttaaaaatgagaaatgttattattttctttctcagtccagatggctactttttaatgttcattgataaagtaaatcagaagtaagagacaaaaaaaatttaatggatactcttattgttataattttatatttggtttcaaatgccatagaaactcaaaattaaattccgcaggttaaaatcaacgaaaaacttgtttaaatttttgagttttgctaagtcggtgcgagatctcacaatgctaatgctgaattgaatgctaaaggaaaaattatgtacattcatgcatcagaatgacagtatttgtgcccagggagatgctgttggcttattttcccagtgaacaacccttcatatagttagatgtagtggtttagctaggaaatcatgccatgactctgaatcaggcatgtctaattattgaggctgtgtgaatccagctcaaaataagagagctgtttgaaaggcagagtttttcggtctctgcactattgacatttaaggtcatgctatatatattacagaacgcttagcagtgtctctagtttctccccgctacatgtagtagtaactagccagttctgatcatcaaaagtgtctgttgaccttgagaatgtcaccatttggagagtaagtttaccctttgttgagaaccactggaataaagtggacatagctccaatagaaatagtatactctcagtatatgtcccatctctgagaatttatcattaaaacaagatattaagtagtctaattataattattattattaggcatataattttattttagcctgtttttgttattgttgccagagttatatgtttttctaataatagatacaaagtaaataggaacaaagtgcatatattaccaacgaagtacagtaatacctcatttatcatcgttggtagattcttggaaactgccgtcttaagtgaaacaacatattaggaaaccaattttaccaaaggttaattgatataaacaagaatacagttcctatggcatatttctgctcacaaacacatcactgcattttttaaagattcaagcacttaaatcacttctaatattaaacattaaaataaatatgagctatacatatgttttagaatgattagtaaaaacaataatttacctgcttattacagtttagggtctcgcatggcctgatcctatccaggtagctcggcacaaggtgggaaccaactctggacaggatgccattccatcgtagggcacattcacacgttgtcgtgtgcatacacacacacacacacacacgctctctctcgctcgctcgctctcagactaggaccatttagatgtgccagttcacctggagagaacatgcaaattccatacaaatcacggccctggctggaaatcatgtcttcttctcatcaatatttttagcaaacggtattgaatgaaataacattattctagaaactgctgtgtgtgtgtgtgtgtccaacaggttggtgtcaataatgttaatgtggatagacaactttctggatcaactcagaaattattagtatagtacttcataccttaaagaggaaatttgaagatgaaaatggaatttagttaattttttaggaagtaaaattttctaattatcttatgaatctcctaaattaaaaaaaaaacagaatagatgatattaaatctttgcatggagtcagaatgacctgaattaagaagcaatccttcaaatccaccatgagttgctttccaattcataagtgagaatcaagtatttgaaataaaaccattaaaatttctgtttttacatatttaccatgaattgaattttgttactgcaggcctaaatcttataatgggaaaggtgattaagtaagtttcttaatcacctttcccattgtaagtacaagtacctcttgatatgtggaaagaagttaagactaaattttagagttctgggctttgccttctttttgctatggattagctatgtaaattagccaaataacctagtcttatttgagctttagtttctataaagaaaaaaaggaaaatggagtaaattccctctcttaccttcattataattttgtaacaaatgatactaagtactaaaatgtatttgctacacagataaattcagattgctctgataatctttttgcttagcaaaatggcattcatggtaagaatggcagagacctattctatttttttttttaaagaaacaaaatctgcttttaaaaagctcattggatgtaatcagcatgatgctattcactgaactatagcgccttcagactagaagataattttgtatatatttacataaatgcgtgtacaatgcagaaaaaggatattctattaatgggatttaattaaacaggtttcctcaggaagcatattcatacatacgtatacatagagaaatcaatctgtaatggaatatctctaaatttacaaaatatgatttaatgacgtctactatatcaatggtgattacagtacttaggtcaataatacagagcaaatagtactataaaaatttgcccctttaagatttgcttaaatttttccttctgataaacagaaatgatctgctccatcacccaaatactatctttctcttttagaatggctgaatgtgaaatgtactacttaataaagcagatgcaaggtttgtagtatgtattaagatagattgcttatgtgaaatggaaatgaataccataaatcaaagtagctcattatttgtttcttgttttatactaatttatcagttttatttttagttttttattgttcaggtctatagtttactacctgagtgttggcctacctgtaaaatttgataacatgtatgtctttaccacagcaaaagagtgcacatgtggtatcttgccatttcagttttaagagattattgagaaagttatagaaagtcatattagttgatgatatcttaacatttattaaaattaattttgggcattttataataacaatacttcaaaatacacaatccaaaagagaaataaaaatataggggtatagaaagttgtaagaaaatactaagcattcatgactaagcatattttaaaaatattcagtttgttttggtatttgaatcttgcaaaaccacaagttcttaccttataacttatatgccaatttattcagagtaagaaaatgttttataagatcttaaactattgacattcattcactcatgaaattaagactgcagacttgaaaagatataattattgtcctcaagaagctcatggtataattgatgctatataatgtaatctggagagtctctaagaaagatcttctgtgattaacaaaatggaagggaaaatattctagtttgcagaattataattttaaaaattgtgttttttaaatttacaatgaggtgtaactaaacaaaaatatagaaaacacaccacgtttttcttgcaatggcattctgaattatatttttgaaactccaggtattatgcaagtttctaccaattttaagtgaattttcatcaatcaagagttatctgacgggtatagacttatctctctttttaaaatttaatatagtttttttaatgtctgtaaaagtaaaacagttttgttgtctctacactaggaaaaccgtgaaatactcttgaggactttgaaatcgggttgtcctctgagagttatgttagtaaaattcacactcaatgacagtgattagctcactagtataggaataatgacaattcaaaaacaataatggcagtaataatgcaaataattgactatgtaatgtgaatccagtcagaagtcctcccaaggagacatggctgaaatttaaatatattttagtaagaataaatgaaatatagtctgtctcatttgggtttcttctcttatctttcaccctggatgatctctccagcaaaagtatgagggaagagaattgccattctgaagagaaactccaggtagagagaaagagtaaacacatagctgaatgcatcactgatggaatgtcctaaaattaatgaaattgggcccagcaactgcagaactttctgtaaacatattatttctagaaatatgttttgtcaatttgactaacgtaggcagaactatagaactaaatcaacgtagtaatctgtaccattattggtgccagttcttacggagacatctctttgtcattgaaagtctctttgttcttggcttacagcaagtctttataagcttgatcctatgtttttatctcgtatttctaaatgaaagaagtacattaaagggtgatcagatttcttactgctaggtatatgtctatgagaagtaaaaagttacaatgaaagagagaaaataatgagtactctaacaggactaaggaatttcaaaacatagcaggtggagtcattgattgtgtggacaaataactacaggtttcaatagtcctttatatagcagaatgcaggccaatagaatagtggcactgctaactctatcatcaaaaataagataaacgtacatgatgtgactataagaaagggtttaagtattttatacattttagaaaaaagttgtattttaaaggaaaaagcttaatttattggataattcataggcaaaactattttttgctaataacttcagaaaaatgtaggctattgcattattttagagatggtatcctagataatgtaaaattaaacaataatcacgctgttattccagtgagtatgccagcattgtttaggaatgaattatttgtaccggttctattgtacatcaaatgccattttcaatcaaaacaagcaacgtcctctactttgttataagttctattagagagggattacaaatgaaatatatctcatctctgacataataatttgtatcttgtgtaaatcgaatagtgacttgaagggatttattcacaactgtgatctctaaggccccaaaatagataggctgcccaaaaatattcttattttgttttaacagcacactggttttaattaacaatacccataattataattttcagaatataccttacatgtacataaataccatttttaaaggcattggaaaaatattaccgatatacaaaagaatccctttatggcatttcaaacatgtcagtcagacgtacatatgccattgttagcaacttggaattttaataaaaaggacatctgttcattttcttatctgtaatctcagataatattttcttgagtggtatttttcacttctatacttttaacttattctattttatctttgctgataacaaattattttagtggggccaaatggtcctttggatgcaagatttttcagacttttcaattgctttttgcctttttgtttcattttatttaatacatgtcctccagcagcactacctacctcgccccattcccaccccaaacaggcttttgttcttttgcatcttatatatatgtttccggtggacaaattatttggatactcaatggagttttttaagagttagtaggccaggcatggtggctcatgcctgcaatgctagcactttgggaggctgaggcagacggatcacctgaggtcaagaattcgagaccaggttggccaacataatgaaaccctgtctctactaaaaatacaaaaaatagctgggtgtggtggcacacaactgtagtcccatctactcgggaggctgaagcaggagaattgcttgaacccaggaggtggaggttgcagtgagccaagattgtgtcattgcactccagcctgtgagaccagagtgaaactccatctcaaaaaaaaaaaagagttagcaaaagtacggtgatgtgcaatgacatattgtaaataacaatagtacaatagtactcttattttggtgtctgataatacattggaaggaaacttcatgagaaataaatcaatgtacgtatgaaacttgatcatatatgtaaaatattttagaataattgtttaggagaattttttaatgtaaaatacataatacttgataaaatatgaaatctaaaacagattggggttttcttttgtaacaactgtatatttccctagattagggagtaattcaaaacaaactgtggtaattagttttaagagaagtactattattcataataatagctgttatttattcagtattgtgccaggaactgttatgcgtgttacttagattatttaacttcatcctcatgattaatttgcaagaagatattatcatgtccattttaaagatgagggaaacattgcccaaagccattaattggcccaggagctatgtagaccatcgtctattgcactttgatgcctaatacatactttccactaagccatactacctctctttgaggtcactgccagaaaacacaataaatttcaaagtgattgagtaaatattaatgtcatagattacaattagacttcaagaatggtataagttgataaagatatttaatttaaaaatcattctgcacagataaaaaacttttttgatttttttgtacattagtatgacaaaactggttaaggtagttaaattaacttttgatacttagaagtaggtatatttattttaaaatatattttaagataaaatattttcattagctgagaaatgttgagaattactcatacactattactatctttattatatgcttctaagatcatggagagcaaagacctcaagtgcttgagagtacagtttctattttagatagtagaagtgatctcattcttggtaaatgtaaaataaaatagaaaagccctttgtgtgttatattaaggccacttcagagtgttttaatataaaaagggaaaattgaatttttgatttcaacataatcatatttcaaaatattaggtttcagcctttgcattcttccttggcttaattctccatctaattaagataatcataatggaaaaatgtataattctacatttcaaaatgctgctaaaatcctaattcatttatagtaattcagcaccacaaaaccactggcatgagaataagggaaccattatgaaatattatctgtcatatgcaattctatgaatatatactgaattgtatttgagcaaagattcagccaagtatgtaggatgaatttctagcttcacgtgaagtgctctgtgtagtgctagaaaatgctcacattgcttccattaaacaaaagaaaagaaaaggaggggatggcatataaaaaacatgtaacttcattaatctgttgctaattaacaaactaccccaaaatttagtggcttaaaacagtcattttactttttcttataaattttggggtcaagaattttggacaggcctcagttgagtgattattttgtttcatgtggcatcaacagatatctcttgatggttttcaactggaaaatgactcgtttggaatctataagatggtttcacttatgtctgtcactttggtgggtatggctagtagcctaggcacagcagggactgtcaacaagagcacttcatgtgcacactttatcacagtggtctcaggtagtcagatttttttcctgatggatcagggatcccaaagaaaatattctaagagtcctgggcaaaagctgtaataattattgtgaaatattcttggaagttccagaacgttactttggctgcatttttgttgttgttgttcacataagtctttaaggctagtccaaatacaaggtaaggggaattggacccaatctttgaattggggagttatcaaagaacttgtggctatctttcaaccaccatacatggggaatgacaaaccagattctcacccaacgttctctttttctcttctgatttgccttagctagagatgctgagcatattaatgattcaaaataatatgtcgagtggatataattttactaactatgattaaacagacgtaaagggctacaattttttttttagtgagctgcaataaagtagaatgctggtgacaaaaaaaaagaaaaaagaagaatgcgatttgatggcaatatcacagacaatagttcgttaaaatgtatgtagatgtgctgtacttgagtttgaaggagacccacggaaagccactttgcattatgagattcagaaaattaacatataaattttaaaaaggctattatctggtttcagggtcttacagaaatttcatttttaaaataaaaactaaaattaggccaggtgcagtggctcatgccagtagtcccagctacttgggaggctgaggtggaaattgtttgagcctgggagatcagggctgcagtgagtggtggttatgccactgcactccagcctgagtaacagagtgagaccctatctcaaagaaagtaaaattaatcaagtaattattttttctactggataaagtttattgcattctatatgttctcaacatggttttaaaatactgtatacatttttattctaactaacttcaactctttagggttattttattaatctccctgatttctaagagcaaattaaatttgtattcttggcaaaaaaataaaatcacttattaacaaatagattttctctcagggaggtaaactgtacagaacaaatcaacagatagcaaaattactagccacataaatgtatataataatattatttaaattaatatgctatgcatcaatgtttctcaaaatgtaatgtgtacattaatcacctgccaatcttttcaaaattcagatgacgattccataagtctggggtgaaacctaagtttctgcgtttggtaacaagcttcctggtgaatgtaatgtttctgccatgtaaaccccactttgattactggaggtttaatgttaaaagaatatcagataaatttagagtatcataaaagtttgagttttgataattgtattagtccattttcacactgctataaagaaatacctgagattgggtaatttataatggaaagagtttaattgactcacagttcagcatggctaggaaggcctctggaaacttaaaatcatggcagaaggtgaaagggaagcaggcacaagacggcaagagagagcaagagtgtgtgagggagggactgttaaatgtataaaaccatcagatttcatgagaagtcaccatcgcgagaacagcataggggaactgcccccaccatccaatcacctcttatcagttcttccctcaacacctgaggattatgaggattacaattcgagatgagatttgggtggggacacagagccaagcatatcagtagtacattctgtttaaaaagagaatagtattagattggctttctggatctagactcatatatagatccatgtatggattggctttacggatttttcaccctatacaaatagagtcagaaatgttaagatcttgttattctttactctcctgatcacattcactttcttgttttagatcttaccataagctagccattaagtgtattaattgataaccattatctttactgctctttttatgcatttccacttctataaacacataattagttactaccatttctatgtcagctactttctccacttttcctccataagcagtctacttcaagaaacacgtttttctgaaatatcttttctgttttctcctcactaccagttttctcaaaaagtggcttgaaagtactgtttttctcttgtctgtgcttcattaactatccacctgaaatctatttcccaataaccacttcagcatatataataacacaattactctcttggaagatcactggtacctccagccatcaaacgcaaggattttctgagtctatttgtcatctttagaacatctgacccagaaaaagcccactgtgaaactatgcttctttgggttccatgatattatactgttgtgatctcacactattgccccattctctgcattaattcctctcttgttaccaattctctaattgtaaacacaaccaaagttctctttagattacactgttttatgcaccctctccctaagtgacttcaactatgtcttcgttcatatgactcccataaatgttcttagcccttttctttctcgtcatcatgatactttagtttcctctctttctttctctctctctctctctttcttttgagacggagtcttgctctgttgcccaggctggagtgcagtggcacaatctcggctcactgcaacctctgcctcccatgttcaagcaatccccctgcctcagctacccctagtagtggggaatacaggcatgcaccaccatgcctggctaatttttgtatttttagtagagacggagtttcaccatgttggccaggcttgtcttgaactcctgacctcaggtggtccacccgcctcggcctcccaaaatgctgggattacaggagtgagccaccacacctggccaatactttagttttcaaatagcttatcagtttatatagaaagcttcatttcttccctctgaaactctcgtgtagactcccaaattgtattaatagcatattcatccttctcatttgaaaaggaattttttggttgaattcaactttaatattctatttcacatctaatgaatttctaagtactgtctattttcctctgcaaggtctttcatatgtatctcccatttgccatccccacctctaccattcagaagactttgtggcttgctaaatgcaaaatggtcatcaatgccttcccaaatacaaaatacaacaagtattatggtttgttgctaatttgactgtgaaatttaaaacctttgagtactaactctttagtacaactgggagttacctacaatctctaggttgttcccctatgtttctatctggacccctgtctccagtttctctgcttccagttcacaccatgtaattattagcataacttttttttataatgcaaacctgcttttgtccttaattagtttgaagtttttaaatggctccttattgtatatgagatataactaccatcatgtttaaaacattcttagttatttgctctaagttttcagtgttacctcccaaaatggcttccttgtatatttaggcaacactatgccaaattcctaagctcatccaagaatgggttatacacatctctcaatgcctgtgtatgagctgctctccattctttaatatcttcccaacatattccaacagggggaatacctattcaattttttttttttttttaatctcaggatgaagtgtttagaaagcttttctgacttctaggggaatgaagtactcgtttctctgagttcctacaactctttgcacacatttctactttgctgttaacacctagtattgtaatggtttgtttacatctgtaactttctgttagattgtcagttatttgatggcagaagccacattttttcatttgtctttatattccaaaatcttaggatctgcctgaaatctactagaaatttttatggagatgaaaataggagataagtcttaaacttagttagggtcagaaaacaagaccattttataataatgataatggttatataagcaataaggaattacatattatattgtatacacaatgaggaattattgtatatgactgtaattcatcatcatacattgaattattgaaatttctgatctttcatttgctttatcatttctgtaacaattgttaccactttcagcttttgtttttgttgtttgtctaattatctcatttctctacaaacatataatgttttaaaaacaagtcagattttagaatagtatggttccaaaaccatgtagagtgccttacacatctcaactctagaaatactgtgtaataaaattaccatattacagaaggaaacagcattagtatataaatattgtcttgtatattgctgttgttcattgtgtgtgcactcaaaatacttatttctctaatactgccagaatgtctaagaaaataaaaacagatttcaagtaatgatttagaggaatattaaaatttcatttattataaaataattccacttttatgtagaagtttaatgtatttccgaagggcagtactacaacaaaatgatgatattcacataatatatatttctcaagcaatagcaatcagaaagaaaaatatatagttcagtacctttgccgatgtaaatatttatgctaggtgaaaatgcaacatcatatttaaggaatttcacattctgaatgtcatttattttcttattcaaatccaagcatttctgtaaaagtaacatcagcgtaccaacactttcttgaattcataaataattctgaggaatgcatacttgtcaaatccaagctcctgctgtacagggttatctcacaaaaagggaaaaacattgcaaccctagattaaatgagcagctggtatgctgactctgatttgatcatgttgcttttctagacagactaattgttctgatttatagttatcacctgtacttcatggcttcttgcttccagttctaattagtggataattttcaactactaaaactttaacggtccctcttctttcaataagtgcaagaaacagctctgttagcaaatagaagccctgctgttgtgaccaaggcacttagttggtcaaaagaaaacacatattcttctaagtgagcattttccgaaatgggatattttaagtagctgtattgggggggtaaaaactgttctaatagataagattcattttagagttctaatttgatttaactgttatttaaactatcagacacatacacccctgtgctctgagaatgtggcaccaaagaccctaatattacaattcaggcatttcattcctaagggggacaaaaaagaacaaaaaggaattttagcttaagtataaatccacaagttttaaaaatattttattaaaagataatggtggttagtaattttgacataatatgaaaaggaaattatttagatcttgattattgccattgtgcttgaaaaaacacctaggtctcacataactcagtataaggtatgcatgtagaagaaaaatgtatttcagagaaacagcttgactgaaatgtaagtaccagaactatgttattgttaccatgataaccacaacgaaaatagccaattatcagttctttttttagaaaattggattattcttaattgaagaaatacagccattttcacagtcaataaacatgagtagaagaaggatatattaaaacattttatagtagcagagagaaagtcatgccaaagacaatcgttttattaaaaagttagacacaaggaacagtgaattaccgaacttctagcaatatatcaccatttatatgtgaggatgagacagcatctgaggctacagagaagtaaaaactccatgctaggagttaggctatgttgttaggctaatcagacttttatatctgtgatgccctttctcaaatcttccaggcaccaagtaggtggaaaatttctccgagacttatggatactccattacaagagtgagatcaaattgaacagccagcttttcaacctcttgggtgcactggcaggagacctgttcctgcctcaacccataggaagcattgggagggcgtgaaggcagaaatatccctgaagacagccagagactggagtggggagggtggcaggactaccattaccagaccagaaaactttgttctatcccagccaaaggagatgccaaattagagtagccatccagcaggaccatactgttgttggcatgtcccatgggtttcctgggaataaacccctacccagtcttctcatactgttggcatttgccctttgggatctcccctatctgggacaggcaacacactgaatttcactaaagccaagacaaacccgggcttaaggcactctttagtgctaaaaaggagaaagtaacttagcagaaaagatactcagtaactatattgcaaagaaacctctaaggaaacatatccagtaaaaacaccaacccagaaagagaagactgaaataaaagactagtcctttgatgggaagacggaggtgtacctccacaagaaaaaacagtaaagagggaactatgaccttccgaagtgtacaaagtaaggagccagtgaaagaccctaataagatggtgatagaagagctctctgataaaaatccaaaatagtaatctgaaggaaactcattaatttccaaaataacacagaataaaagtcaaaaatttatcagggaaatttaacagagaaataattaaaaattgaaacagaattcctggagctgagaaatatgtttgctgaactgaaaaagtcattaaagtctctcaatagcagaatggatcaagtagaggaaagaatcagtgagctcaaagacaggctatttgcaaaatacacaaagaggaaaaataatgaataaagaattcctacaagatatgtaaaattatctcaaaagaggaaatctaagaattatttgtgttcgaggaagttgagcaagaccaaggggtagaaagtttattaaaagaaatgacagctttcaaaaacactatataaatatgcaggtcagagattaccaaacagatttcacccagataaaactaccccaaggcatataataattaaactctcaaaggtcaaacacaaaaggagaattctaaaagcaacaagagaaaagaagcaaaaaacatatgagagacttccaatttttttggcaacagacttcttattagaaaatatataggccagtagaagtgggaaaacatgcaaaaatgttgaaatttaaaaaaatgaaaactctgaaacaaaaattatgtacccaacaaagctattcttcaaacatgaaggagaaatagtctttcccagagaaacaaaagatggggaacttataaccatcagacccatcttacaagaaattctgtagggagtttttcaatctgaaagaaaaaataacactaatatgcaaagagaaaacatttgaagttattaagttcacttgtaaaagtaaggacacagacaaactcacaatattctaacactgtaattgtgatttgcaatccacttataactctagtgtgaagactaaaaagcaatctatcaaaaaaatagctacaacaacttaagagacaggcactataaaaatatgtaaattgaggcaagaaaaatctaaatggatatgaagttaaagtgtacaatttgttttaactattcctttgtttctaattttttctttgtgatcagataagttgtctatttaaaataaaatttttatatgtttttgtaagcctcacagaagaaacacatgtaatgaatacactaaatatgaaaagcaacaaaccaaaatatacaatcagagaaaatcacttaaccacaaaggaagaaagtgagagagaatttgtaaaacaaccagaaagcaagtaacaaaattgcaatagtaaatctttacctatcaataataacattgtgtttaaatagactaaattattccattaaatggcaaagagtgtctgaacgaataaagaaacaaggcacaactatatgctgcctacaagaaacccatttcacctataaagacacacatagactataagttgaagaaagggaataagatagtttatgcaaatggaaacaaaaaagcaagagtagctatatttaaatcagataacatagacttttaagtcaaatactacaaaaataggcaaaggaggacactacataatgataaaaggatgagtcccatgaaaggatataacaattacaaatatctatgcacacaaaacaggagcacccaattataaaaagcaaacattaatagatctaaaaggagagctagactgcaatacaataatagcatgggacttcaacacctctctcgcagtaatgaacaggttatccaggcagaaggtcaatgaagaaacatcagagataaattaaacactagaccaaatgggcctaactaatatttgtagaacatttcatccaattgctgcagaatacacatttttcttataaacgtatgaaacattctcaagaatagactatagttaggctacaaaattattcttaacaaattcaaaaagtcaaaattagatcaagtaccttttatgaccataatggaatatattcatgggcacatataacttactaaaggatgaatcttgaagaaatagaaaactggagcaaaccaataaaaactaacaaggtcgaagctgtaataaaaagtctcccatcaaaaaagagcccaggacctaatgacttcactgctgaattctcccaatatttacgaactaacaccaattgtattcaaactaaaaaaaaattgaaaaggaggaaatacttccaaaattattttataagaactgcattaccctgataccaaacccagacaaggatgctatataaaagaaaactacaggtcaatattcctgataaacacagatgtaaacatcctcaacaaaatattagcaaacctaattcaacaacacattaaaatgatctatcaccatgatcatataggattcaatccagggatacaagaatggttaaacatatgcaaaacagtgaacatgatgcatcacattaacaaaaccgagaacaaacacatttgatcatttcatagatgctgaaaagcattagataaaaattaacaccaacttgtaataaaaactctcaataaactgggtataaaaggaacatacctcgaaataataaatgccatatatgattaggacacaaggactgcaattcctattcaattcctagtgctaggctgagcttagagccagtgaactaaggtcacatatgacctagggagacaccatgggcacagctaagagagggtttgcacaatccttcccccaacttcaggcaacccagctcatagcaatgagagtgattctctccttctgcttaaaaagaggagagtgaagagaactttgtcttatgtcatggataccagctcagtcacagtaggatagggcactgggcagagttgtgaggacatagctcccagacaacatttcttgacacactctgggccaaaatggaacccagtgccttggagggaaggacccagtcctggcaagattcatcgacttctgactaaagagcccttgagccctgaataaccaccagcgatacccagagagtatgccatgggctttgggctctgaaatgtgttgaatgtggaggagacccagcatactctcagctacggtggctacagtgaatgattccttctgtttgagtaaagcagagggaaaagtaaaggagactttgtcttgcacactaggtaccagcttggccacagtagggtagagcaacaagcaggctcttgggagtccgagtccaggcttaggctcttggacggcatttctggacctgaccaaggtcaaagggcaccccagggcctgaagagtgagtcctaggcctggtagcgttcaccacaagccaatagaagagtgctttgtctttaagcgaacattggtggtggcatggcagatgaaccagtggtggtggcagccacagggagaggctcctcttcctttggtaagtgaagggaagagtgggaaggacttggtgtggtagtttgagtgccagtttagccacagtagaatggaacatcaggtcagcaacatcagttgctaaggtttttttactttaatccctggcttccggacagcatctctggacattcctggaactcgcaatcctgaagggtagagcctttgacaaggcccagtactctgctggcttcagatctgacccagcacagtcctggtggtggtggccacaaaggagcttgcatcaacacacctgcccattccaggtggctcactacagagagagagactccatatgtttgggaaaatgtaagggaaaagaacaaaagtctctgcctagcaatgtagagaattcatccagatcttatccaagaccaccaagagagtaccactacaagtctgcaagaaccacaggattatgcttggggttcaagaccctttgcatacctggaaaaccttcccaagaaggacaggcagaaacaagcccagatggtgaagaatacaataaatacctaactcttcaatgcccaggcacaaacaaacatctgtaaaaatcaacacgccaggaaaacatgacctcaccagatgaactgaataaggcaccaaggtccaatccaggagaaacagagctatataacctttgaggcaaaatattcaaaattgctgttttgaggaaactcaaagaaattcaagattatgcagagaaggaattcacaattctgtcggataaatttaacagagattgagatatttaaaaagaatcaagcagaaattatagagtgaaaatatgcaattgacatgatgaagaatgcaacagagtctcttaatagcagaattgatcaagcaattgataaaaaaggagtgagcctgaaggcagtttatttgaaaatacagtcagaggagacaaaagcaaagagaatattaaaaaatgaagcacatctacaagatctagaaaatatcctcaaaagggtaagtctaagagtggccttaattaaagaggaggtagagaaagacatagaagtagaaagtttattcgaagggataatagcagaaaacttcccaaacctagagaaatatattaacattcatgtacaagaagattatagaacagcaagcatacttaacctaaataagactacctcttagatcttgtattagtccattttcacacggctataaagaacagaccatgactgagtaagtcataaagaaaagacatttaaatgactcatagttgcacatggcggggggaggaaacttacaattatggtggaagaagaagctggcatgtcttacatggcagcaggtgagagagtgtctgtgagagtacaggaaaaactataaaaccatcagatctcatgataatccactcacaaacatgagaacattatgcgggaaaccattcccctaacccagtcacttctcaccagattcctccctaaacacaggggattacaattcaagatgagatttagtgcgaacacaaagctaaaccataccagatctggaacaagacaaggatgcccacttttactactgttattcaacatattactgaagtcttagctagaccaaacagacaagagaaagaaataaagggcatccaaattggaaaggaagaagtcatattatcattgtttgtagattatatgatcttatattttgagaatcctaaagactctaccaaaaacatattagaactgataaattcagcaaactctcaggttacaaaatcaacatacagtaatcagtatcatttctatatgccaacagtgaacaatatgaaaaagaaataaaaattaatctcatttacaatagccacaaataaaattaaatacctaggaattaaccaaagaggtaaaacatctctacagtgaaaactataaaacactgatgaaagaaatttaagaggccactaaaaaaaatggaaacaattttcatgttcatggattggaagaatcagtattgttgaattgtctgtactacagaaagcaatctgcagattcaatgcaattcttatcacaataccaatgacagtcttcacagaaatagaaaaaaaaaaaacttaaaatttatatagaatcacaaaatatccagactagccaagctatgctgagcaaaaagaacaaaactgaagaaatcacattacttgctttcaaattgtactacagagttatagcaaccaaaacagcatagtactggcataaaaacagacacataaactaatggaatagaatagacaacccagaaacaaatccacacacctacagtgggctcatttttgacaaaggtgccaagaacgtatgctagggaaaagacagtctcttcaataaatggtgctgggaatactggatatccatatgcagaagaatgaaactttatccctacctcttgctttatacaccaatcaaattaaaaagtggattacagacataaatctaagacctcaaactatgatactactacaagaatagattgaggaaactctccagcacattgttctgggcaaatgtttcttcatgaatatcccacaagcataggcaaccaaagcaaaaatggacaaatggaatcacatcaagtttaaaatcttcttcacatcaaaggaaacaatcaataaagcgaagagacaacacacagaatgggagaaaatatttccaaactactcacttgacaggagattaataaccagagtatatatggagttcaaacaatcccaaaggaaaagatctcataatctgattgaaaaatgggcaaaatatttcaatagacagttcccagaagaaggcatacaaatggcaaacaggtatataaaaaatgtttaacatcattgatcatcagagaaatgcaaatcaaaactacaatgagatatccattcacctcagctaaaatgggttttgtccaaagacaggcaataacaaacgctggcgagaatgtggagaaaagggaagccttgtatactattggtgggaatgtaaattagtacaactactatggagaacagtttgtaggttcctcaaaaaactaaaaatatagctgtcatacaatccaacaaccccaaagctgagtataaacccaaaagaaaggaaatcagtatattgaatctgcactgtcatgtttgttgcagcactgttcacagtagccaaaatgtaaaagcaacttaagtttccatcaacagatgaataaagaacacatagcacttccacacaatggagtactattcagccataaaaagaatgagattctgtcatttgcaacaacatggatagaactggaggtcatcatgttaagtgaaataagccaggcacagaaaaacaaacattgcatgttctcatttatttatgagtttaaaaaataaaacaattgaactcatggaaacagaatataaggatggtttcaaaaggctaggaagggtagtgggagtgtgggagggaggtagggatggctagtgcatacaaaatagaacaaataagatctggtattttttcacaaaacggggactattgttaataataatctaattgtatatttaacaatcactgaaagagtaaaaattgtttaaaacacaaaggataatgcttgaatggatttatacccatttttccatgatgttattattatgcattgcatgcctgtaccaaaatatctcgtgtacaccataagtatatacacctattatgtacccacaaaaattaaaaagaatgacactctttaaatatatagaaaaatatcctaaaatgtatatgaaaccataaaacaccctgaattgctaaagcaatcctgagcaacaagaacaaactaaagtcatcacatgacttaacttcaaaatatactacaaagccatagtaaccaaaacagcatggcactagcataaaagaagacacatacaccaatgaaacagaatagagaccagaaataagtccacacatttacagccaactcattttcaacaaaggtgttgaaagtgtacattggcaaaataacaggctcttcaatcaaatgtgctgggaaaactgaataacctatatggaaaaatcctagacccctatctctcaacatataaaacaaatcaaaatggaataaggcttaaatctaagacttaaaactatgaaattactagaagctaactttggggaaatgctataggatattgctctgggcaatgatttgaggggataagacctcaaaagcacagacaacaaaaacaaatgggattatatcaagctaaacatcttctgcacagtaaaggtaacaatcaacaaagtgaagagatgacccacaggatgggtgaaaatatcttcaatctgtccatctgacaaggaactaataatcagaatataaggacttcagacaactcgataggaaggaaaacatctgttttaaaaatgggcaaaagatctgaatagacagttctcagaagaagacacacaaatggccaacaggtatataaaaaggtgatcaacatcattgatcatcagagaaatacaaatcaaaactacagtcagatatttcactccacttaaaatggcttatatccaaagacaggcaataacgaatgctggagagaatgtagagaaaggagaacccccatacaatgtgggaaggagtataaattagtacagctactagggaaaatagtatggagggtcctcaaatatctacaaatagaactgctatataacccagtatatggagccgataactggatatacatccaaaagaaaggaaatcaatacataagagagagatctgcactcccatgtttattgcagcactattcacagtagttaaatatagaagcaacctaattaagtgcctagtaatggatgaatggataacgaaaatgtgtacatacataatgaaatggtattcagccattaaaaaatgaaatcctgtcatttgcagcaacgtctacggaactggaggtcattatgttcagtgaaataagccaaacacaaaaagacaaatattgtactcttcctcatatatgggaacttataaagtgaatctcaagaagctagagagtatattgctggttagcagaggccatgaagagtagaggggaggagtggataaacagaggttccttaatagtaaaacaaaaaatacacttagaaaaaataagtcctagtatcgataaatcagtggagtgactatagtcaaaataacaataatctatagtacatttcaaaatagtagagaataagtcacatattcacaacataaataaaagataaatatttaagatcatagatatattacatgttatataaatgcatcaaaagttacataaaccctgaaacatgtgcatctcttatatatcaataaaaagtaaaatgcatatatatttaattgacattaattccatattttattctagactgttatttctggaatgattaacataacacagaacttttgaagatgttaccatatttcactcagtctacagagaccttatgtggaattattttactgattttacaaatgaggaaagtaaagcagaaaagctaaataagtagtctctggtcgtgaaattggaatctaaaaccataatttttatcgttatacaattgataagaaactcaaacagaaaaggataaaaacactcacattctttaaattatataagaatttagttgagtttcactttactcattgataagtttgtgtacatttaatttaacattaattgcaattttgttgtttttgtatgctggagtctgtttatatgtatgtatgtatacatctatgtatctatatctactgtttacctagctagccattcacatatccatctattagtattcaggatatatcatcagtcatttaaaaaaaaacaagtacccccttagctttgttttttttaaatgcctgggtaaaatatctctggaacttggaagatttaaaatgtgtgaaaaacctgcagaagaaggtgtattactggtagagtagtctatctaaggaaattagagaaatatcaccactccagaagaaatagaatattaagagattagagtatacaagataatggactagtggcctcactggcctgttgaccagcagttcatatgcattcattgtcttcatttcctcatcactcacgcaaactttgtcgtactcatattttctttatctgtatgcagggttctactatttatgactgttgtatacctgttaccccatagttagcctttgatcttaatcataggctcatttacccagacaaaacagcagcaacaacaaaacattgaggggaaggaaccaaatacatattggggcctaatcctgcaaggtccaaaggaaattctattcttgtcttcctaggtacattggcataaacaccaaacaaacaaataaatgaaaagctagagctcagttcacgttttgtatggtttcttaaattgaagtgccttatttagttggattagtttttgtaaatatttctaggattttggttttaaaaggccagcttatatatattgttattagtccgtttatacactgctataaagatactgcccaagagtggaatttataaagaaaagaggtttaattgactcacaattccacatggttgaggaagcctcaggaaacttacagtcgtggcagaagttgagggagaagcaggcaacttcttcacaaggcagcaggagaaagaaaggaaagagagtgcaggggaaactgccacgtttgaaatcatcagatcccatgagaattccctcactattatgaaaacagcgtgagtgaaactgcccccatgatccaatcacctcccaccaggttcttcccttaacttattgggattacaattcgagataagagttgggtggggacatagagccaaacaatatcacacacacccataataatgtatctgtgtgtgcatacatgtatataattatctcataagtagacctgaaggaggtctacttattgttatcaacattttgtttttgaccaattgagaccaataaaatgaaaatagaatcttgatttcatgatttcagagaaggcatagagaaggcattttaatatcatgttaaagattgcataatcttttttttttctttttttattattatactttaagttttagggtacatgtgcacaatgtgcaggttagtaacatatgtaaaaagttattttaggtaagtacatttaacaatatgaaattgccctatgctctccctatatttttcagtttcctgaggactagagaaaacataactggtgtctgacatttgggaatcagtttcccataggcagtccaaggctgtttacccatcaggaaaccctgagaaacagctcaagaggataaaacctcccttatgaaggcttccacaaagggagctccacttatcttgtcatctaagcaagatatttctcccacctgtgtaaggtttattttagtagatcctgtttcttcattttagcaaggtctgtatttttctaacattgggtagacaaatgtctcaaggttttaaacatagcttctccctgtttcctaggaactcacgagtgtgcctttatggttaatgatgtgctgtgtagatctatatgttttgtttatgcatttggctcactctcctcaccttctactgagttaatttattatatacttactgaataccttttttgaacactacactgttaggtgctgggatagagaaattaataatgcacaacttgtattaaatgagctcacaacgtaataataaggtagaagtctttggcaaggcagggacaatgtcttatacatttttgtttcctgtagcaccaagcaacaggccagacatattggaagaagttagcatatgtctgttgactaagaatcattgctctcaaagttcaaattttggtctcaatgtagttaagtatgataacttctaagagtatctctctttgcttatagttatatttatgcatagtcactgtatatatgtacacaatgtattacctgttatatgtaagtatatgttatatgcatataacttgtaaatattcattgatgtattacataaagtacacaaatgttaagggtagaatttgataaattgttaccaaatcaacaccaatttctagataaaatttatgtagaaatgtaaaaagtctctctcctgctgccttcctattagccaccacaaaggtgaccactgtttggacttctgtcagcatagattattatctgtgaatagataatatctacatagaataatgatctataaattattaatattatataatgtattatctattctagataatcactgtaggtctgtctatagaataagaatgacttggaaaatatatatcagatcagcaaatatttgttgaagtgcgtaattgaaatgatatacagaatacacagtaaaaaaatgagtttaaatatagaatttttagaaaaaataattcatacatacatctcaaatatgagaggattaattttcaaggtaggagtaaaattggtagaatacagtattacaacatctgaatgaatgaaaatttaagaaggacaaaattatatacgtaacatttgaaaattaaaaaaaattatttcaacaacagcaacaacaaaaatccaacagatatagagcatctagttctccaaataaacttcccaaaatataacttaatatatatttctgccttaaattttcttatgctctcctgaaaacaccaaaatgtcttctaagaattccagattgtcaggaagattttttcagttaccaatacttccaaaaaattggatatttatttaaaattaagagataatatttttatcatttcagctaagacaatataaactatagtaattcctttttgagaaagaagaatgaatcaaagttactggtatataataatgaagagttgtagagctttaagtactaaaaaagaaatagaatatttggcaaatagtattaaatgtcatcctgaaactgcctataaaattttactgctaaaatattctggtttacttttcaaagtttttttttttctgggtaatggtgacttattacttaagagcagccaattctaatctgtagcttagctaactactagtagacaagcaacatacttttccttgtttctttaattcaatgagggtgtctgaatattttgatttggttgttaagatttatttttctttatgttttaaaatattgccagaaaaaattaagttcaaatatatatctaaaggaacacaaaagttagacacttgaaagcatttaaatcatgaaatgtaaaagtaatagtttattccaaataaaatatttttactctcaattgaaaatgtaataaacttttactgaacttgcatttgggagcctactcttgtttttaataagtacatgtttaagtgtatatgtgcatatatgtggattccatttgcattcttacgtaaaatctataaactatggatacatatatatatataataagcatatataatatatatgctatacaaaaataaccacacatttaatgattgtatgtactcatgagccagaaacttttatttttcacattttatcttctaagttgaagggatggtaatcaactttcttaaaaataaaaatgtggatgaaattacacacctaaatttatactttcatattttcttcaaaaattcacctgtaaaagtttaaagttttatgctgaaaaatagataataattcttaagtgctgactgtgttctaaggacatgggcttcaggctatcaaccgaaataagattcttaacacaactgtgatgtataatctattcttattttagataggaaaaaattaatacaacacagagcttaagtaacatgctgtggatcaataataaatgacagataaaatattggaatctaagtagtgtgactttaaattccttgactgtaatcattcatttgcactgctctaaagaccgcaaacttctggaatgcctgaattagagcgaataatcccatctaagaaaaagagtaagaaaaccacacacacacacatacacacacacacacacaaatgctgtatttcaatgcttataaaaataatttgtaacaaatttgtctattgctaacaaaaaaggccttttatgtatttagtgaatatttaagaaggaagttcctgcctacccactcagtctcctcccaagtattaatattattactcaattaccagctaaaataataagcaactatcttaggtagagtctttctttgaattgcattgagttgacaaagaccatctaaatgaggccatagagaatgtaaggtgttagatgtttttagagtcgaactaatctggaaaattaacatctgttgttcaaaatgcctcagtaaaatattaatgaaaatgcacccaacattgataggatctggatgctagaaaagaataacatctcacatattagagtgtcatggtgactagtccagaaaggtatgttgaataaggttagattacttaaaggcttagttttaaattattcttggctatttgaaataaaacatgattccttgagtgacataaaatgttaaaaggtctttttttttaaccaagcatgtctaatatgatcttatgtgttcaggctgcctttttgttgaacaaggtgtaagtggccacttcaaaatgattcgagtatctggccttcactgcttttaaaattgtgaaaacagttccctagaggtctacataatcctctttaggctacaaagaagccctcactgtcattttcagagcgtgttttggcagtcaaggacatgaatgttgatcatatttacttctaccagcttgggttgctggagtcatataattactataaaattagaatagttggtatgttagaacccgaactaacttaaagtcttaaaaaagatgccactctgattataaatatcaattcgttaaaatgattttttatgtataaaattatacattacataattatatctcacaatgctattttaataacactaggtgaattcttacctttttatgtgctttttcagttttcattgtggattcctattataatgtgattattaaaatctaatactaaaatgcagcatgccaataaatcttattacttcagagttgacattctgtgtttttctttgaaattcttattagtcccctttttcctttccaaaagcaaactagggatgttatgctttatatgcattgtcgcttcttgaattgtttttataggaaggaaaaaagtacatattttattgctttgcttttgatttttgatgtttatttttcctggattattatatctcctcactagtctgttttaccaggtgctggtatctgtctccaaatctcacccttgtgccacaaaccatactgttcagctgacaaagttctgtgatgccagtagactccctatgtaggcttccaaagaaaatcaatttacccctgagtgcctggtaatattcccacaccctcctttaattgggaaccactaatacttcatgttcagcttcttaattaacaacaggtcacttaactcattgaatataactgtcataatttcagggactgcctaacttattcgtccaaatggttccaccaatttgttgaaaaagaatagtcatcaaaagagaatctagaaccttagcctaatgaccttgccataagcattatatttaagtcccctatctttcaaaatatctgtgattttatactataacccccaatatgtctatctagcttatattacaaaaggtaaagaggctatcactaatgactgtacatatcttgttcatcagttaaagctctttccagtggcattccccatcaccaccttattagagacccagaaaactctctttttccctgtaaatatgaggtcctggagtatttgtggaactgagaaaaatgctgtagtactgataggcagtatttggactgaacagtcacgtggctatgtgctggtagcagactttcttaaaggattttgcatgctggagaggaaagttcttgctggaaagaagaatagttggcctccagacaatttccttatctgctgagcatgtcctggtgtactctaccaacacctggacagagactggacagtctgtctccctaagcacttccaaggcttagctcccaagctggtaactcccttccctaccttcttttctttccccaacattcctccataaggacccacacttgcattgatctaccctatcacttgcattgatctaccctaccataaataaaacaatggcaacaacaaattttcttcttgttctttggaaataaaccttgaaagtctctgaaacccagagccagaatcacctcctgactttgacagaaaatgtgagcattctcagtaggagatggcaaaaatgggaatagtcattagaaaataaaaaatatagtgtatctttggtagaatgggaaagaggatccaatataactataggactagagaaaaccaggtaagaaaaaccttaaaagatcacctattcctgtccctgtcttctttgcagtgttgcttcaagctagtgcagacttcgaggagggggatatgctagcaatctggcttataaaataaaattttcattaagattagtgccaggtttgtgttaaacaatcactttgctgttttccaggggctggcaagttagagcctctgcaaattatgtagttggcagtttaacgagattgtcaggctcatcaattgtcagagaaagagagtgggtaatgatgagaaagttcaaggtgatgtctttcctaatctctagaatgctaataactggaaatagacataaatataacatcttctatataaatgtaaatgattttcctgcattattactttcttcttgtcaacagattctatgttctgagtagagtccctctgctgggtttatgtgccaattattttctgtttgtaagtcaacaaccagctaggaaatcaattctctagtgaccaccttttaattaaagtaactgctagtctcaacattcaattttctgttattaaaatgacctgtttgctgcacagggataacatggaacagattaatttctctcaaggagataaaagatgtaaggagaagggacgcaatctggtgtttgcttcttttaagatggcctgattaaaagagatatcaaagtgagaaaaggtcacatggggaggggatggggcctgataggtggggtcatactgggtttagacgggattactttcagtagggcttatgtgtcaagatcatatctttatataacatttgttttgatgctactcaaatattgcttggggccaatatttactcagagtgttaggagactcaatagtagaggagataatgaaagaggaaaaataagggagaatgatatccattcagatatttttaatgtcttaaacttcaagataatagttgagtccatattttatcacagagttgatgagacaaacaatctgtccaccaaggaaacagggctccgcaccctacacttacacttcaggaagaacattatgtttcagtgtaagatactttgaaaatataaatgttttcattacattatttataagaaggtatcccagattcaagtgaatggaaattggctttgagtatttccattttttagaaatatttatttgactctaacatatgcttattttgaaatctctattacaaatttgaaaagtgcaataaaataacaatttccaactgctgctctgtgtgaaaaattttaccaagtcccatattaaagaactaaatgagaaaaatatagtgatatattcgtgaagattgattcttgtgggcctttaaggcagcaagaaacaagagagggtaccacaatattaatgctcataacagtaagaaaagatatgtgctccttcagctcacccacaagaggagggaggatggtctgcatagctggcaggcagttaatcagctcaagcagcaattttttttttcttttctcctcttcctctgttagttactccccaaatagttatgaagttgcatcccttcctcctctcaatcctaggaggagatggtgggagggagtcaaggtacttaggcaatcacacctccaagctatattttagtagtaggtggtgtccagttagctattctcaatagttctttccaattcatattaccttagcctttctttaagtttcaacaattttgtgataaacctctgttaagtatatcacttttgggacaatataaaactatttctcattaatagtggctcatcaaattatgataaaagaatttgtgttatgaacttttaaacctagaagtaccagaaagaattctagcaatttttgaaaatgttttcttataatttctgggcttgatccacaaatgatgccgaaataagcttttctttttattttctaattttccaaagcaatatatttaaatatgaattagattcactggagtcccagctttgaaacatcctcttcttgcaaatcagaaaatgtacttatcttcttgtagattaccaaagataaaggcttttttatcattttaagtggagaaatagttgtgatgaaaaattaccttgacaggattgctggaaataaagtatctctgtaaggttgagaagctattaggagacatataactgtcaagagtaagtgaaacttagcagtattcattgtttccctgataccatatttatcttgagaaaatttcaaagagaaatattatttttaaaatattgttctctacaggaataaacaaattatattcaaaagcaagagaagtattcaaatacacttatggcagttttgcatatcttattttaattttgctatttgtataagcacactattttactccaatgtgctgttatttattctgaaaattattgacagactccagatttctaggaagattggcagattttctacaccttcaatttgtttttaatcaaaacatctttgagtcactgaaatgcaattgcattggcaaatcaggccttcatgattttggttattttcctttcttacatcttttagtttttaaaatttgactctgttaatcgctaacaagttggagaatctagggcacccagctactttgacctggtctatatttgtttaatgactacttcataaaagttcccacagttgatatttgcagttgtcattctgtgatgctgtttaaagcattcctcggtaaattattatttaaacacagaggactgatccatttaattatgatttttcagcaagattaattcacagggggatccgtcattctatcaggtgccacatggtctctaatttatttttaaagttcaggtttttgacagtttgtttcttctataggtaattactttatatttatggattgattgactatatattcaacaatgttactgatctcatatgtattaatttatttgtagtttaagacatttctagatcaatggtgccatcttttgtgtgtagcaaagcgcttgtgtgtgaagggagtgggggaaggagggagagagaaagagagagagagaggaagagtaaaagaagataaggcacgtttgtgctatctttagattgttctggttgtttgtcttttaggaattcattttcttctaggtttttttttttttccccctttttcaacctaattaccaaagggtatctctctcctcttttgaaattttgactccctaataagctttaaagacaatttctatatattgtatgcatttaaccctcttttctagcattattactctgatgtaccaaaattcattttctaaatttaattttttaaaatattttcccacaaggtggacttcattttctggcatgagttttagagtgatttttgaactgccactttgatcctgtcttccctttgcctgtagtgtttctctgactacccttgatcatcacaaaatttatgacaggaatgtgagagatcattcactggaatgtggtagtttttcttctttttatacatacagttgtcttaaagtttagactgactccttgttatgctgagagctatttttttttagagttttgtttttttcttctaattgttctataaggtctttttacttttggagcatggcgagacagaaccctgaatagtcaccaaagttgccaaatgatgcttgtaatagttcactattaataatgatgttcactataatttttattaaatatctttgaggtatctaataaaaatacgaaggattttttattgtgtaagttttctaggagctcttaaaaattacataaactgggaatcgtttccccatttcttgtttttgtcaggtttgtcaaagatcagatggttgtagatatgcggcattatttctgagggctttgttctgttccattggtctatatctctgttttggtaccagtaccatgttgttttggttactgtagccttgtagtatagtttgaagtcaggtagcatgatgcctccagctttcttcttttggcttaagattgtcttggcaatgtggactcttttttggttccatatgaactttaaagtagttgtttccaattctgtgaagaaagtcattggtagcttgatggggatggcattgaatctataaattaccttgggcagtatggccattttcacgatattgattcttcctacccatgagcatggaatgttcttccatttgtttgtatcctcttttattttttgagcagtgatttgtagttctccttgaagaggtccttcacatcccttgtaagttgaattcctaggtattttattctctttgaagcaattgtgaatgggagttccctcatgatttggctctctgtttgtctgttattggtgtgtaagaacgcttgtgatttttgcacattgattttgtatcctgagactttgctgaacttgcctatcaacttaaggagattttgggctgagatgatagggttttctagatatacaatcatgtcatctgcaaacagggacgatttgacttcctcttttcctaattgaatgccctttatttccttctcctgcctgatagccctggccagaacttccaacactatgttgaataggagtggtgagagagggcatccctgtcttgtgccagttttcaaagggaatgcttccagtttttgtccattcagtatgatactggctgtgggtttgtcatagatagctcttattattttgagatacgtcccatcaatacctaatttattgagagtttttagcatgaagtgttgttgaattttgtcaaaggccttttctgcatctattgagataatcataaggcttttgtcattggttctgtttatatgctggaaaacgtttattgatttgtatatgttgaaccagccttgcatcccagggatgaagcccacttgatcatggtgctgggaaaactggctagccatatgtagaaagctgaaactggatcccttccttacaccttatacaaaaattaactcaagatggattaaagacttaaatgttagacctaaaaccataaaaaccctggaagacaacctaggcaataccattcaggacataggcatgggcaaggacttcatgtctaaaacaccaaaaagcaatggcaacaaaagccaaaattgacaaatgggatctaattaaactaaagagcttctgcacatcaaaagaaactaccatcagagtgaacaggcaacctacaaaatgggagaaaatttttgcaacctactcttctgacaaagggctaatatccagaatctacaaggaactcaaacaaatttacaagaaaaaaaacaaacaaccccatcaacaagtgggcgaaggatatgaacagacacttctcaaaagaagacattcatgcagccaaaaaacacatgaaaaaatgctcatcatcactggccatcagagaaatgcaaatcaaaaccacaatgagataccatctcacaccagttaaaatggcgatcattaaaaagtcaggaaacaacaggtgctggagaggatgtggagaaataggaacacttttacacgttggtgggactgtaaactagttcaaccattgtggaagtcagtgtggcgattcctcagggatctagaactagaaataccatttgatccagccatcccattactgggtatatacccaaaggattataaatcatgatgctataaagacacatgcacatgtatgtttattgcagcactattcacaataacaaagacttggaaccaagccaaatgtccatcaatggtagactggattaagaaaatgtggcacatatacaccatggaatactatgcagccataaaaaatgatgagttcatgtcctttgtagggacatggatgaagctggaaaccatcattctcagcaaactatcacaaggacaaaaaaccaaacaccgcatgttctccctcataggtgggaattgaacaatgagaacacatggacacaggaaggggaacatcacacactggggcctgttgtggggtggggggagggtggagggatagcattaggagatacacctaacgttaaatgacgagttactgggtgcggcacaccaacatggcacatgtatacatacgtaactaacctgcacgttgtgcacatgtaccctaaaacttaaagtataataaaaaaccaacattaaaaaaacttacaaaaactggattacacaaaattcttttagaatatattttgagataattatgtacattttattacttaatctgttcatgtgataaatgatatttgtatttttttagtgctacagaacccttgcaatatgtggtaaatcaaactcagtcttagcatttttgaaacattgttgggtatagttggttaatattttgattggaatttttacatcaatgatgctgacagagattgggtataactttttcctctcatactatttttgcctgtttttatattaagattaggtcgatgtttttatattaaagttagattgattttactgaatgaattgggacgcttttaaaatacccagaagaatctttgtattgtgatagaactcaccaatacaagcattttggtggacctattttctttacagtgcatttcagatttttctgtttcctctggtgctaatttcatagaattttattactttattttttcatctgttttcaaattattggattaaatttttatattgctttaaaatgttattttaatctactttgaatgtatatgactgtcctataaaaatgcagtactaagtatttgtagtctcttttaaaatctgacctttttattttttataatttcttgtatttatcatatttttaaacaatttgcttttaattttgttgatcttctctgtattattgttttctatttatttctttagaattgttctaatgtttattctccaaattcctggatgagatattagttgattaatttttaggcattcttcatatttttattatgagcatttaagaatatatattactctgaaagtccttttactgcatctacagattttgatacaaacaaaaactttaaatcattaagttcaaaatgtttttaaaatggtttctctaaggacacatgagatactttggagtatttaaacgtatacagattgtttgtttctctttcataattgactttgaatgtaattgccatcagattgtgtttgtcaaaaatctcttaaatatgttagacttgttccatgtgctagaggttttataaattttgaatatgatcttgacatgagaagaattcattctttagttgttatctagaattctatgtatcctatctgtccaataatcaggcttgttatttctaaccttctatacttaaactacttttttttgtctttttgttcaccatttgagggagtcatgttcatatttctcactattgtgattaacttcacaatcctcttccttgctcaacaccagctaccagtgacataaagaatgcttttactttatatgtatcaaaatctttttatttgaaatatatgttgagaattgtacatcttcccagtaaatcaaatattttatcataatgtagtgacattttattaccctaacgatctttttatcaaaatgctgattttgcctaagattaatataattcgcttagttagcatttcaaggtatgtatttggcttgtttattttttgctgtcctgtagttttaatctttctcttttcttatagtatatgaacgtgtcttacatagcatatttaatttttaaaaatcaactaaacacttcttgtctttcagctggtttattaacatatgttgggattattaatatatgactacattttaatttttcaaatattctatatgttttttctcttccattttttctttttttctttcaatttaatgttgttgttcccatctttcattgttgcactttatcacggagaaggtaatagtcctgtaacctactttgattctttgatggtggttgtatgtacttgtggaaatatacattgcaaagtttaaagttaatattataagccatccttgtaaacagtatcaatacctaaaatacctgaacaatgcctatcagctccattaccatttatttactacttttgtttatattttagtttttacttttgttcatttttaactccccaaatcaaatatactattttacacagacagtatttatctacatatttatgaattttgcttatttgtagttcagactatctttcttgtattattttctctcttcctcctgtagctgttactccaacaagatctgggagactaaactttcccactgtttgcttatctgtaaatgtcattatttcatcatttttcttgaaagatagttttggaaagtatagtgttctatattgggagttacttctatcgagtactttaagtatgatatattattgtctttggggtttaattgttacatcttttggtatgctgtcagcccactcatttttccttatatgtaatctgtctttcctgatctttttggggtttctgtatttctaccattgaagttttattacagtgtatccaggtatgcttttttttttctaaattgtcttctcaatataggttttgattcctgtatctatagatttttaattttcattgatacagaaatatttttagttatcttatcaaatattatttttcattcatctattctcaatatatcaagagtccttaatgcttaaactcaatttgtagtgttcatcttttctttttgggtaatttcttcagaaatatttcccagtttgctatttttctttcttttactgtgtctacagtgggattaatctaaccattcattgaaatttttatttcaagagttacatttcttactatgggaagtttatcctttttttccagagttctatctaataatttgagcataattattcattaacaaatatatttgagtagtttctctgagttaacagtataggctacaagtatatcatggtgaatgaaacagacatggtctttttcttcctgtagctgatagttcaatggtggaataatgaaaattaatagggaaagaaatcaacacataaacaattgggctattaggagttttaaaaattcttaaagattattaacaggattttgaaaatgtgtgataaaaagggtaatattgcacaattccctagaattaacttcaaaatttgtacctgtttgtcagcctagtgaagtgtcccttgaatcactattaacagacttctgcagcattggtaatttgtctgtatttttatattttaatttgtatacgttataatcaaggtctatgtgtctgtctcttagttaacagggattttataacagatttacgctagagtcaaataccaatgtcaggaaatgaatacaaatgcattaatgcatgcattttaccatctacatatacttctttagcacttttatactgtttttatttccattttcaggcattagaaatatgcagatttaggtcgtatgtctagattacttttactagctatacagtcatacatcactaatttttttttgtagcttttgttttctcagtagtgaaactgggtggataataactccctgtcaggatttctgtagagaataaattgatgataaatagatggatcagtagatagagctcaaaaatttacttcaaatctcattctctatgtgaagtagctaagtacaaatgttcagatcatgagctttaaggttaaattggttgggaattccatctctaccatgtattagctctgtgatatttggcaagctactaactttgctgggcttctgtgcttcataggtaaaataagtaatcatgtatttttataggattgttttgattattacattagttgatatcaaataagatactcaaaacagcagcaggcacataataaccaatacctaaatgtagataataatatcattatagccattctgctatataggtaatttatttttattttttgcccatcataaaccatacatcaatattttccaatttattaaaaatagtctttagatgatagaatttgctaaaaatttactgttttcagaaaattatattgtggttttaatatggaatcatatagaattatacctgttttctttacatagtgaaaaaataatattcttcttgctttatgctgcagactccttaataaatgcattgcccctactatagtgattagttcaatgtgattcatttctcacagcagatacagtgactataaaggttgcctcattctctcaaatgcatccctgacaagttgtgatgttttaatgtacagtagcaatttttattcttctcatcacatctcataacaaccccctaatgatagtcttctttggtttggatgtttatacaggaatgtttgtggcaaatgtaagtcttcccctgtattagtccattttcatgctgctgataaagacatacctgagactgggaagaaaaagagttttaattagacttacagttctacatggctgggaggccttagaatcatggcgggaggtgaaaggcacttctgacatggcggtggtggcaacagaaaatgaggaagatgcaaaagtgcaaaccccttatgaaaccatcagatcttgtgagatttattcactaccatgagaacagtatgggggaaactgccctcacgattcaaattatctcccactgggtccctcccacaagatgtggaaattataggagtacaattcaagaagagattttgtgggggacacagccaaaccatgtcattctgcccctggcccctccaaatctcagtcctcacatttcaaaaccaattatgcctccccaacagtcccccaaagacttaactcatttcagcattaacctaaaagtccacagtccgtagtctcatttgagacaagacaaatcccttctgcctatgagcctgtaaaatccaaagcaagctagttacttcccagatacaatgggaatacaggtattgggtaactatagccattccaagtgggagacattggccaaaacaaaggggttacagggcccatgcaagtctgaaatccagcagagcagtcaaattttaaagctccaaaatgatctcctttgactcctggtcttacatccaggtcactgtatgcaagaggtggcttcccatggtcttgggcagctccactcctgtggctttgtagggtacagtttccctcccagctgctttcatgagctggcattgagtgtctgtggtttttccaggtgaatggtgcaagctgttggtggatctggagtatggtggccctcttcttacagctccactagggaatagagactcttcttactcttcttactactccactacgagtagagactctgtggggatctccaaccccacatttcctttcctcacagccctaacagagttctccatgagtgcactgcccctgcaacaaacttctgcctgggcatccaggcatttccatatatcttctgaaatctaggtggatgttcccaaaccccagttcttgacttctgtgcacccgcaggctcaacaccatgtggaagctgtcaaggcttgaggcctgcaacctctgaagccacagcctgagctctatgttggccactttcagccatggcaggcacagctgggacgcagggcaccaagtctctaagctgcacacagcaccaggacactgggccaggcccacagaaccattttctcctaagcatctaggcctgtgatgggaggggctgccatgaagacctctaatattccctagagacattttccgttttcccttattgtcttggggattaacatttggttccttgttacttgtgtgaatttctgaagccagcttgaatttctcctcagaaaatgggtgtttcttttctatcactttgccaggctggaaattttcttaacttttatgctctgctccccttacaaaactaaaagcctttaatggcacccaagtcacctcttgaatgctttgctgcttggaaattacttctgccagataccataaatcatctctctcaagttcaaagatgagatttgggtggggacacagccaaaccatatcattcccctcagcttccctggtcttgttgcttctacattaaacacaatttttatggtgtcttatatttactctttgttcaacagaaattacaaattactaattactaattgctaattttacaaattttacaaattactaattatctgccaaatattactccaatttactgttagctgattaaagttttaagatctctccctctttctcattgtatctgataaaatgctaaaaaaggaagctaaaagatattgaggggcaattagaacatttgtaaagggatatggtaaatgaattaataactttacagtcgttgatgtcattgggtgctaagcatatctttatggacacatggctataatcattgacatttgtatagtcactatctaaatttgctgataattttaatatgtatatacatgatcctcaatattctcataaaggtttatatttaaacatttttatatggggacttttgaattataaaaatgatgttgaagaacaatgaagttattcaaactggccagattatatgaaaatttagtttctgactcataaatgtattcattaaagacaaatatatagatttttaactgttataatttatttggaatagtacaataaatctgatatttttaacaagtttaaaaacatcatttttcaatacttcaaacactcacacataagaagtatcaattttcaaaatgtgtttaatgtggtactttaaaaatggtctttattccttctaaagcactcacaaattgtttttagaactctacttgatgcaccactttgatcttttggtctccttctttcaataatatcaatttcctagtgatagaaattagattacctacgtttggtccagaactaattccataccaatcaggaacaagatgctactatcagtcatactaatagaatctctatctgttgtgttccttgtgtatctcgccaactgtagaggttaaaattaccctttgttccaagtctttgctcttgtgaatagtgctgcaataaacatagttgtgcatgtgtctttatagcagcatgatttataatcctttgggtatatacccagtaatgggatgcacatgtaccctaaaacttaaagtataatgataataataaaaaaagtagaactagaaaatcttttttagaataaagagattatttaagccaaaaaaaattaccctttgttgccattgtagaaacaatctgctattaatttactgtttcacttttttttcccactacagtagctaatcaagagctgagttaaagaaacatatgaatcaaaatttcattcaacactaaagttcaggattggtcaataggagaccactctgcctcacggagtgcagtttttcccaaaatactgtggtgtgagatgcaggagaaaattaagacagttttataagaatgattatgaacaccagtgtcctgaatttttaaaatgatatcaattaaagatgaaacgaaaatcagttagctgaactaattaagagtacgcaaagtaataataaaaataaataggtaaaagtagctttagaatgttaacaaatgccaggggcaagtttatggcttaagtgattaatacaactgaatttctctttatgctgaatgaacaaatctattatgagcaaagaagttaagagttagtttataatttcagtgggaaaaaaaatggccaatcaaaacttaattggatctgtttagaagaaaaaatcaacaatgtactaaaaaggcagtagtaattaaggcatttaaggattaatacaatatattctaatgttgtatgtctcagggtaaccaaatcaggcctaatttagactttgaagactgcagttagcaaaaatttccccaaataagcaaaatcctttgaaattttttatttctggagaggaaatgcgaagacttgctgaagaccattcaggaaataaattgtcgggtccagatggttattcaatagtgttgcataagggggaaaattgacagtagaatgatttcgttttatcggttgtgcttataatcagttattgttataagagtttcttccacttttcatgagtgagacctggtggcttcttattcagatgatacgtggagatcattttgttttaactttaacaaaccatcagttgagtttgggtgggatgagggcaatctatgattttagctctgattttgaatttgaaaatggatgataatctgtccattttcacaagaattttattttactgcaggttgttccaataatctttgcagctcataagtctttatttagaaatatctgtaattgttccattgctaagagaatgttttacaaagtgggagctctccaccccagaccatttgtggcaaggtcaccaaggatgcttgacaaaatgcagattactgcttccctgtcctaccctacagacctctgaataaatgtttctggacatcaatctgaaaacctgccttctgccaagcaccacaaatgattcagaggtacgctaatgcttggtgaccagttctctaaacattcagcagtatgttgcagctaatccaaactggatgattgtctagtttctagatgagttggccatcactgtcagcactcagatcacctctagaaatccctgtgtgcttaaatgaattcacttttagggttagagccagcttctaaggggtagaaaatgctactacacataatttaaataatacttccttaccgtttttactgctgtataatttgtaaaatgaatgaacataaactattttatgactttcgggcaaaccagtgactgatggagagacagttttgctggctgtgatcacaatacgcataggcctattcagtagttgagcactataagaaaattaaaacatctagttggaaagtgaggatgagaggggtaaatgatgaatgggaagatctcataaggcttggggaaataatagaatttgagcaaggtatggtaatatttggagctttgatagaggtggaaatgattgcactgctgtaagaagtatcagcctaagaaaacaggatgaaagttggttgggttgggggtcacagccatgagtaatcagtaataaacaaagcacgtggtagaaaagagagtaaagaagatataaagctatacaggaatcagattgtgaagccaccttaaagactggctaacaaatttgtatccttttatgtttgcactttgagggtaaccaagtaatatatttaaagagaaacgatgactttagtctatttttaataatgttacaaaaaacactcatcagtagttcctataacccaaactcaaggcttttgcattaaatacaacaatgtatccataaaaagcgaggtaaagcattaagggaaaaaaggagtagaagaaaaatgtgatatttaccctaaaattatccttagagttgatagattattatgacattaaacacatttttggttttagatttcagttttagaatgtgtggaactcattgaaggggaatgagaaactagatgcaacaataaaggaactactgccacaagacagttgaaagtaaagaccttaggtagaacagtagaagccaaaaataagacatagagattgaatcgatacaatttgccaacttattaaatatgaggtcaatgacttcaaagacacatgccatgatgatgattattgttttattattgtttgtaagttttgtcattgttttggtaaaattgagctgtgtgtaacttttaaacacaaaggagaaagtaaaagccacacaaactcccaccagagagaggtgagatcttagaagttgaacattctcctctacgaaagatagacaaattttgcaagttatacaaataagatcataatttttttactgtttatttttgatactactttttaaaataaacaatatatcatagacatctttacatgtcaataaaatatagtcctactcatccttttgaattactgtacaggataccagtgtataaatgtttaatgttttaattaaccaatccctcaccaataggcattaatcatttcctgttttagtgctataaataaagtttcagttgctttaatacatatatacttcatctgtattaaggcctaggtagaattttgggggtttatgggtatacaacttgatatgtggatagttaccgaataactccagaaaacttacatcaacttattgatgacaacattttatttttgtatgcagaacacttatttcaaactggaaagataaaggactttcatatctttataatttattcctttcctctttctggactttatatacattctttggttattcaaaccagtaaaaaataaacatttgaaatatggtatgtcacttcaatcaaattaccaattaaattctcagaaatgtgctccctggaattttgccaaacaaatttcttagtttacctcagtactgtgaagggagtgttacgttaaaacatcaatctcattttgaagacttcacttttacattaatatcattaatgtgggctaggaaaaaaggatataaataaattcaaatagaactattctgagtatcttacatgtggaaggtggagacacagctgagagagaatgaacctcgaaattccacagacctaaatttgaatcctcgtcccattctgtaactgggggactctgagtaagatatttactagatagaacctcagttttcttaactgaataattaggatctcacatatgtcagaaggtcagaaagccagaacatagttaagtatctaataaattttagttttctttcttctatattctatcacagtgagcatttataagttttgatattaaataaaaaacatctattttgtcctttaaaaatactctgatgcaatctttttaagccacttttctaagtgtatacagctcaaacgagattaaatgaaaatactaataaatgctttgtatttatgccgtgtttctatttacatcaattatttgtggtttttaaatggaccattctaaggttttattcgttacaagaaagttggctctttgccgttctgagtcagaagactattttctatagctagtactttctgagtaattattcctcacccctctctctctccccacatacacacatagatgcacacataaaatactctttcttatgtatcattctccttaatacaaacaaatatacacatatgaagagtgacatgatttcattatttgttgacatataataatatgagtatgaaggctggtaatcaaatataaaaagttttcattcaatgaaataaattatattttaaaatacaagtttctgttctaggaactggtgattagaacttttgtgcttgcatagctctaatatgctctagtttcaggaagctaaaggttaccagcttccagaaaagctttctgggatagaggctttctcattaacatacaacaaaggtagaaagtactcattcactgatttttaatcagtttatgacatggactgcaagactccttcaaaaggagattctgcttaagtaataatactttaacagtaatccagtgatctgtccatgcattaaggatacaatttattcttctactgatcagttcttttcctagtaaaatgaattgtctaacttttgatggaactgtctaacaaaagagctttgtggatgaaactgacagaccttagaggtttccatttagtttgaatgcttaaattagaaactcttgtattaggattaaaatggaaaaagagctgatctaattgcatgtccgggcagatatgtcagatctggtttcttacgaccattgaattctagcatagttcataaatgtagttaatgtatgagaagagaagtgattcttaacaaaggctgaagcagtattagaagttgatcttttttgccctatgcgttagaaaagctttcttctttttaaatatattttatcaagttattcactaatagcagttattaagttcatagatggttatcactatcaataatcactatataaatagtcagaacccatacctggtttttatttatttttttaattttaattttaaagccaggctgtgtaagggactctttacgtgtaactcatagctcttcttctccctagagtcataacttctttttttttttttttttttacacaggagtgtaaatgtttgtatatgtagatattgatacagtctatttaaaacctaatgtatcagtgaacataatccaaagtaacttaaaacataagttctccttcattgtaatatgttatataggatgaatttctatgtgaaagagtttctaaaactttatcttaaaaactattcaaatccagctaccacactagtacactagtaataagattaatttttcacatacaactttgcttttgacattccaaagtgtaaaattaatcaactgttacagctgttaaaactatcagaataacatgccatatattatatacatatatttaggtatatatcacttaatacagctgtgtgaagttctatgtaattttgccaataaataagtgaaagtttaaataaagatcaaattcaggtgttagtgatcatttggatatgaagcggaaggagagagagttgtcagtgatgacgctcaagtttttaaattgagcaacaagttagatggtgacattgttcactattatgggagtttgatagggatggaatttgttagggatggaattctgcttagcttatgattgagctaccaatgagaagacagacaaaaaagtgaagtggataatttttttctaccaatctgggttgaattctgtgttaaaaccatcttatgaagatactgtagtcactttttaaaaattatattgaattatatatttctttagtatttctttgaaattaagtttattgatataactagtgatttcatataaatatagatatttacaatggttattttttacttctatatattaatcagtacaattatataatcctatttaaaaataagttgtattttctttccatgactactgagtaatgtggagattaaaagacctatgagataaacctattctgacatttaattttaattctgagtttttgattatcaaaaaattgctaactataatatctacatgcatataaacacacacataacagcttgtgattttttcacatcaaatgaaattttgctatttatgtatctcaaaattagataggaatcataatgtcagtttatgttcaaaatattatttaaataaacttatgcataaagaaaaatagtgagcccaactgatgcctccattaaactgtatcagattcataaattgttaagaactgcagtgaaaacaaactttattctcaaatactgtacaatctatcagggaatcaaactagtacacagcaataaaacaaggcagaataacatgagcatcatgtgaaagacactaagatacatgtggttttaatgccttatagcaatcccatttctggattaatttatgtaattctaaaaacggacaagccttcagtagatatgtgttgtctagttatttttagaaatattactttgtcttttaggaatcttactttgtactgagcacatttcccctacatatagaatctatcgaagtattaatagaaaatgttttcttagccttttcatgttgatactattcagatttcttaacagaaggaaaaaactctattgcttcaaatgtcataaaataataaggaatgccatagcaaaactcagctttcatatccttgctgatggttttctctatacattattgcttatttatggcacaaatgtgttctcttaagaaaaagcgtcttgctgttatagcagttatgtggcacaaatgaaatgatcatgattacattccttcaggaaatgcaagtgcagttttccaagttaactacctaaggtatacatttgaacaattttctttttctactacatatagagttgaatgtcactcccagaacaattaggtaatggttttgttatgatactttatagtagcaggttctgtaatactgtaggtaaatactggaactgagactgccttccaagctctcaagatattttgtaactgtatggagtgttaagaattacacagttctttactctcaatgagaagaatgctatcttgtaatttctcatatagtatttgaatacttttataaaacttggcattgatatactttaaattgtatcaggaatcatatatatcatacatgtgtttggtgcatatgtacctatattgcaaattaaggttaagaagtataaaatctggaaagaacttcagagttcagatgattaaattcactgttccaccagagtagcacttgcttcaaaataacttaactgtttaatatctgggctgaaacaagcactcaaatctccttatttacacaaggtctttttctcttccagccctcctcctcttcaagttatctccctttttccttctctttcttcctttattttcttagatgactaaaatgtaaacatcttacatcaccatcttcttcgaatcatgttgtatgtcaaacctagtgctatttgcaagaccctagttgaatagtggcaaacaaattagacatacttttttgtttgtttgtttttatgaagcttgcagtgatggaaagacaaatataaacagcatatatgaaaattctgtataggtagagtaagtcataagtattctatattgtctaatgataccatagtttagcataattgttaaatggtagcaattattgtccaacgataccatagtttaatataatgttaaatggcagcaacatgaagatgcttctaggttgaaacattcaaaagatatgatttgaaaacatttaagaaagagatgaactgaatctagtttagcaatttaaaaaaatatacagttagtttaattcatctgaagcactgattgttaagatattacttttggggtagtggccagtattttcatataattagtttttatttattgaaaatcgagtcttaattagaaaatggaatgtagagaaatgaggaagggacaggtccaccttgaatatttatagaaaatttgcatagcctctcattggaaatatatggcacaggtttcatatttaatttagacccccacatagagaaaaattaatagaatagtgtttttctgaagtaggaagtttcatttctttatggaaagttacgtggtggtttattagtaacaaaaaatggacatttagatcattacctgaataaagcgttatttccatatgaagctgcctaacatcttcacaacttctggttattgaaagtcactgctgaaacgtgacacaatgacaaagtcatgaatcctggcattggtggcagcgtagctttccagtgattcaggctctgagtttataataatgagaaggagctaaataacttatgaggttatttgagttgttgcaagattaattttctatgcataatctgtgtatatgttggaataaaggcaaaggaaatcactagaaatcactttgtttatgttatatatgcatatctgaactacaagaactgtgagtttcttcaaaatcctgagaaagtgatcatcattggtgagacaaatcaagaaattaaaatttcaaaaatgcctacttaataatcatattagggcaactctcagtttctgaacacaaataacttgtgatagagttacatatttactttgactcctcttttctacatcctatatcccaagtataacccacatctatgtcttgaaaaatattatctattaaactatattcaagatcccatcactcaaagcatctctactactcactgacccagggccaccaacatctcatacttggctgtagctaaaataaggtagctgaaataactctttaacctgtcctcttgcttgcccccttacctccctatagtctattcttcacagaggagatgttctgttaatgtgtaaatcaagccatgtcagtcctccactctcaacctccaaaggcttccgatgtcacctaaaataatatccaaaatcttatatgcccaggtgtttctttatctgctctcatttatcttttgaccacgggggaattacatgaaatttttgaagtgcaaaaatactgttagcatataaaaattaggccaatagctttacaaacaaaaaaggcatataccagtctatgttaatttaaataaagtatgttaaaaataaatatattgtgttttaagtggtatttgtgactatgtattatacaagggaaattcatttacagcccagaagagagtaatatatgtaatcatgagcactgtatatttatgaaaaggactataaagttgcttcctcaccttgaaaacttattttaggtatcctcatctccaaagtagaataggttattcctgttctgtttatcttctgcttttagtttattgggaacgtcccaattttcaatggttgtgagtacaactacaaaatatttgtttgcttgtgatgagattgaatcaccttttaggaatgcaaatagcaatgactggtagtaataattttcccttttagtgactttttattgtactatttattttttcattgacagctgaagctctagctgttactgctagggaaaagctttttttcagggtattttgtatatcattaactattccaaatggttctgtaacagtaattctcaactttggaatgcccaggggtttaaaaaaaatactaacacctgagtcctatgtccagagattctgacttaattgatttgatgtatagccctggcgttaaggtttccaaaagcccccagtataataagcaacaaaggttaatagccactatattataatttcacctggcaacataattttactttgaaaacattgaaacatttatttgttgaaattttttctctctcaaatattcagataaagaattggaggccatataaaacaactgcctgtggaaataattcttgtacaatgatttgaatctttaagctacacatatgtaaaatttttagggaaaatttgaaacatattaaataaaaacataggaagcatgaagtgatattccacctcacttgtaactaatgaattgcaagttgaatactaatatatagtttagtgatcaatttaataaaaaagcaactgtttttatgtatcctgtaattatatcttcacctcttttctttcattctcatctttccaaagtcctgcctggcttttagataaaaaataattataatcacattcacatagtagaatgttttgatagtttgtgttctacttctttgaaatgtgattgctttctaactcttgaatcaaactgccagatttaaatctaggctctaactcttattacctcagtaagcctgggcttcaatgttcaatataagcaataataacaagcaccaagaattgttgtgacaattaaataagataatgcttataaagcacagtacctaacacggaataagatctcaataaagatttcccagcagtgccggccgtattaagagtactagtgataatgaccaggataaaatatcttaagctacttaatgactcttgaatggtggcatttttcagaaagaagtgaccagaattttcatagcatataaccttctctgccaataaaagaaccagatctgtctgaacaatgaagggatctcacaagtgatcttcttggagagatcgaggctgcttcccaagtatgaactctagctttacaaacagttatcaaactcctactacatgtcattcattgtactagatgttcggaaaaacagtaaagaaggaaatctttccttttaggaaatttctagtcaagtttgagagaaaatgaagagtcaattttaatacattataagtactaaatgtgaagtccttttagggtaaagaaacagccaacccagttcgggagataaatgggtaggatataaggcgaaatgatgtttaaattttcaccaaaaacaacctagtatatcctctttgttcttccagagcaattggataatgaatgattttaccatcagagttttagtttcctggtacatctgacttttgattatatcaatgatgaaaaccatcatactcaattctccatttagataatgctgacattactctcattaaataaaaaaaataaaacagcacctgtaatacatagaagaatcattgtgactttgcaaaagataccgctggaagacatatggaggcaaatattttagcgaaattcacaaaaagaaactaaacataaaactcaaaattaagcataaaagtcaaatgagttccacttggctgaattaaatatgtaagggccattgggacccatcctctctttaggtcggggggaaaatctcactgttttatattgcactcctcaactaggtacttatggaggttttgtccatttgtgttactctaaagcatatggcatagaccaccatcaaaggaaggacgatgtacaattggtttgcccccatgtggcaagccttgtgggtcctatgtcaaagaatgctttatatttcttcaatcttgtattcttttaaaaaaattctgccaataataaaaacaaagattcggtcataaacaacatttagccatgattattttctttttcttttttacttatttatttttcactattattatatttcaagttctggggtacatatgcacaacgtgcatgtttgttacataggtatacctgtgccatgttggtttgctgcactcatcaactcgtcatttacattaggtatttctcctaatgctatcccaccccacctcccaaccctcgacaggcccccggtgtgtgatgttctcctccctgtgtccatgcgttctcactgttcaactcccacttatgagtgagaatatgtggtgtttgtttttttcttcttgtgtaactttgctgagaatggtggtttccagtttcatccatgtccctgcaaaggacatgacctttttttttatggctgcatagtatttcacggtgtatcttgaaaccatagataatttgtctcaattttttactataaaatttataaactttatttcattttattatgtttcttttgacatgacacaggtggaggatccaatgttttattcattcacttagtaaaaatattttccaagtacatattgtgtgtgagactctctgctaggtgtttgggatttaacattattaactattcaagtggttgttatttattgagtgcatactacacatcaaacatgatgctaaactcttgcatacttttgtcttctcatttagtttttttgtaaatatgtagactttacatttttagagcagttgtaggttcacagagaaatcaagaggaaattacagtgttcctatgtatatatatatatatatcttttcctattcacctacaacctttcccactatcaacatcccccaccagagaagtacatttgttacaattgatgaacctatgtcaacacattattatcactcagagttcatagttcacattaggattcactcttgctgcatcttctataggtttgagcaaattttaatgatgtatccaccattatagtatcatacagactgtttcatcaccctaaaaatcctccatgttctacctattcctctgcactgctccctaacctggcaatcatggatcttttaaatatatcaatagtattgcctttatttatttattattttttagaatttcatgtaattggaatcatgcagtatgtagccctttaagatcagcttctttctcttagtgatatgtatttaattttcctacatttctttcatggcttaggagatcatttctttttagcactgaataatattctattgtctggatgtatcagtgtatttgtacatttacctactgaaggacatcttggagtttccaagttttgacaattgtcaataaagctcccctaagcatctgtgtaggattttatgtggacataagttttcaacgcattttggtaaatactaaagaatgtgaacgtatggtaggtgtatgtttaattttataagaaactgtcaaactatcttccaaaatggctgtatcattttggattcccactggaaataaatgataatttctgttgttccacatccttaccataatttaatgttgtcagtgttttggattttccccatgggaatagatcgtagtggtaccgcattgttttaattttcactttcttaatgtcatatgatgttgagcaacttttcatatgcttatcttccattatttattcattttatttttttgagatggagtctcactgtgttgcccccgctggagagcgatggtgcaatctcggttcactgcaacctccgtctcctgggtttaagcaattctcctacctcagtctcctgagtatctcggattacaggcacctcccaccacgcccagctaatttttgcatttttagtagacatggggtttcaccatactggccaggttggtctcaaactcctgacctcaggtgatctgcccgcctctgcctcccaaagtgcggggattacagttgtgagccaccgcacccagctcttttcatttattttatggtgagatgtgtgttcagatcttttaaggtgtttttccggtttggtttggtttggtttggcttggtttggtttggtttggtttggtttggtttggtttggttttccctttgagatggagtctcattttatcacccaggctggagtgcagtgatgcaatttcggctcactgcaacctctgcctcctgggttcaagcaattctcctgtcttagcctcctgtgtagctgggaccacaaacacatgccaccacgcccagctaatttttgtattttagtacagacggggtttcaccatattggtcagaatagtcttgaactcctgacctcaggtgatctgcccaccttgacctcccgaagtgttgggattacaggcatgagccatggcacccagccttgagcattttttaatcagattgttttcttattgttgagtttgaagagttctttgcatattttggataacagttttttatcagctatatcttgtgcaaatgtttcttccaccctgtggcttgtcttattctcttaatcatatagtttttataacaaggtgtgtgttatgataccaatttaattattaaaaaaataggtttagaataaatatattctctttctcaaggcctaaagtaaacatttcagataggtagactatatctatatctatatatctatatctatatatatatatgcttcagtttaaaaaatatttgtgtaaatgtgttattcttcagtatagcatacacatattttactttcaaaagctaattgtataaaatcattgaaggatttcatatatcattgctatgaccaattttatcttgggcttttaatatagggatgccttcagtatcagttaaagagagaaagtcatttgttatacacttaataaacaaacctgatgtgtgtataaatgtgctacatatttgcatgtatgcagatatcaattgacaatgtcttgcttttgacactgttactccttctagctaaactcagaatcagaatattttaacctgaggacagaaaaattagataaccaaacatgggaatgtagaatgttcctacaaataatattcacaatcttaaatgaaagtgttttacgtaattgatttgtaatgttcaggtgctgttttgtttatttccacattctcagtagtctttataacacctaagtgattgccagttaaatgtggcattattatgaatggttgtgtgctctgggtaatgtgtgtgtatacatgtgcacacacacacatatatatgtatatatgtatgatatatttgcaaacatacttagacatgtgtataaatataatttacataatgctcatattgaaatcattacttatcttaagcattaaactttttataagaagagtatgttactatccctcttaaaattatacatcacatattttactatttttatagcttctcactcttactaaagatattaagattaggagacaataaggttattaaaaagtctttcagtgctattacctgcctagttacattatacggcaaagaaacattataatgtagcctgggttggataaaagtgtactcctttgtaagaatgaattatcagaacccagcccattattttcagctgaagtctttgatctaagacagtggtcttgtgaggtttcaattttgtaaccctaaccttcctttcatcatattctaagtgaagtctgtaatatcttagctacatcaaagcaaaaataaaaaagtttatatataataaaaaccaccagaaacatcatttaaataagccttccattgaaaataataatagatttcaagactttcataagggagcaagaaaataaatctaatttgtctttatcacttcagataccatgtgtccttagttaatagtccatcaaagccaaatccctttagaggaaggagctttataagtgtatcaaggagtaaaatgttggcaatatccaaaacactaatttttaccattggtctggatttctataagcaaacaatttcaaagcttatattggaatgcttttttcttcaaccacattataatacaggacctcatgctgttcagtaatgtttctaaccacaaaaacaggtaagcagcctattacaaagttcatttacaatggaagctggaggctgttgactgcttttgtttaactgatgcttctggacaagtttaggtgcagttttttcttttgcattttgaaaaaaatatattcatttttaagtttaccaaaggacctatatttgctaaccattatattttctttaggcgtaaaatgagaatgaggcacttttttttttttttttttttttttttttttttttttttgagacggagtctcgctctgtcgcccaggccggactgcggactgcagtggcgcaatctcggctcactgcaagctccgcttcccgggttcacgccattctcctgcctcagcctcccgagtagctgggactacaggcgcccgccaccgcgcccggctaattttttgtatttttagtagagacggggtttcaccttgttagccaggatggtctcgatctcctgacctcatgatccacccgcctcggcctcccaaagtgctgggattacaggcgtgagccaccgcgcccggccatgaggcactttttaaagggcattatttgaaggaaaaataggggctttgattaagtccatattgaacatttcccataaagaataaattgtgactaggaatgaaactaagcaagaaaatatttagcactttaaaagtggtatattattggctgggcatagtggcacatgcctataatcccagcactttcaaaggctgaggcaggtggatcacctgaggtcaggagtttgagagcagcctgtctaatatggtgaagccccatcactactagatacaaaaaattagcagggaatggtggtacatacctgtaatcccagctacttgggaggctgaggtaggagaattgcttgaacctgggaggtggagattgcagtgagccgagatcgtgccattgcactccagcctgggcaaaaagagtgaaactacatctcaaaaaaaaaaaaaagtggtatattattttataatttagagagataaaaagacaagtaaaagaccttgaatttgtcctgaaggatttcacaatctgaccctttcagataggcaataaaggtattatagggagcctattgaaattatagtagtcaactgcaaccatgttggtgatatcaagaactctaaataccttccccaactacaagttcctacgtttcattatgtaggagataaggttataaaaactaaaaggacacataattacatatattaatgccaatgataagtttcagaaactttgtctcagattattgcctgggaaattcatgtgagaatgggcaaggtagaagaacccaggaacctgaagtgtagagagagagaacaaaaggcatcagccaagccagcagatagtaagacaaggatacactggtaatagagcagaaaggctttgaggcatgactttgagaaagtacaattaaagcttgaataggccaggcatggtggctcatgcctgtaaatcccagcgctttgggaggccaaggcaggcggatcacgaggtcagtagattgagcccatcctggctaacatggtgaaaccctgtctctactaaaaatacaaaaaaacaaaaattagccaggcctggtggcaggcgcctgtggtcccagctacttgggaggctgaggtgggagaatggtgtgaacccaggagacggaacttgcagtgagccaagatcgctccactgcactccagcctgggtgacagagcgagactccattaaaaaaaaaaaaaaaaaaaaaaaaaaaacaaaccttgaataaatacaaaggcagtgtggtattccctaatatcatttgacccagcaatcccattaatggatatatacccaatgaatataaatcattctattataaagacacaagtacacatatgttcattgcagcaccattcacaatagcaaagacatggaatcaagctaaatgcccatgaatgatagactgtataaagaaaatgtggtacatatataccatggaatactatgcagccataataaagaacacaatcatgtcctttgcaggacatggatggagctggaggtcattatccttagcaaactaacacaggaacagaaaaccaaataccacatgttctcgcttgcaagtgggagccaaatgatgagaacaaatggacacatagaggggaacaacactccctaaggttttttggaagttggaaggtgggaggaggaagaggttcaggaaaaataactaatggtcactagacttaataactgggtagtgaaataatctataaaacaaaccctcaatgatacaagtttgcctatgtaacaaatctgcacttgtatccttgaacttaaaagtttaaaaaaaagatgttattggtgttataaataaggttaaatgcacacagccaaaataattttctaggtttattcatagaaatgataaaatgtattttacacaagaaccaatgatttggtgatggaaaagcataagactgagatatcccagttattagaagagtaaccatgggtatattatttatcctttcttagtacaagtttccttattatacaataagggtaatcctaattaatagtctttttgcgaagataaattatttgtataatttaatataaatgtcctcataaatatatgttttatacactctagaattgctatttgtagataatatacttaatttataaatgtaacatttatttatattttagctaattatttatatatattccataaatttagtctgataaataggtgtacaaatttatattactgtattttgaaatatgacatactgaagatttttttttcactttcaagttcagaggtacatgtgcagctttgttacatagataaacttgtgtcatggggatttgttgtacagattatttaatcacccaggtattaagcctagtactcgttagttatttttcctgatactatctctcctctcacccttcattctctgagaggccctagtatatgttgttcccctctaggtgtccatatgttcatataatgaggccagcatcatcctgataccaaaacctgccaaagatacaacaaaaaaagaaaatttcagggcattatccttgttgaacattgatgcaaaaatcctctacaaagtatcagcaaaccaaatttagtaccacatctaaaagcttatccaccataatcaagtagggaaacaaggttggttcaacataagcaaatcagtaaatgtgattcatcactgcattagtccattttcacaatgctataaagaactacctgagactgggtaatttataaagaaaataagtttaattgtctcacggttctgcatggctggggaggcctcaggaagcttataattatggcagaaggcaatggggaagcaaggcacatcttacatggtgacaggagagtggttgggggaaaaccactgcacacttttaaacccttttaaaccttcagatctcattgttgtgagaacagcatgggggaaactgccccatgatccagtcacctcccaccaggttcctcccttgacacatgggaattacaatttgagatgagattttggtggggacacagaaccaaaccatatcattctacccctggcatgctttcattttcaattctccctccgtttcattttttctatcgctagcacagtatactatcacatttctaaaacttgattgctccaaatatatttatttcactttctgagaaatgaggaaaaatgaaaagatgcataaattataaaataaaattcaaaatattttattaaatgttaaagcttaagttttgtcttaaatttaaaatgacagtagcactgagagaataatcaggtaaatatatctgtaattgtatgttaacatgttaaatgaaatacattatcccactccaaggtggaaccacattaatgagtgcaaaatgagtgactctagttatgagaatttcagatatgatcgttgatgtgagaaatattttagtgctctaaggcagtgatatttagtctcactcaaagtagggtagatatacattttgccttttatttctttttataatatagactaatctatcatttttgtttttctgtttagaagactctttctcattttaagatcatgcagttaatttcccagtgtttctttccatatatttatgattaaatgaatgccattaaacttaagcagtttataatcactgctgccattcaaatttttctctgattttgccattttacagatagagtgtacacattatttgactctaaaatgtaatatgtagtatgagaagggatttctgtgcctttgttgagttctagaggcagttttggcaatacagtgggaatacaccatcttggaattttcagtttattctgctaatatgtacacagggtcagaatgtatgaaatgaggagcctcctagaaaattactgatatatggctacatgatatatggtcgctatctcattagtcacagaccctgaataacactgcgtcttggtttgtttactacctcccaaactctcgcccaattcccctggctcatccttgagacttgggaaactgaggcctcaacacaaaggcccctctgcttggtttcccagaaatgcagacactcctatgatattttcttccttggtgagccggtttttctgctgctggccttcactgttgttatctatactttgcttacttgatcattatcttagctaatacttccctgagggatttcatttttctgtttcccatctacagcttatttgagagtgtgggccattaaacttttggaatgaaaagtttacaaatttagaaaagtacacaatacaatataagaacattacgtttatatcttagacttgcacctcactaataaattcaagcaatttccctgcaattcatggctaattagttttcaataaatatagacaaaatatggttttgtgctacaactccttagtgtagtctctcatgtttactgtttgctaaatatatcaccacccacatgagattatgattattcagctttgtctgtagtgatcatcaaatatctaattgaaatttctcctctccagcatcaatgtctgagatttgtgaaaattaccatcaggtcagaaacatcaaatctttattttaagctcacttcctcattagataaaatgaattttgtttagaagacagaacgttatgaccatactttaaaaataaaccttgttttggtaggaagaacactgtatcagattaccctagagttggattctggtcccacctgacaccttgtaatattaggaaagtccctgcaccttccaaaggttaggtctaggtgctctctaaatgtttttttggctctaaatatacactttagtgttttttttttaataggctatataagatttatacatagattcaaataagtgaaaataaaatgatttctgagtataagtacatatttgtaatatgcattaaaataaatatatgacaaaaattattctttcagaatatagtgatgaggggagaagtccaattgtcgtaacttggtaggtgcaggggagttagcagaaaaatggcaaagacataaaagatcactatgtttaaggaatagtttttaaaaaattattgtaaagtagattttgtgcttcaacaaaagaaagagtatgcagaagccacacacaattaaagtatgagatctggggacttaagtgtttctcagagcaacattttgatcttagggttttgagaacttttaatttgaacttctattttaaatttctctcagggagtgggagagacaggatttaaaattttgggcatacccaaggtgtgaagactaataggaagtgccctacataaagccaagacaaaaaggtctgctgtcacaataaggctgaacaagaaattagaacattgctcagagagtttgcaatgtcttgcatgtcttgaccttggcactgagtcaaagggaaaacaggcttcccctgagaatttatgaccataaacaaaatttgatttttggcccacattcatagtatactgtagggaaaagataaatgtaaggtggtctcttataggtaatacatatataagactggcaaaagtaagcacacatattcttgggagaaatgcatatttaacccaggcttaaaataacacctaaagataacattctgaagagtattattcacccgtaaccaaaagttccagaagaatacaaggcataaaaaaacaaattatcctgggagaaagccagtagaaacaaggaaacagaatcagatacaaaattatttagattttgcaattagcagtcatcaaataaattgtctttaattttttaaagtttgagaatataagcaataaataagaggctacaaaaacaactggcacatttgagaaggaaatgaatggaatgactagaaagaggggggggaaagatgcaataattagatttaaaacctcaatggtgaatcagatagtagattagcctagacatcaacaacagacccgaaaaatttattcagacctgaagaagttatttagaattaagcacagatgggcaaagagatggaaattatgagagggtaaaaaatgtaggccagtgtataaatgtccacaacagtatatactctatatgagccccctgcacctccccagcttatccacagttttgctttccatagtttcagccaacctgtggtatagtacaacaaggtgttctgagagagagaaagaccacattattgtactacaatatacttttataattgttctattcttagttattgttgttcatcttttcctgtgcctaatttataaactaattttaaactttattatagatatgcatgtataggaaaaaacacagtgtacgtagggttcagtactatctgcagtttcaggcatccactgagggtcttagaatgtacgccctgtggataagagagggactactattttttataggatagtataaagaggaggaagaaggcatattcaactagatgatagctggctgatacctttgaaaattgttgaaaaacacattgattctcagtataaacagataataatacctacattctgatacatcatagcgagccagcagaaaaataaacagaaaacttaatagtagacagaggaaacaggcagatttccttcaaaggactggtacttactctgctaaatggtttttcaacaatggaattagaaaacagcagaataacatacctgtgctgggcaaatacacacacacacacacacccacacacacacacacacacacacacccacacacacacacacccctcccaaaatggtcaccctacaattctatagactaacaacatccaagaaaactttccatcaagagcagaggcaagataacaaatctacagacaaacaaatattaagtttaccaccaacagaccctcaaaaaacaaacttctaaatatgtaatttaggcagagggaatactatcacaaatggactgtcttagatggaaagcatcttgctaagtaaaaataattgtaaatgtgtattaaatacaaataaacatgaattgtattctaaagcaacacaaaacagcatcaacaacactgtctcatttatggagcaggaaacagtatagaagaaaatgttgtgcattaaaatatcatatgtacccccaaaatatgtacaactagtatgtatccacaacaattaataataaatttaaaacaattttgaaatgctttaggaaatttgcttgtacatttgatgaaaagtatttagcattaaaatatactcactgtaatatctttaaattattcaggagaaagataaagatatgaatgttaaaatggtggatattaaagctaaaaggttatacaggagtataattttcaaggaaacagtgggaagaagtgaaataagaaaaatgaaagaaaatatcaatcagaggaaagcaagaaaggggaaaaaatccaaatgagttgcatttaaagtttatgtttttgttttgtagcagccattgaagacatcagaaattctgggatagattacagcttaaaatctcaagctagaatgctgagaagttattaaaaaatgttttgttcacttgatatttcaaatagaagcaaatagaaaatatatatatatatatatatatacatatatgtagggaaacctgataattataatgaaaaaaacaaagcaaatcaacacttatattagtcttcccaaacaaacaaaaaaattgggagtttaatatgaatgagctctcctcaaaatactgtatcattttgtctctagagcaactctgagaaataggcattattgtctccattttacaggtgacaaaactgaaactcagtgacttaagtaactcacccaagggcccacaaggctcccttgacccgctctgggaacttgcaatggggatgtggctcaagccctttcctggagggcaagcacgcaggtgagcaggtgcaggagccagggagagcgcttttgggctctggccccatggcagtgtttaggggtgttttacaattaatgctcttttagcagttgctgtctgcagatggctaagtgttaaccatctcaatggagagtcaaggtgacagccttttacaccctgccctcttggtaaccaggttcttgtgtggcatccaggaagaatcaggttacacagacttgaaagatgcagagattttattgaatgatggaggtggcactcagtgggatgggaagctggaaagggggtgaagtgggaaaagaatcttctcctcttgacgttgagatgcttcttctcttctctccttctctgccaagccactctgctcctctgccagtggggtttgtggtttttatgggtacaggatgtggggattggtgggccagtgtggttttggaaaaagcaacattttggctggaaaatggggataactgttctcatttaggggccatagtttccagccttaaggccagggcctttgctggggaacctccctcttctacccagcatttgtctgcttcctatttgtatcaatgtcaagattcaaattcaggttttctcaaagaaagctgtatttgttattttcattgcttcatagctgaaatgggagatatagaggatcattttttaactggcatggaaatctttattcagaccaaataatttgaaaataatgattctgagaataaagcaatctaagcatggagacagttcatatgattgtcatgattgatgatactggttatctgatttctgctgcattaaatcaactgagaagcccagaaaaccacaaaagccttgctgttctgattccttcctcttcccctcccagttccagcctgccctcaccacttgaaacctccccatttcctgcacaagggaaaagcaaaatgtcaagagggttggataaggctacgacaatgcatacttgctgctactgtcacaaagaaatctatataaacatttttatgaataaatgtaattaccaaaaacacttttgattgtcttgaataaaatacaatacttatagttgtacagaaaaaaaactttgagggaccagcattttaaaaagcatatctttgcaatgtataaatctttctgttaaaattaatgatgttggcagcattactaagcagacagtagaatttgtacaatggtaatagttgtacaacattgaaatgcctatgagtataactgacataattctttagcgggcagtggttaaaattaaggcaaaatcagttccaaaataaaagatatttttagaaaactaggatttattatgtttggaaactcatggtatgagttttgggaaaagtagctttatattttgcagaaggaactattatctaagaacaatcattcatatagcttctgatttggcagtgatccagcgatatcattatgacagacaaaggaagcagggctttttcaagctttttaatttagaaaaatagattttgttcgtttgattctcttttccattttctataatatgtttaaaagtgaggatctattaattttataaggtgaggatgctaagaaaggatctgctatcacatccatcaaccacagttgcctagagcactatttgtttccttcatgaagaaaaatactttcttggattcactctgctcattctagaatcatctccaccataacaggtgcagatgaaaaagctgtttttctaacagtcctggagttacaaatccaatttgagtttagtgattgaggccctatgttctttttttaatgtaactttaaaaagcctagggctttctatgcaactggttctgattaagtataagtctgtctttttacatgttgcagtttgtcatcaagattctattagaagcctcattgtatgatgtccctgtataaaaatctccagacttctgtcatacaggattttgcaaaggacattctaaactgtgtggtctgaggaatacctgcctcaagattccctgaggaagtagttaaattgcaaatttcttagctgcattcataatctaccaactcaaatctctctctccctctctgtcatacacatgtatgtgctcatggaaactcatattttagcaagcttttctataattcttgtatgtagagaaattttagaaccagctttctaaaagtttaaagacagttgaaggtattctgtttaaagaactttgaagtttgacacttagattttgcactaggtacaaatcacagctctgtttttgcaacatactagctgtgggaccctaaatatgttctcaatttctatgagccccaattgtcttgtatgaaaaatggaaataataatacctgttttgcaagattgtgtctaagatttagggagcaaatatatttatagttccttgagttgcttaaaatatgatccttactatttacctctgtgtgtgttttctttagaaccaacacatatctgagtagcagtactaacctattgtttctggaccaaagtgtgggtccggctgctatttctcgtggcccaataacaaaatcaagatgaattggggagggagagagctttcatatctgcaaacagttacagagagaaggcctggaaattatcaccagaccaactcaaaattacaaagttttccagagcttatataccttctaagctatatgtctaggtgaaagtatgcattcatctaaagacataagtgattaacttattttttttattatactttaagttttagggtacatgtgcacattgtgcaggttagttacatatgtatacatgtgccatgctggtgcgctgcacccactaactcgtcatctagccttaggtatatctcccaatgctatccctcccccctccccccaccccaccacagtccccagagtgtggtattccccttcatgtgtccatgtgatctcattgttcaattcccacctatgagtgagaatatacggtgtttggttttttgttcttgcgatagtttactgagaatgatgatttccaatttcatccatgtccctacaaaggatatgaactcatcattttttatggctgcatagtattccatggtgtatatgtgccacattttcttaatccagtctatcattgttggacatttgggttggttccaagtctttgctattgtgaataatgccgcaataaacatacgtgtgcatgtgtctttatagcagcatgattaacttattttaatctatagctaaggtctgagtcctgaggccttcctctggagtctcagtaaacttacttaatctaaatgggtccaggtgctagggtgattaccctcatcttgtctcctgctaaatcacggtggtttggggagttccttcagccccgctggcaaacacgtttgtggaggcctggggagtttcttcagacccacagttagacttgtttaatcctaaatggatcctgttaaaaattcctttgttatttttgtcatgctttaaggtccagaaaaggcctaggcaaaactgttggtgggcttttcttacatcccagcttttgtataagggcactggcttttaatatttaacttaaccactcagtcagtacagaaacagttgttatggaggtctgtgtcagtgagatctggcctgacacactatggtactttcctatagcctcttatcatttctagcggggagtgtgctcagttcatggggttaaaaatgaatcccttacttatctttgcctgctcatcatcttatttgaagaaagggatgtggaaacctaatggtctttttgcaaaatactagcaaagatttgagcctatcctgtcacttagacaactaattacaccattacatgctgcatttacaattaaagattttcagctgatgaaaggcatgttcaccactttatcattacctgatatttccttgccaacactcaagagtatcatgattttgatgaaatgaaaacaactcaaggagctacatttgctaagcagcatcaacagaacagttcagaaagcccattgcaattcccttctgccccattgaatttttccattgagctatttaaagctatagctttcattattacctcatggagcttgttggctgccaaaatcattagtaatttctgctgatccagcattgccaatatgaggtatcactacctgttaggcacatagaactattttggcagtaagccagttggatttgatcttacgttgactctgaccagatcattcaatttaaatcacttagtgtctgcagtgcttggcatataatgtacttgctttaagtatccgttatttacaatgacctcttagcaataacaggattggatagatggcctagggccaaaggataccctcttaagattctcttctcccttctttttgatttattgcttcctggggtcacccctctacttcccagcctcataaatgtgatcaagaccaatcactattctgatgattggtccattttaaatatttatttcaagtaattgtctaactcctccataaaaattcttctaatgattagaatcttcatacttacaggcttaccttctatgtgaacatatatttaaaagttcttccacattttatcagttatgattctgttccacgtgacagaaaacctgatctaacctgtcttgaatgaaatagtgatttattgcctcaactaaatgaaaagtgcagaggcttctggcagggcagaatatagagataagaaaacaatgtcaacaggcccttgttcctctctcagttctgcttcattgctttcacacagggtctctccctaaatgcataaaatgactacaccagacttaggatcttacattggctcagcttcaaaaactgttcctcggaaagagtgccagtcactgtttaagcattccaagcaaaaatcacattgcacctcattggccatatttagatcacatgcatgccactgagatcatcacttctggtgagaagaatggggtactctgatttattttgcccaacaccacatatctgctcttgaatcaaggtttgatcaaggtctactcatcccacatgggctgaaagtttcggtatgggtctctaagatgaaatcaaggttcagttaccaaggaaagaggaaacaaattattggaatatctttgtccttacagtctaacaaagtttaccttcttaggtgtttctatcatcaagtaataattaattcctcatactctacagaacaaagcctgtattttcttttcctataatctcttcattttgaagaaataatgttctttctctaagctataataaatttagcttagagataataagatcaccaaagagttaatacaaacctaagcaaagtcaacagagatttagtatatggaacaatggatataatacttgaaaacacatgagaattacctgatagggcaccaaaatgtaaatatgcctgtgtatcaacgataccagatctatcacccataattttggaggacctcaaaggtatttatgtttttaaaaagcttcagaataagtctcatatacaattttatttataaaatcattgatctttatagaatgagagaaacaatataactgttatctacctggcaagagaatagctgaacaattttgcctagtactaaatgtcgtattttggaggtattgagataaacatagcctgctaataggaaaatggccagagtgaaactatgccttttgagaaacagaagcaactggccacatggataataagaataatccaaagctaaaagggaaacaatgaatatcccaaggagtttttcagaaaatgtttggtattcatctgtccgttcactcagtaaatatttaataaacacaaactataaaatgtaggcactaaactagatgctagcactaaaatgatgagtagaaacaatcctagagtctactttcatggagcttaggatctaagactgagataaataatattaacacaataagttaggctgctgttgcttgcagaccccaaatcaaagtgatttaataattattaactcataaaactgtaaatacagatgttggaaaggattcgagatttgctatggtttgaattagtcctccaaaatgtatgtgttggaaatttaattccgaatgcaacagtattgggaggtggggccttttgggaggtgttttggtgatgagggcagagtggcatgggtttgtgccattatgaaagagtttgaaggagagagttttgttctttctactccttcaccttctgctctgtgaagacatagcattactcccctttggaggatgcagcattcatagcaacatctcggaagccaggaccagaccctcaccagacaccaaatctgccagcctctagaactgtgaggactgtctattggttataagttagtttgcggtaatctgttatagtagcacaaacacactaagacagaagttgataccagagaagtggcctgttgccttaacaaatacctaaatatatagaagtggtttcggcactaggtaatggatagaggctggaagagttttgatatgaatactggaagaagtctactttgctatgaatggagcattagggtgattcaggtgagggctcagaagaaaagaaggggtataggaaaaccctcagtcttcttagacattacttaattgatcatgtcagtgaagacttttctgatgaggttttacacagaaacgaggaacaaggatatttaaaactggataaatggtcattctagttataaagtggcaaagaactttgatgaattatatccatgccctaggactttgtggaaggcagaacttaagagtgatgaaccaggatatttggcagaagaagtctctagcagcagcgttcagaatgctgtgtggcttctttggactgcttgtagtaaaatgtgaaaagagagaaatgatttcaagatgcaattcataattaaaagagaagcaaaatatgaagatttgggaaattttcagcctggccaagtaaagaataaagcagtattttgagaggaaaaaatcacaggtttgatatggatattagtatggatagaaggcagcctgatattatttatcaagacaatgggataatgaccccaaagacattttgaagaactttgaggtattccctcctatacaggcccagaatgccagggcctttggggtgagggccagggacctaaggcatgagctgtaaccttggtgatgttcacatgatgctaagtctgtaggctcacagagtatagatctgtgaaggcatggcttccttccactagattttagaagatgcctcagagagtctcagtgccaggtcgagacctactgcaggggtggaactgccacacagtgccccactagggcaatgccgagcagaactgtgggatctgggctaccacagagagttctcaatagggcaatgcctaaggagccatgggagcagggccattccaaagaccccagaactatagagccaccagcatgcagtagcagcctggaaaggcctcaggcatgcatttcaatgtatgagagctaaagcatggtctgcacccagaaaagccatatgcggggagctgcccaaggcattaggggaaccacatccaccccagtgtaccaggaaggtgtgtaaatgagtaaaggaagattaagttcaagtttgaagaatgctatttatgctgctgagttttggaattacatgtgacccattactccttccttcttttctattgctcccttttggaattggaatgtatattctatgcttgttttaccatcatattttggaagtacataacttgtttgatttcacagcctcacagctggagagcaagttgccccgatacgaatctcacccatatttgatatttaaatgaaactctggacttcagactattgagtttatgctagagtgaattaagactttgggggctatcagggtgaaatgaaggtattttgtgtgtgaaaatgacataaatttgggggttctggggtggagtgctatgatctcaatgtcccccacaattcatgtgttggaaacttaatccatactgtaatagttttgggaggtggggccctttgggagatatttacatcatgagagtgttatctttgtgaatgaatgaattccattaaaaagggtttaatgtagggagttcgattattttttcacttctgcttctaccatgtgaggacacaccattccccaactctggaggatacaagcttcaaggtgcaccttggaagcagagactcgccccccttaccagatgctgaaattgttggcacattgatcttaggcttcccagcctccaagactatgagaaacaaatttatgtttataatttacctcatatttgatattctgttatagcaggataaagagactgacacaatgttaaataattaaatggctcagtgacataactaaatatattgaaatctttctctctattctgccacttttgttgttgggtcatccacaagctggtgacaatctgtcttctatactttcagagactatacccaaacacaaaatatccagaggaaaaagaagactgtttctcctttagtgtctatcatagatgtggtgataagattctcagaattccctcatcagatttcttcttatatctcattgaccaagttgaggctctgtgtatgtgtatatctatatcaatatctatataactgtatctacatctatatctatatgtttgaatctgtcattggagaaaggtgaaggaattcctatgtttgatctaaagtaattatctaatattatgtggatgttgaaaatcaaccaaaatgtctactacagtcattactcaataaatcaaagaaacaaatgtaaaattacaaatgcaaactatgcaaaaagtcctagacattgtttaaaagtctgtaccatggaaatacagtgtcgggaaagactttcctgaggaggcttaaggagaaatgaaagttaataagtagggtttgaatgagtgaggagtgggcaaaaaagtgtttcaggtcaggagaagaacacgtgaaaaatatcctgtaagctggagaaaattgagcaaatgaagaacctgaaaaagtgtggtggggctttgactgagagtgcaaagatgggtctttgcatttagatgaagctggagaaagccttacatatatcagtgaagagttttgtatctttttcctaagaacaatggagagtcattgcaatatcatttttttctgctgtgaatgggacttaaaatgaacactgggagagaataatttttccaggtgaaggatggtgatactttgacttaggtgttggtagtgaaaatgtagagaagtagattgatatgacatttatttagaaggaaaacttgacaagatttgagatggtttgcatgagtgttttaggaagcaaggaagtaggtggtgttgacaatgacttctgggtttcaggctcgctgaagtaactggtagtccagggaaatgaaccatgttgagactctacaataagaagtaacagagtatctgaaaagaatgacaacaaggctgacaggttacaggagtactgcatttgagttccttaaatctgtcaatggttccaaaatctgagcaatggctttcttcagctgtaaaagcataacccacacagctcatcacagtccccagaattgaatgaaactgagtgaccaatcactcttggtccatgtgaaatcattgagtgtccagccagaagctgtttctataggaagcactagaccttacaataaagttcgggagccacttggtgcgagaggaatatgctacctaccctgaaccaaaaagcttctaagttggacatacgggatttaatcatttagcagactcttccactagcaaattgctggaaggccaaaaagtaacacacagtatgctctcaatgtactttgaaagcatacatccctcagacataagggggtttctttattttctgttgatgatcttatatcttaaaaaggaaagaaaaagaagctttataggcttattccagtttgtgtggctacagatgtccttcttagccatagatggacactgtatctctaatggtctaatccattaaaaaatagtaaggatatgtcctattgctcaaactttaaataccattcactcaatatattgttgaacatctaatccatcctttcatttgtgtttcacatatccttattttatcttaaatcttttctttgcctcctacagctttacacatatgacttacctctctggctggttattctacaatgtagctaacattcaaaatagcacaagtactcaacataaaagtaacttgtaatccctgctctgtgggaattggtacttagagttcccattaacacagtgggatgttatattatacacttaactctatacacattcaaattaaaatatatacgtagtatgcacagaaatctactcaaataagatatcatgatttttgagctttaagaattgactgcttcttggatttatcttttgacaagatagaacctgctgagaaagatattttattttgtgttcatattttggtggttgtattagagaacaagaattttacctggtaaagatatgatcaagcatttatttccttcctcttatggtagaaacaattatgtgaattttaaataatcagcaaatttattgttgaattaccaatagcagaaacaaacacacagtctcatggattgtataaattatatttgccattgctctcatttattgcttcagtcttctagttgcactgatatttctagcattgcaattaatattaacaatgaccacttcttccccatatcatttcttgtgagaaatcaggaaaacaaataaaattaacatttattgatgagctattatttaccagactccacattaggtgtttttaggtactttaatgtttatagtaatttcagtatatccaccaacgtttttgatacacccatatttgaacagagttttggcatatgttaatttggtaaggagcatcatccctttatgatgatgtagaatttttgaccacacaattgaagctgcttttgtcaagatgaacatattactctctggtattatataccatttttaagtaaaaaataaaaagaattaagatctgatatgtgctgtctatatcataaagatttatattcagataacatgtttttctcccacccttgacagcagtatcataaaggggaaaagttaatcacatagacttctaatttgaacttggtgatttacatacaggtggttttttgggcaagatatactgcatgaatatacaatctatttatgttaatgatttgcactggaaaagacaacacattattttgaaatagtcttcaaaaactttctaaattttaagcagatgattttaccttaaaaaatatgtttgcgattagtgtagctttcctcctgttctaccttcattgagccttaccctataactataaatatatgggataacctacaacctttagaaaatatttttaattattactttccttcgaacatgaataataagattaaccagactgagctgagggagtgagctagaaatatctctcactgagagagaatcagactccttgcttatgatagctataaagaaataatatctgcttataatcacttttaaccttacatctaaattctatatgcagtggcaatgcaaggaattaatatatgtgttattttgaaaacatgcctagattttggaagtcgtttgaattctttgatatttggtgactccctacaatctataaaatacacttcaaattcctcagcaagtgttatcttgaatttccctacccactgaccataacttttctttctttttttttttccctgagatggagtctcactctctctcccaggctggagtgtggaatgcagtggtgtgatctaggcttacttcaacctccgcctcccaggttcaagtgattctcttgcttcagcctcctgagtagctggaattacaggcgcccaccctcacacatgtttaatttttgtatttttagtagagacaggatttcaccatgttggccaggatggtctcgaactcctgacctcaagtgatccacctgcctccacctcccaaagtgctgggattataggcgtgaaccaccatgcctagccagctactctttctaatttcatctttttgtctcataccttcccatttggctataatgtttcccaagggcactctgtttcttagatcttactattccttctccatgaaatctctctcttcattcaaacctaacaattcttccttgttcattaacacttgctcaaaatcacatcctctgggaagtcttccaaaccattcttagttcccatagtgccacatttttatctttatctatatttatacctatgtaactgtcccatttattttatagtttgtcaggcatcctgttgaaccacctggtaaaattcttgaggtcagggtttatgttctacataaaaggtgtgtagaagcagaaaaatgaagcaaaccaacatttgaactatctctcctttttttttttaactttctctcttttgttttactttaaaaagtatgatttgtttagaaaaaattcacataccaagtgcaccatttgcaagtgaacaatatagttgtttttaatatatttacaagattgtacaatcatcaccactacctaacttggaaacatttttaatactccttccctacaaaaacaaccatcaaaagtcactttccattctctcctccccaactctggctatcaatagtcttctttctactttaaagatttgcctattctggacatttcatgtaaatggaaacatttacatgaatcatttatatacagcctattgtctgattttgtttccttagtgtaatgttttcaaggtttatccatgttgtaacatggactgtattcatactttatcacttttgatggttgtgtaatagtccatcatacagatagtcaacagtttatccattcagcagttcatggacacttggattgtttccactttgtggctattgtgaataacgctgctatgaatgtacacatacaagttttcatgtggacatattaactcttttctgtcatgctattttgttcctagtatcttttgcattggaatgatttgccatgatttgagaaattcactttattgttaaaccctttttccattataaaccttactttttatatcacctggtgagcttcttagagagaattagtatcagcactaattctttattgacatgtaatgatttatcttttccaattacttatattttctaataattaaaataactgcccggcaagtggctgaattgggttatttgttcttgtggtgtaaatgaggctctgattatttttccatcgtaggataacgctccctactaattttaggtggttgtttttatgctttgctgtgtccaatatcatcaacactgacaggagaagatgcacttagaatatagagagggcaacttgctcctttccctatgttacctgacattgcttgtgtctgcgctgggtgagggattaggctgaacctacttgacttgtattttctcttgtaatacaactctgaaacctgctgaatcttacagactatgtttagaaaacaagaaaaaaaggccctatactttgaataaagagtgctgcttcaaaaactcagtgaaccaagaaaacttgcagcttgcttttacccaaatgagtcaaatttaacatttgaaagaataacttgtggctgaatgtgcatgccaaaagaaactattgatgtagattataaggactatgatgtaatcgttccttcagctgtatcttgctgcatattttcacaatttgtagaattttatacctaggagtaacattagagtctatactccacccagagctcactctttcttttttttttttctttttctttttatttatttatttatttatttatttatttatgaatgagatacttgtctaaggagtaccacagctgcttgtctaaggaccacacagctaaggagtagcagaactgaggattaaatccttgtctatgtgattacaaatgctctgctcttcatattttatacagtctttattgtttttaaatgacagagtcatgcctacctctttatagttgactgcccctttcattaaaggcattgaaaatgaaagggatttatatacttcgcatccattattcctgtattttatcctttttgttttctaatgtactacaatttaattccttatgttttaattgacaaatatttattgaacatcttttacatataagtacattctacgtcctgggaaatattgcttactatctaattcctgacccaaagaagtttacaatcttatttgtggcaccagacatttatgtaaataaatgtaataaaatttaatatgtgaatattataaaatcaatttattgaaaagtgtccactatttggaatataagaggggaatacatttatcttccagtcactattttcctcccggattttgcatactgactctcctctttttcatcagctcttttaaatggcattttactcaaatttcataaattgtcaccaattttggttaataaacatttcttattcaagtatttaagcctaattctagttcagtttacaatttcaaggtcaattgttatctcctttcctccccttccgtcacttcaggctagtgctgtaccttcagggactcgaagtagaaggtgtaggaaaagtgggacattggttggatcttagaaaccatcctctccctgccttctcctttaggttaatgagaggggaaatcaggaaaagagcaggtctcttcttaggtaactggaaaagatcaattctttttctttgctatataaaaccaacacctggtatgttgtctatgacctaaatgaaaatggtggcaacctccaacctatccccattaagaagagcttatcttcactcagcaagcttcagcatttgtaagtcctgtaaaagacctggccagtacttctggctgaacttgtgctggcacatctcccctaatgcatgtgtttccatataatcctttttcttgtggtggtcccagaaaacctgtgtcctcctcctagagtaactctcagatccagggatacacagggcaccaatcttccttactttccaaaagctggaaaaaaaagggaggctgctgtcttaaccttttccttcctggaagtttttcactttgtctaatctcacctactctcatttcccctactctcttgctacataacaagccaagatcactgcttaagcagacatccactggtgagatacagtgctggtttttccttcttgtaagctgtcagtgtagttttgggtaattctttttaatcacctgtctctagcggtttgaattcagaagggaaagagcctattcctttccccaaaagacattttcctctctccttaccctcttccatccacgggcatagggatagagacagcaacaggtagtttgttgttggtatctgttagatcaagttatctgatctgtcactcctcagtaattctggtgcagaataggctgtccctcagggctggtgggtcttggaattttaaagtgaagtattttgtgcatttaatttctcagctataggtcttagccacaagtctaaaaatatccccaaattacaatcagcatcctgttacatatgcagtaataaagattcaaagacagttttctggcctatggaagaagacacacttgctattaaaagaatgaagaaaacagtcctgaaataaaggaagtggcattttaggtggtttatcatagtgatatataattaaagttaagtaactaaataaatacctaaaatataatatatatatacacatatatacatacatacataaagtgttcatatatatatatatatatacacacacacacatatatatctccccagaattttcattttttaatttttatttatttatttattttttcacagagtctcgctctgtcacccaggctggagtgcaatggcgtgatcttggctcactgcaacctccgcctcccgggttcaagtgattctcctgcctcagcctcctgagtagctgggattacaggtgcacaccaccatgcctggctaatttttttgtatttttggtagagatggggtttcaccatgttggtcaggctggtctcaaactcatgacctcatgatctgcccgcctcggcctcccaaagtgctgggattacaggtgtgggccactgcacctggccactatgtatattttatagaaataaaatcattatatataaatatgtattatgatatatttgatgtacatcaaatcagtatatataatgattttattcctataaaaatgtatagaaatttcatagagtattgagattacataatcatggaaaaacctgagaagatagttaataaatagtcattagcacttgcctcttaagattactaagaaggaggttggaattgggaatgtctgtttctttcaatatttctaaagaaaatagtattttttagttactttctgtcattaagagttttttaatctgaaatatctttggaataataaagcttttgccaaggggagtgaaaggatttgagctgttctaggaactctgtgtagcagctgtgtgcagatcctggataccaatggcaagctaagaagtgaaagagatgtagcaattgagaaatcatcagaatggattctgaaagatgtatggggagatatcaaagatgccagcagaaagggggaacaaaaaagggaacctggcaattgattgtgtttttggatatgctgattttgagctgctggtaggatatggaataagcccctgtaagagcaaaactagagcatgaaagattcctcagagtgggccatggacgcaggagttatcacacatgtgttatgggtgaagtgactggagagaccaaactggggccacaggaaggagaaaaattaagaaatagtgtcagctaaagcctacatttatacagtatcataatgagagttgactaatgattaaaattttagaaggcaaatctgtgagaaacaatataagtgggaaaactaaccaaaggaaatcccatgttaaatgcaaatatacaaatattagtttcttatatttttgaagcagttgttgaagagtatccaactttcttgaatacattgatgtgccacttaaaaaaaacatatgttgtaaaatataggttttggttactcccctctctctaacatacactttttctctaacttctctaacctctgttataccctgctgtttctcagcacctagcatagtacctaacaagtcatagaatttaatgaatttgtaataaaggaaagtcagtcacatacatgcaaattcatacttcagaactattggggaagaactgatctcaaatggcttcacatattgaaaccattctaacctttcttggaaagctctctctctctaccactgtctcctattagtctttattagaaaaaataggaagaattcagctattcaacaattgtgcaaagcaatttaagtgttatttgttaaaatacagtttgtgttacactttatcgttacctcaccctccagccccaccttacagagaagaagagaaaacactgtgaagttctactgctatagaaatgtagttactttttagagaaaaatcccatcaagtagttcaaattgattcattgatctctagctctctcatcagagcaaagtaacaaattattaacatagatgacaaacgaatacacacaaattaagcaggagaattgactaagcatctacagtggactttgttattgcttctgcaaaatagaatttttttgagacagagtctcactctgtcgcccatgttgtagtgaagtggcccaatctcggctcagtgcaacctctgcttctcagattcaagcgattctcctgcttcagcctcccaagtagctgggactacagatgtacacctggctaatttttgtattttttggtagagatggggtttcaccatgttggccaggctggtctcgaactcctgacctcaagtgatctgacagccttggcctcccaaagtgtgggaattacaggcacgagccaccacacccagcctgcaaacgagaatttaattttccttgaaatctggaaagctccctgtctgtcttatactattcctaaattatcttgaaattcatattaaattaatacttcatgttgacagtttgtatccttcaacttgcttctcccatttttccttcatctcctttcacttaacattcatataggtctgttatgttggtgagaaaaacagatttggaggaagaatgtctaaatttgtgtttgtatggattgttaatttggggcgagccatttcattttacctctgaaaatgtattcttatctctacaatgggtaaccctaaccctacctcagagagatttgcttcagtttcagattaaatattatatgtacagtacttgtgtcataaatactcagttctcatcaatgaattaaaacatacctgactctgtgaaacttttaagaaaaatcacctttctttctccctccttttctccgtcccttccttccttcctcttctttttccatttttaatcaaatcattcaactaaaagtgccaacacaggtttcaatatttgaagccatttgagatcgattttcccccagtagttctgaggtaagaatttgcatgtacatgaatggcctttctttactacaaatttattaaatcctgtgacttgttaggcactatgctggctgctgaagaacagcagggtataaaatcagacagagccttagcttttagtccactttgcaagcgtcattataaaagtagtcattactagcaccctactcacactaaagcactgcactaccaccggcagatatattctgagttacgtgaaaggaaataaaaatcaggcatctgctctgtctagtggagagtggggctggaagcaagaaaacttcctggatattttctcattttgaactttttaattctagaccacacgttgataaactgtggctcgtagacctaattcagttctttgcctgtttttgcaagtaaagtccagttgtaactcaaccatgctctttcgcttacctattgttgattgctgtttttttgtgctacaaaggcagaactcagtagttgcagcaaaagtttatggcccacaaggacaaaaacatttatcatctagccttttacagataaagtctgctgactcctgctctagagaaaaacctctaccaatgtctaccagagagctggttccctaaacaagacagagacatgttataattgcctccattctttctacaattaactgttctttgctttgctggccgttcggataaaatgtccctacttgttgcatgtgaagaaacttcccataatggcctcataattcccttgctgcgacccataccatctgcaataacctaagagatttcccgtagttatacaaaatggtgactatctcagactttgagcccttatgtttttccatttggtttggtttttattttgagtcccatcctcccctcactcaaaacaaaaaaaaaaaaaatagaggaacaatatttggtcaggaaatcacctcacagtaattcagagaagctgttggggtggtacggtccaatcaggatgctggagctgcctatggttaagaactgacagaagctcccagacgctggtgctattaatacagtgcgaagacgtactcctagccactctaacagcatgcgccaggttataagcagcttacaggtattcacacttgagcagcacatcagacaccagccaataggctttcttgttttacctgggatctgtgcactccagcatgtgcttctgctcccttgcccatgtccacactcttctggccttgtgtgtactgtccatatccccactgtgacatacctccaactttagaaggagatgtcatagaatggaaacaatcctggataaggactgaataaaggcaggtccaagaactactgtggactttaatggcttggtgacttcgaataatttgatttccctgtctaggctttcaagtcatcactatggatttaagagtcatttaacaacagtggttatttttggccctgtaaatcagtaggcacaaggcaagtatttatttttcttccttgcaataattctttaatattgtgttgaccaaatgttaaagaaaagcacacttaataagtaacccaaggccacactgctggtaaccaacagattaatcgcagctacatttgactctaaaacccccactttttttttttttcaatgcatctattcagtttatttgtaacaacttaacctaaagaaacatggccagaactctgagaactgagactgctggaaactccccagatctgcatctgtttgataatattaaatcgatcccactgagatgtttgagaaagtaagcaaactgggctttttaactttgtggtgggtttcagtaagctgggctttgacagttacaaaatagttatggtggttaaaacaacagctaccaaaatacggccaggtacagtggctcatacctgtaatcctagcaccttgggaggccaaggcaggcagatcacctgaggttgggggtttgagaccagcctggccaacatggcaaaaacctgtctctactaaaaatacaaaaaaaaaattagccagacatggtggcatatgcctgtaatcccagcaactcaggaggctgaggcaggagaatcacttgaacccaagaggctgaggttgcagtgagctgagatcatgccactgtactccagcctgggtgacagagtgagactctgtcaaaaacaaacaaacaaacaaacaaaaaaaaaactagctactgaaatacaaagtaatagaaatagtcaaccagcagaagacaggaaagtagcagagttaatagtgcaattaaaaaaaataatacaatgtaagatgatggcaattaagacttgctttatccactactcggaataagtattttcattttccacataaccatagttacataaggacatttgattatgacgatcatgtcattggttgatctgtgtctgatttgctctaatcattagtgctttttatgagctcatattcccagaaatgcttttgtttttgagtttccagacccacaaaactagctcgctcttttcctcagttttgaactttcactgacatgtctttattttgccacttcctcaaaattttagttttgggcaatctaagagagattgcacgggaaaaatattgtagaatagttgtaagaagcactgtttcttgaaagtgatatttttaaatccactgacttgttttcacaagttgactgtcaatgtattgtggaatgcttttcaagctttagtatatatgagattctaattcagcaaatctgggatggaacccaggaatttggatttgtagcaagcatccagatggcagcaggctggccattgtaccacacaggagtaaccatgtaattgattgttgtatcatttatttcccacggtgtgacactgtgctgggtctttagtaagaaatgaatcaataatcaaaggtgttactagaaagggggtaatatgaggtactcattcattcatccagtgattcaatggttcagccgtcagtgagtgcctgtcaagtactggagaatattgcctatactggaaaaagacacattgttatactgcatgcttctgaatagcacggcatctaatgaggggtttttaaaagtgaaaacatcattttgagataatatgtagatgttagtaaagtgataattgataggagttaaagaagtgatgaactcctactgctaaaacatcctcattgtgcaaaactgaaagaaccacccagtttcttttaagtctctgtttcttgattcatacaaaggagatgctagtaagaaaaatacaaaaacaatatcttgtctcaatataattattatatgaaatgagttacgtgaaagtaagttggtaaattgtgaaaggcaacatatatgcaagtaataaaggatttataaatctcttctttatagatttagctatgtctccccagcccaatttggtatggttgattgaatgcctaagctaacattttctattaccacacaaggtagcaaactgtatatctctatctgattgctcattgaaggaggcataggtaacctatctcaatgatgtgaaatctctagaacttgaggctgtatactcatggcattctacctgagattttagaatcttttcccttaaagctgcaatggcaaataactggtagagctgctagatgtaataaagacccctgttgtgagattcctgagcagtgtttatccctttaccaagtatgcaaaatgtatgccattgttgggtgatctttaaaaatgctccttgccttaatatatctatgttattttaacattataaatatattttaccaatactttgagttgactttatgaactttttttcggtgatcccagcaatgatcagaacttacatgatggtgggcttcagtaattctcactgaacttgtactaagcttcatgggaaatgcagcgtatcagaaattcagtgataagttagtatgagattttgtggacaaacattttagtaaatcttttttcttctgagatgcaataacattttatttgtacaatacgtaaatgataaaaataataagaaaaagaaactttcatctcctgtatattaatcaagggcttagctaggctgtactagtggagatatattcagcatgacattttccacataatgtgtctagttctgaaattactacttgattgcgtggtatatgtgtcttcctgtgagaaaataggaaaagcagaaaataaccctatttatcttgacagtcagcaccctgaattttgtgtttaatgagtgttaaacaggtagaatcagagttgaacatagcaggtctaatggtctaatttgaagaacattagtgcctttttattgcctatctgataaacaatcacatcaaattattcttgttccctaatactttctatgtagagtctgtgttttgagaaagttagtaaattgtgaaaggcaacatatatccaaataataatacttgtaaacctcttcttactttgtagagatgaccaggtctcctcgcctccgttcagtatgggtgactggatgcctaagcttatttgccttactttataggcaggggattttagaagccttcaagaggaatatgttgtaaaaataaaacaaacctaaataaagtaaataaggccctgtccagaacaccacaggcagcacactccgtgtttccatcacaccatcactatccacacagagctgccggctgagcatgctgctgcatctaaaaatcaccccagcccaggcgtgctccacttcacactttaactaaatgtattaaagaatagaatgcccctaaaaccagattgcaccttatagtcttctttttcaaagggtttaaaaatgtcttaaggaagggtaatgcctatttgggatttatgattatgactcatgggctttattgttcatcctgctttcacactgagcatccacatcacatccacaggagagcatccaaaggcagcctcatcgcttaaagttgttttggtaataatttattccagagtctgactccattgttctgcatgtattacacagaacttctatggaacatcaaacatatttattgataggagaaaattgtgtctttatgagcgtttctataataaaataggatgagggatgtggaaagtcattggcagtttcagttcaagcagcacccttcaggaagagaaaaatgggaatgtttttatgaacatgaaataaaactctaaaaatagatgagatgttctaatatccactgttagataatatataggcatattgtcctttgtgaatgaagagggcactgcagattctttcttgttgccaagtattcacagttaggagaaatattatgcacatcctccttggtattcttacagcctggtcagtgagtacttccacaggaattaattaagaatactggtttagtgaggggtttatttacctcccactgcagactaacccctgcccagagacaccaacacaaggggaattgggtcttacatcaaacactattggtatgataattctccatctgtggagcactgactggcttgcaataaaggctattacctcgttggccaagtaccatatcatttccttgcctactaatgctttgctcttttttttttttttctcctctctttcaatttgcatttagaagagctagcaacctcacttggcaaagctaactgctgatgtagctgacgataaagttctatgtcatcacttgaatctcaaaaactctaaggaaatgaagagctaacatatattatgttgatttttttttctgaagccagaacctgttttaattgtgtcaaaatagtgaaaaagagttatctcaatgtgggcctaggtcataaccttcaaattgatgttgaaaggtcaaacttgaaaactacaggaggtagaaaggagctaattgaaataaaagaaataatgtaaaaattgatgagaaatacagtgaaacttgaaatactctgttgtaagaaagggcttaatattttatttggtatggtttaatattggaaggaatcagttcagatgatacagctcttacataaagaatgttatggaatacaatcctcccaagataccagctgaggataaatatggttatcagactatcttatttaccggcctagcattgaaaagtaggttaattaatagattaaagaacaatttggcatagttcttaccttcatgggacttacagtctagataaatgtaggtatcggtatccttttatgctctgaaatgtgtgcacttttctttctctgcaatttcaacattagggctgtgctcttctgaatattcatcatcttctgttatgtggaggacctggagaacattaagtaggaaattagaaattccaaaacatgggtttatgaatcccaggcaattggaaaattcatcagaaggacttcaatgccaaggaaaaccatacaaggttaacaatgcccattctacatactgaaaacaaactctctccacctctctctctttctctctttctctctctctttctccatatatatgtggagatatttctatctatatgtagaaatatctatctatattacatatatacttctatactgaaatatctgtatataaaaacatctatattatatatagatgtttctatatagaaataaaaagctaacatatataaagattaaatatatttatataaatgtatttctatatagatagatatttgtatatacttatatagattatatataaatattacatctatagaaaattaaatacacgattatatataaatacatatatttctatatagaaatatttgaatatatattatagaaatattaaaatatttctatacaatataaatattaacatatagattattatatatagatatttgtatattatctctctaacatatatgatatattaatctagacatattagataatatatggaatttctatataaatatagtcatttatatattatatttatataatataatatatatagattatatagaatatgtgaatatatacccacacatagacatgcttatatagatatatattaaattgtttttcataatttaggttggatcagtgtcaaagtttagccaccttctgtgatatttgaagcctcctcttcatactttctcccttcttgagagttttgtcatttatttcctttctcctgtatcttaatcgtctagtctcaaaatgatactgcaacttcatttcaacatctgcaagtctataatcttaaacaaccataaaaccctccttgactatagctgtcacctttcttttcatagtcaagtgtcttgaaagagttgttttctctaagtgcatacctcctcacaactcatgcgtttgccttagtataatatgaaatttgtaccaccagtccactattctagtcaatgatctctacattgctaaagcaaaagcacatatttttttattctttttcttgttttctctgtggcatctcgtttcagaaacattcttcttgctttgcttccaggactctactctcttctgctttttcctatgtcttgggacatttattctcaactaccttcagaggttttttttcctttgtttgcgacttaagtggcagtattttccagggccttccctaacctcctgcctttctttctatacattatccttgggtgatcctatttaaattcaagacttcaagtatcaccttgaatattatgacttccaaatctgtatctcccacttaaaattctttcctgaaattcagaagtatatatttaatacctacttgatatttgtatttgaatatctgatacctatcttacattaaacacatcccaaagataatgtattatcttactactttcactttttttccttctgtttcctctctttaacagtacagtttccaaagattaagatccttctttcttcccaccctttccacatcaagatcagttactcaccttcctaatatcacttccatctgtcctctcctctgcagtgtcactgccatagctcatgttctcaactcttctcatctagggtatttggcaaagccaattgctgatgtagctaaaaataaagcactatattattgttttttttttcttaatccataggtatggaggaaaaaagaggttaaagtgtagtctctaatgacttgagtaatcctctaattttgctaaatctcaacttaaaattgtgataatactactgtcttcccggaagggttagtataatgatgaagagtgagaatacatattaaaatctaaggatggtgtctaacacagattagatatgtgacattagcttttccttttatgtattaaggaataccccacctccaatcttgcctttttccaatctattctccaaccagaagacaaaatctttttttttttttttttttttttttttttttttgagatggagtctcgctctgtcgcccaggctggagtgcagtggcgcgatctgggctcactgcaagctccgcctcccgggttcacgccattctcctgcctcaggctcccgagtagcagggaccgcaggcgcccgccaccatgcccggctaattttttgtatttttagtagagacagggtttcaccatgttagccagaatggtctcgatctcctgacctcgtgatctgcccgcctctgcctcccaaagtgctgggattacagacatgagccaccgcgccgggcccaaaatcatatttcttaaaaaaagtcaagataaaaacatctaaacatccttccaaggcttagaggacaccctcaccatcctaatctcttacactggccctacttcaccccacccttcaaatactatgctctggttttatagaaatccttagtgtattcccaaagagacttcttttttcatgcacatttacctttgcagaagcttctcagtttacctagaactctcttttttcattcaacgaaatacctgctcagccatcaggactcacacacatttgtcaacctttccatacacttccattattcaatctgtgtccaggattatcctacttatttccgtaaaagattgtgcatagttcattcatgacactttatatactttactctaattgtctatattatattatatcctacccagtagtacaatcagctcttctgttggtacattatcttttcataactctacctccaataacatgcttttaattaatgcagaggacctgaattagtttttaattagactggctacgaggagtctaattctcctttccactcagcagtttatccattctggttcctctttctctgtagatatatatttctaagatttcccttctattaataagttggaaaaataaaaatataaaactcccagaataagcattctattctttacaattaagctcagcatcacataacaagaataacaatattaacagtggctcttttcacagggtgaaactccaaattggggttcattctgggaggtcacttgagttcttggctttatacaggaaggaattttaagagttagcccacagagtaaagggaaaacaagtttattttaaaattgaccataattggaagtaaaacactcctcagcaaatgcaaaagaatggaaatcataacaaacagtctctcagaccatagtgcaatcaaattagaactcaggtttattatgaaattttaaaaaaattatagtggctactccataggcagagcagccctgagagctgttggttggctacttttatggttatttcctgatcatatgctaaacaaggggtggataattcgtgagttttctagaaaaggtccagtttctatctgttttcttatgtgatcatgaactttttcatatagccgtgttttagccccaacgagttttggggtctcttaaaactcttagcagccctcacgaataagatcagaagtcatgatataataataaaactaggtctactaggaatttatttcaatcttaaaatttatttcgtgtctatgagaaaacttagaataaaccttatgtatttgaacttgaacaactttatgtatttggaaagtggggtcgtatcctagatgcattgtcttattttgagcttacttttgttgcgataagattcacagaaacttacaggaacagtaacaggcaaaggagaaacttctcttgtaggcttgccagatttagcaaataaaaacacagggcatggagttaaattcgaattttaggtaaacaaaaaataattttggggggtgtcactgtattacttgggatatacttataaaaaagaaaatcatcatttcatttgaaatttaaatgtaacgagacctctgtatgttatcggacaatatactcttctgaagcgtgtctttctttcttatgagcctgtatattaccgtatcaatttggcagaaccaggaaagctcagaaggtaaagaccatgtcctatataagcactacaggctaatgcattctagaaacgttttgatttctatttggataataaacctttaaaaatattacgttcattagtcattatagaaataaaatggagttttcttggacagttaagttttgggatggttacaaaatagagagtagttatacacacagccatcctattgagagaggacttgttttgaagcccaactctatcacttggctctgagtacattttctaagtttaaggcttagttacttcatctgtaaaatgtggattataatactcactttataagattttttgtcaggattaaattagataatgtttgtaaagagcctggcacaaaggtaattcacactaagtagtagcccttatgatagcaaaatgatctccagaacaattttcacttctaattatagaaagccaatctagcagtctggatccaactaggagatagaaaccatacagtaggttaaagagggagtactttaatgaacaaacaaacaaacaaactatggtaaatgtagctataagatagaaggaaattttatatggcaacctaagcagacaacccttgatccaaggaaggacaaatagggaagacttcccttggagaagacatggtttggtaatggagagcagagatgtttactggtttggccgggctggagctgtctggtgctgcttcacaaacacgccaccctttatagtgcagtgccagcaggtgaggagcaacagatcagcgcctggtggccggtgtgaagtgcaaggtagtccaggtgctggtggaggtggaaggttttcagagcctgcacctggcaggaggagcaactacttggtgttgtgagcctctgggacgcaggtggttgagtgcaggccagctaggcagggcttgcccagggagtccaaggtgtctgtggaaatattgccaggtcaaggcaacaaggtcacaaaaggacaagtattgagccagtggctgctgggacattatctattagatattcttacacccacgttgctgacccttctggcctgggctggaaattgcaggaagccccttcctcctgcaatttctccccagtgccttctactgagaaagcttaacatcaccttcactttaaggagaaatgcttaaacaaattctgttgattattatattgaagggtgcattgggagctgaggcaataaattggtaagtgacacagcagatatgcctaacgaatgcagagataatctagaaatcaccccaccacaaaaatgtgttcaaatactgtgttctgctctacagctttttcagttctgtgttttttgatatgaaaaattggcatatataggtataaggttactttagttcataatttaaatatgaatatctatcagcatcatgatagctatgcatatactgcaaaataatttgaagaattacaaaatagcacatcaaagagatgctacggtctattgaatcaaaactccagtttttgaaagctgcctaaacataatttacctttctggtgtcagtttaaaatttgcacaatagaccatgataacttctgaagatctcatgtaaataatgatccatttaatatgttttgcaaagaaatatattttaaacagtcttttacattgcattgatatattgtgagagggcttattttttcctcatttaaaaaaatgtttctcagagaaaataataaaagaaaaattactatgctgatcatgatgccagggaaaaagtaagaatctttgcaaatatgaagttagttgaactgctgagaattgctttattatagcaaagtgacatggtatttgaatgtatcacactggtaatcaggtcagcattgatccacaaagatctaaaattaaccactttgtaatctctggcaatcataaactttccttcctctaatttctttatctataattataaatatatgtatattatatatttatacacacatacgtatatacatgtttttagcaacaattgattatttattatatgccagacactgtactgagtacattgtattttcatcacacttctattatgacaacatgtgaagaaggtattattgatgaggaccgtgaggagactgtaacagagcatcatttcaaaagctgaacagctgggatttgaagagttatctgtctgtctccaaaactcccattgattttaggcatgtttctaaatctaggttaaagtagagatttatattttattattagaagtgttatccagagcactgcttctcaaattttcacgtgcccacaagtcacccgaggatctctataaaatacaggctcctagtagactagggggtgggcctgagattctaacaagctgtcacttggtgcccatgctactagtccatgaaccatacttactgtagaaatgagtaagagaaaaatgtgattggaaaagaccgatatattagtgagatccaaataaacttaagatttcagctgttcaacttaatagaaaaactaaagagatcaatgaaggatatgctttgtaacttcttggctctaaaagaagaagggagaatttgggagatccttctgtaaacatcatgaagaaactcacaacaagggcaagaatgtatcaaaagtagatggcaaaaagaacagaatgcttatctatctatcacacccagggacaatgatcgtgaaggcaattatcattagaactcaagccaatgtctttctcaagatagctgaatgcttaaaacactaatgtgataatttaataactgattgaatgacgttttttagatttatcattaattatgttcattatcaatgtaatcgaaaagttttaatatttaaattgtttatatttgttaaatgatttcacagttttcaaaattattccacatgcttcatatgatgcaatcatatatatatatatatatatatatatatatatatatatgtatgtatgtatactgcagcctagctattatatgtatggtccctgaaccagcagcatcagcatcatgagactttgttcagaaggcgaagcttaggccccagccctaccctaaatctatattttaacaatatcagcagtggcttcatatgtacaataaagtttgagaaccaccggtctacagaagtgtgattttaaaactagaactggccatgtaaataccctagaaaatatctcagtattgtttttcaaaactatatttaaacaaaatatgttcttaaaaatagatgaagttctgaatatgtaatcacacactagcaatatttcccttgacagcaaagtgtttcttatatcaacatgaatcaaaatagtccaagcagaggctgctcttgaagaattatgtatctcctttttttttcttttggctctcaaatttgtttttcttatattccttttttttcaaagattgtagtgaaaaattacaataattactatcttaggataattggctgatgctgaccacaggttatgattccatcagcatctcaatttttgaagtggaaggaaagaaagaaaacaggaacgcagatcatgagagaggaaaaaccacttccttaattttgctgtctacttgccctttgagtttttatatgcacacctgcactctggcctcagcaaaacaacaggtgcaaactgcagatggagcctatcacagttgcagacagacacatctgctgctagttacatgattctgaatttgaaatatgcccagcagcaaccagatttgtgtcgtggggtggcagggcagagggcttctgtgaacagtaagcatactcacaagctgtactattcgcatctgagaactcagtcaagaccacctttctaacttcatttcagaagcttcagtactgttttttttattccccctacagataggtataatgaaacatctttccacaaataaaaaaagaaaaaaggaacttaatgtaaatatgtactcaattttattacacaattttctatattcatttacatatattttcattatatatagataaaatttatcaaaatagcagataaattatgtctctcaaagctgaaaatttaaaatatattgatagtcatgttaaattattttttctaattttacactaaaaaatatctgatatatttaaattcttgtgaaagtatataaagtgtctgtcaagtcttatgtatatgaaattactacaggagattttgttcatgccagttcaaagtgcgtatgagagagagaatgagcatagctttattatttgaaacataattacatttttatgtgtaacataaaccaggaattaatattccatactttaaccatatcaacactaatatttttactgttaaatacttctacatcagtcaataaatatacatgtgtcatcagactatatataaatatatatacatacatatgtcaatgattgtacaatggatacacacgtgggtgtgtgtgtgtgttctgaaactatggatgaccaatataatatgaataacattatttagcatgaaaatatatatgactatgtttatagtcatatacagattagatacatccaaatgttttatacatcagattctatgttaaatttttagaataacagtatttccaattaaagatgatgttattgacatatacaaaaatattcagcactatcagtaattaaataattacgaatcaaaacaattatatactatttatttttcttgcaaaatttgaaaaaaaatttataatggtcagcatcaatgctcttcattcactgctggtggagatatgtgtatggcatatagcaaaaacatattaaatcatttgcgtattttgatctagattttccaattctgttatttatatgtcatcattaaataatcagatgctactggctttatgtgcagagatgttcactgaagcattttgatgacagtgataatttgaagacaacctaaatattcaacagaaggaattatggtacatcatgtagccatattaaaaggtattgtatttgtacattaaatgatagaggacgatgtttacaatatgatgttaaaagagagaattacacacaaaattaagggtacaatagaagactaattttgaaattacatattcaatcaatgtgttgagtgcctaattgcttgtttttgccaatcactgttctaggtgcttggacatactggtcagtgaaatggtagcccctggtcttcatgtgggttgttttagcagaaataaaactggaaacgaaagttcaaaacttttactaataaatattgttgataaaattacagatgatttttgttttcttatttttacctttgtctatcctccaatcacctacaatgagaatgaattacttttatgattaaaaaaaggtaatcagaacaataattatactagttaaaatgctgcttaaccaatactgtcttcataaatctcagataattgtcatctttcatccttctcaagttttcaaacatcccctgtagaccttaaagtttagacaatatttgtaaaataatatttcactttcccccatctattccaaggtagcatactggtctcactaatttgtcctaaaaaaattcaatgaaaatataattaattgcaattaatgtgtaaatatgaatccttgctcctagaattggttaccctagcatgatttagcacatttctaagtgattatcaatccgttgatattattgctttgctagtgcaaatgtagtcttaattctctttataatataactcaatactaatttacctacaactgtgtgatctaattttgttatttaactaaatcttgtttatattttcatacggcatttttttgaaaatatgtttaatggctgcataatgttgtagttgttcaaggactgagtgggtaattatcctcattttcatcgtggctcttattacgttgaaatacgctacattataaaagcctttcgaaagattcctaacgtatttctactggtttatagctgattgtcagagcttggcacatctttatttctatgtcagtagtcccccaagccaaaatgtctacggaatccagactactaacataaatgagaggagaaggctggaaagaagggacccaccaggcatttggtaaatatatgccatgagtagaaggggccgccgatattcatcttcacataattttgccaatcaggagtattagcctaaatgttcttatttttttataaattagttatctactttttaaatgtacattttcacagtgttttttacacgctgaattgacaaaacacaacccaccagcctaacaggatttggttttcccacagggagagttcaagcttatgaaagttcacattgtgccaggtgcggtgtctcacacctgtgatcccagcgctttgggaggacaaggcgggtggatcacttaaggttgggagatccagaccagcctggccaacatggggaaaccccatctctactaaaaatacaaaaattagccaggtgtggtggcgtacatctgtaatcccagctactcgggaggctgaggcacgagaattgcttgaacctgggaggcagaggttgcagtgaaccaagattgcaccactgcactctaccctgggctacagagcgagactctgtcccaaaaacaaacaacgacaacaaaaaacaccttcacattgttacttgatatacatctcttcttcccaaagtttcttttgtctgtgcttctgtttttttgttttgtttttgtttttttaaggtagcatgggaaatgtttaaagaaagattccaaatttctaggtatgtatatagaaacaacctcagactgaattgttgtcgggtttattgatgatcaatcagatgattctattttaggttcatcattttaagtacatgctgagtttttaaatattgggcttttaaaattttcacttaataaatcaatgtagattcataaatgtcagggataatcactacgagaatatagaaaaattaagtatatgtgcacaaattgtaagtccaatttcttcacttcttaagcaatatagactcacagatctatatttcattttttaaagaaaattcaatacataatacattttgaatttgagaaattgggtataatcacaatactctagcagtttgcaagtagacaggaaaaataaagaatcagaacaaagggaagtagtatttttccctccgaataaagaataaacaataaatgaagtgttggagactgcatatgaaaggcaatgagtcaggaaagaaggtaattcttagaagtaatgtacagaataatcgaccaaggaatcaagcaaaccctgctaaatctaactcttaataaagagctggtcaagaaatcatgaagcaagttaagtgcctttagcttgtgtgccacagctgtcacttgaggactgggtagaaattctgagtaggtgcagagacaaaaaacataaattgtaaggattctatgccagaatgaagcagtgtttgatcatctccacaacctcaaggatgacattttgttcttctacatgtctaccttctattcactaaatagttggttagaggtggggccaattagtcttctggaaaatatgcccctggcataaaggaccattggttactttatgcgggagaaaagtatttagagaaataatgttttacctgaggagtcactcagctttttaagaatagaaattttcccttactggacagcctagatttaaaaacttttagtacagtattaaaaggtttaacaaagacgatgtatcaataaggttaaataaccatgcaccagaggctttaaaattgtatatattactttagtacatcaaaaatgatactaatgtaatgcaattataataataacagcaataacagtagtagtaactgactcttgaaagcaccatgtcaggaattatattgtgtacctcatatgaggtgattcacttaattcttatgtcaatcaatgaggtagctactactattacctctatttttcaaatatagaaaacaaagcagctgaactgattttggagccagtgatcttaacctctttgagtttcatgattagatgttttgcctagtaagcagtggagtctgattctaatcagaatttaacccatcgattgctctcccaaatccagactgtttcctcactgccaagctgccctttatccgaatgcaggatctgctgggtgtatttgactgaggacagctcaagtgcgttttctaaattttttttttgtcagtcactacccacctgacagctttttcttggttacccttgaagctcttttggggcaagccttcggaatctatcaggagatacatccctcaaaacgtctgccaatgaatttttttttttttttttactaacagtctattctttgtattataataacatcagcaataacaatagtggtaactgactcttgaaagcacaatgtcaggaatgataagggtttgcaggatgctctgaggttaaaccttctcctctcaggcgtttcaaattcacattgttcctgatatttctggatagactgaggatggataaagaagacatataaactttgcatcttttggtttcttaaagaaagtggttagactcaaataatcaaatcccacctcaccatagctatttggttttcagctagtttccttatttgtagaacacaggtattaataatttctctttcttcagcttgttgtgagaattaatttgttagattcgtggagcatatagtgtccagtgcatagtatgaactaaaacatttaaactgttatgatttttctctaaaaagcgtttattatttggataaaagacccattagtaaaaacagaaatggccagtaatccccatagactccagtgtgattgggttactacttgtgattctttcaacttatgctctaagtcatcaaaattatgttgctactcttctaatcctcaccctcagagggctttgatgtgcataaataaataactcattgcattcagtctgtgtaaacctaaatataaagagtgttacaggccacgtgctttgtgttggggagtttccatttaagggtgaattcctctgaattatgctggtcggtgacatggcagaaacacttttttttttttttttttttttttttttttttttttttttagcagtgctgagtaatcagatactgcaccaaaattagctttccagatagccctgtctgccttaattgttaggcgaacctattctcgaaagtatagcttgcaggctgtgcttggaggatagtcagacacaatctgtgtgtgcttgatgatcatttattgtcttaggtgctaagaaatgtatttgtccacctctatctacccatttagtaagaacttctgttgttttcttgaagttagtcgaccttgtttttagagtattctattaccccctggtggttggtagtataaatacataataaagggtctgtcctttctacaggctaaaattcaggaatattaaggctgcttttccacagaatttatatgattaaagactccttaatttaacatatagagcacagctttctgccaagattgccagatattgtaatataacttcccaaatattgggagatcgccatacaagccatgtgacacaatttaataatggaaagagtatagagatggacggggataaagagagtaaatacctgaaagctaattatagttaacaaaaaaacaccagattttattctaacacacactatgttttaaagaaattgctgttgttttaagaccaagctaattataatgagatagaaccagaaaatgataatatgctttgattttagagtgaaattcaggaaatagctccagggtctgttgttaatgacatctccatcgataaaggatgtaaaattgtctaagtctattaggcatttaatagtaagtttgaccgagtgtaatgacacctacattttcttattaaagtgcttatggttatctacaagcaaatagcaaattggagatttatatgccatttaaattaggttacatctaggaaaattcattctagtcttcaaggccactcttaaaagaaactgtggaacagttttgaagcattttgtgtagtatcaagagatgttaatataataacagattcctttttagcatgagttatttaaatgacagccgaaccattgtagtgcaaaatagtcaagcagcagcttagttttgcactttggcctttacttataacataaaagagcctcattatgacaagttccgttatcgttggaaattcgtgtaatgcaaatcattcttacaactaatccaagaaagtttaattaccagaagcattaatctcaataataataacaagcatttgtaacaactgaaaattttaaaggagtttcaaatctagttgttgcccttgtattattggcctcacttcctaattgttctccctgactccagtctcaacttctagttcatcctctatattgatgacctaaaacacaaattttgttatataatttgcataatgatacatctacagtggctcctcattgcctacaagttaaagtctaaatcattagcaaaccatatagtctagaaaacttttgttgtggggaaccatgttttttataacacatgcaaacatataaagaaaccaaaaatttattaaagatatagtgacaatatacgtagaagcaggtgttccacttctttgcatgacttttccctacttatttcttcatttaaggagttcatagcttccaatgacatagacactataggtcagggactgcacatatctgaggaaattttaaaagtggaccacatatactaaacatgtttcaatcatagcagagtgctttatacatattaggtacactgaatcgttttctaaattttactttatttcactgtgaaaagtattgtattattgaatattgtctaatgcagaattgccatgtagacccagggaataatggtaatgttccagtgtatacgttatgtgaatctactgggtaaatgggaagggaaatgttttgctagatgaaaatagatgctttgtaagttccattcaaatagattaaaaagaaataaaaaggcaacaatctgagtttatgagcatatatttcacagttgagaataagctctggcccattagattttacacaaataatatcagggaccacctcctgttaaaataatattgtaaagtttttaagaaagtggtcataatatacctctcttttttttttgttctttaataatagttttctttttttgatattctaggctatgttcctatggtagtacactgaagaatggcaaaacatgtgatttaaaaacaaaaatgtaaacttttagccatagaaatggatgatgtttgactttgtcaaacaaatacccttttaaatttgccacccatacatatagatatggtttaaaaatgtaatcataacgagctatgtaaaactcaatatttttgacaaaataaaatgtagtagtaatggtagttttggactggaccacagcaaaatttcaagttcaaagaacactttgtagaacaaaatgaatatttaaagttttccaaaaagagtttatatgatttcttacactaaaagttagaacacctttatttaacagaaagcatacattctaaaacatacaaataatttgttataatcagaactaaaattccactgatctctcttattttatgtataaattatttagattacaaaggccaaatatttccctcacaaaatatgcttatacccttgcttaagttgaatattaattgactttgataaataaaattttattttcaaggttgtgcctgtcatattttaatgaattaaaagaaatacatttaaatgtgtgaacagattaattctgcatttctacaggatgtgttttcaatgaaatagtattgaattgcccagatgcatttagacagtttaatcagtggcttatgttctaatatctgaaaaactagggatcaactctccaaaacttagctgttatttttcccagaaaaaaaagaaattttagtaataaaagcaaaattatattaatcaaactaatgccacaaaatttttagttaaaagtagtatatttcacagcaaaaataaaatttaaaaaaaattttaatgagttgtatttcttgctttgtgtcagttgaaatttatgttaaagaaattatctgtacaccaaaagtgacacacagttgacctctgtaaaaaacctgcacctgtacccctgaaactaaaataaaagttaaaaaaaaaaatgtatttcacagatttttactcttactaaaagttctaggatttctatatactttatagcagtgatccccaaacttttggccaccagggacttgattcatggaaggcaacttttccacacatggtggggatagtttctggatgaaactattccacctcaaatcatcaggcattagattctcataaggagctccaaactcagatccctcacacatgcactgttcacaatagggtttgagctcctatacagactttaatgtcactgctgatggcacaggaggtggagctcaggtggtaatgcttgcttgcctgctgctcacttccgggtatgccgcctggttcctgacaggccaaggactggttcaagtctgtgtccttagggttggggacctctggtttatagcctaatatggcttatataacctttatttgctatttctaattacattgaaattagggtaccatagctgattctcaaagctggtacttaaacatctcacagctattgaatttgtttagtctgttatactttttttgaccatgtgtctgactcatgcctatgcaaggggtgtaggagctcatactattgccccattcctgtctagtatggacaacataaagctattccgacagcaactgaccacatatgttcagtcttaatgtttaccctttcagaagaaccctatctatgcaatttatctcacttatgcattgcccattcttatttccttctagccatatattagcagcattttatcctaatcattacgttcacagattaatttcaatcaagaattctttttaagggaactagtctttttttttcttactcttttactagtgtattttgtaacacaacctaatctttcaaaatatagcagccaatttgcttatcttaaaaaaataattttatccaggatcataagttgtttcttattcaaattatttagaattttataatatgtggttgctgaatcattcacatagacatagcttgagggaatagataataaaccagttatgactggcatcgtaggcctcattataaagaagaagaccaggaggaaagcagtttcatctccatgaaagaacatttcaagatcttttatccagacgggaataagatagagtaacactagagaaacaacatgtgaaatatgactccatcacaacaaaagaatgcttgtatatctattttttgtaataatgaaaaaaagataggtacgtattatttaaaaataaaaaggaatataatgagcgatgagggtactcaggtactacctcatttaactcctgtaacaatcttttgagacaggaattactcttattcttttagatataaataactgaagttatataatcttatatggaataaaattacaaatgtttagaaggaattgatggttattgtttcaccacgtacttaacacattgtagaaaatgttgttttaaatgaccattgctttaaaaatataaattaaatatattagagggatctgtagttgttattatattaaatatttccaagttcattttcatttcaaattgaaaaggcctaaaatgcctaaatcatttgtataatgcattttatcatgtatattttttcagactgaaagtaaatattaacatgtttaatgataacatagttttcttcaaaaagtctggttttcacaattattgaaaagcaaaggtaataggaatgaagtgaacaatgttgtctgcttttatgaaaaaatattggaattttcaatcattttaattttagaacatgattccatcaagagtctgatgaaaccagtagatcatctgcctacaaaaatattcacatatgcatacacacaaatctgccaatcttcaattaaaactacttttatgtatgtagtggtagaaaatatagaattcacagatatatggtgacccaagagtctataatgatttattctctacatgctcaccccaaagactttaaatcctctttagccctatttgtttttcatagacttctcaccatctagtgtactacataatttacttttgtattatatttagtgtttatggtctgctccacctgctgtaatgtagtttccaccagaacaatgatcttaaccttttctattcaaaagcacatctagaacagttcttatacacagtagtcccttattatttactgaatcaaggatcatatttatgatgactgcatatatcttgtattaagaataagagtgttaattttgagcaaaaaactgagaatgtaaatttgagcattgaattgctgatctaaatatctctaactccattcttccaaaaataatagattgttcatggttttatcattttaggatgcagcagtgactctatctatgatctggctctaatcatgtattgtttatatgtttatatatggtgaaacaataaccatcaattccttctaaacatttgtaattttccctgtaacagttccctgatttagctacagagtacagatgtgaaggtcactgttcctggaaaattagcaactatcagtgtcaattttcagcttgaactgcaagtttaaaatctcacaaagcttcatctttgaccatgcaaaaagaaaatttttatcaaaagtaattataactcaaatattatagcaagttaattactgaattccaaatctctttctttctctctctctccccactctcccccccccatacacacacacacacacacacacacacacacacacacacatatattaatctcttttcccagtgtatttatcctgtgtgataccaatgagttttctttgtttcgtcaattagtttgtcagcattgtgttcttcctgtcatatttttgagccatttctcaaataaaatatccaggtctcattaccaatggccaggtggttttagatacatcacaaaccaaaaacaagaaagccaccttaaaaaccaaacatatcatgaaatatacaagtagaaaaaatatagtttgtgttattagttgacacatccttatcacagcaactatttagaagccagaccagtaacattttagtacaaaaggattttaaatatatgtgtaaagttagcatccagtgaataaaatcggaaggatggacggttctgttataattgttattcaatactacccatagcttgtgagattcatagaataatcagagaagaaagaacagttaaagggaactcacaaaacagttgatgccagctccatgtaggggagggcctcttggttgtcagatagggctgacagacagatacccaaactatgtttatgcctccttcctcttgaacaccacacacctcgtaagacactttttaaaccaaaataaatggctgtcttcacatgccagtgtgccagactagaatgttgattctcgatgatgtacctaaaccttaaaacgggggctaatacaatgaatgaatgaagaaatgaatgaatgcataatgatccatgagtagtatcctcagaggaaaataatttattacagttgtatcttttcattgtgagcttgtgcaaaaaagaaacatactggtgtgtacattttttacttaaacctgttaattgtacttcctctcctgccattattaagttccaactgcaaagttcactattatcctggcaaataatttgtgtcacaaagaccttgctagaaagtctttcttgtttctatgctttcttgtacctctatcgtgtcattttcccccaaattattagtcggtgtataccgcacacataaacaacataagatcagtcctcagataacaactgcaatgtttcaaaaatttattgtaactcatctgcttggatttagaatgcattttacctattatagaaacaagcccatagagcaaggggaatactctggggacaattgagatggtaacaatattaaataattctgtcagttgacatatttcttcacctattgatctttaatatccttaaattgagttttacaatttgcttcataaagtctttaaatattctttatttgactaataactagatatttaatagcatttgtttatattgttaatggcagcctatgttctattttatttttaagcttgtgtttgctaatagagatgtgccagtgtttttaaattacaggaattctagaaatactgattatagcaattagaattttagaaatatgaattaagacatggataaaaccaaagagaaaaaatggtatagtagaagataaatttgtggaaattactcagaatgaaacacataaagataaagataaatatatgaaaacaaagaaattaagatacctgaagaatagaatgagtaacaccagccaaggtaaaaagttccagaagctgagactgtagatattggaggaagggctgtatccacacccagcccaggaagcccaacactgttatggtgaacatcgggtaagggcttgagtgcttgaggcttcctggttaagggcatggatttagtggttgccttggtatcagataaaatcccaactcagacatttactaaaagagccagtgggcatctgtaaattgtgtgtcctttctaaggctgagtctccctatattcctaacgagcatcggaagagttactaatttatgacattatcatgggactcagataatagaagggtattactttagcattgtgcctagcatgtaaagcactcatataatgtcaccttttattggattctagaaatgtagtaataattatattcatttactgtatagagtcatgggtactaaataatattctaagatcttattatgatgtggttagataatctctgggcaaaaacatttatcatccattgtatcatccatttttctagcagtgtaaaaatattattctcatgtattagttcgaaagagtacaatatgaggggcttaggaaccaagaactgtgatgatgagctaaaatgtcagacagggggcactctggatcataaaattctgaagcttcagaaggaaatctttggccaaaatggcacagctgagaattagtaaagccagaattcaaactcaagtccacctcttacaaatcactttcttataagccactgtgatagagattgattaattaaatatgggacaagtgagggaaaggcattaaaagttatgcttaccaataatgggacagaaataaacatttaatactgtgaaaaaataggatataaattttgtaaataacttataacaaaaaaattgtaagacttctttaaatagaagttttaaaaggtctataaaatagttaatcaaaaggtctatagtaggtctatagtagttgcttcttcaaaaactgtattctgtataacttcataattttctaccatgaacattttttattatttttaaattattttattaaaagtaactgtttttttaacaaagtggagttgggattctgaagtagggcaatggtttccaagaataatgagctcaggatagagagaatagtaaaggcaggatttcctctcctttttcttctctctgccctctcctactcgacatccccattttctattttgtttcttctaccatatacagtagttaaggcatcttgtccaagggggtgaagaaaggcataactcagccctgatgtgggactgtgtccaccttgaggaaggagggctattttctcattggcaacccctttactcttattcttgtacctctgtgccatggtggaattgaggcctctagtcgtgagtctcttggttttgaaggagtgttggggatagtagtagtacaaatgtactaactgtgtgcagtttgcccaagccagacagcaacttaagtcctgtacaagtggcaggacagtttgcaggaaaaaggtctttaatcaggatacatggtttttgcatttaatcttaatgtagtgatgatgaaaaaatataataaacaaaaacattagtttggatatcacagaaaattagggaaagattttattcttttatcaacactgcttatttaggatttcgcatactccattttatttaacatcttattatttttctactttgctgccaaatttctcaaatgaatatgtatattccaatatatacatgtatctgttacctttatttcttgttcacctgtctcttcgcactactgagctgaaactattttctccactttttctccatcaattacatatcttttttccacaaatcagtgacctttttaatgtcccatttcttgacttctttctctactatatgtgatactgttgacttcccccagctttgtaaaattctctcctgctttcgtttttgcagttctacggtacttttcctcttgaatattcctataacagacattctttataataatcatgttgaacaatcagttttcaagggatattttctaaaagtaacttcattatgtttttatttttcctttagcttaatgacttatctgtggaaccggtcctttattcctcgatggaatttaagccagttcccatgacttgctagtcatttaaaagtataagttgtcttccattcagtgtaattttgtgccaacatcaatatagctatgaacattgttaactttgtttaaatgtatgtctttttccctttcccactttgatgggatgatatcctgcggtgggggaggttatatctgttggccttttctctttatccactttctgttttaaggatgatttttattccccccaccctcagcctgcttccacagtgttggagagcaggaagatgtttaaggcctattctgtctcactgattactttcattcgtttttcaatgactactgggaacttcttacctgcagcttttttggcataagtctattcatctccactcatgccaattacttacttgtcagtctggaggcattctctttctctgatcccttcagtttctttggggcagaataatcctttctaaacaatagatttcagtttcaccaacaataaattttgtatactgatttgtgtgatctgtgaatgatatcatatattttaatttgtaattctaaaagttattttaagttgagggcagattgtgttttatatttctatatttgcaaatgtttagaattaacttaagctaacattatttcaattcattgcctccttcatatacacaagcctattaggtactttagataccaaccagaaggatatggactgatttacacaatcaagtctttaatactgaaccataccctagactatatgaattcagctttttatttgtcactgtatcatttgaaaggagactagcaataaatcatttcttgtagattttgctagtcttagaaaaacattgctaaaatcacaaatgatatatcagatgatagtgatggattaaaaatatttctgtgtattagcaataacaacctttgtaaataaaaaggcaagattttctacaaagtgaacagtagaaaataattcagtataatatcgtccctataagactcttaaggaaatgtaaagggtacctctggatattttaccgaatatgtaaaggtatttctatataatatatgtgtaacatgtttaatacacataaagaattactattcttcaggaatattctattgatatgctattttatctgatatatatcacaaaatattcattaaagatgtctttaatataacctatttaagtttggcattttgacacatgggactaaatacaatgtataaattatttgtttaacttaagcataatgataaatagtgtatccatgggtattcctttgcacacatatgggtactatggttatatctaagtgaatatattttgattaaacacaaactcttgcataaggacatatgtaaccatgagatcacacaaacttcaaagagcaaaatcccttgtgatggatactaataggaatatttaatttattttttattttttttttatttccataggttattcgggaagaagtggtgtttgattacatgagcaagttctttagcagttgatttgtgaaattttggtgtacctatcattgagcagtatacactacacccagcttgtagtcttttatccttctcccccttcccaccctttccccctgagtcctcaaagtccattgtatcattcttatgtctttgcatcatcatagcttagcttccacttatgagtgagaacatgcgatgtttggttttccattcctgtgttacttcacttagaatagtagcctgcaatctcattgaggttgcggcaaaggccattaattcattccttttaatggctgaattgtattccatcatatatatatgtatatacacacacacacacacacacacacacaaacacacatacatatgcatacgtgtgtatatatgtatgcatatgtgtacatgtgtacatatgcatacatgtgtatgcatgtgtacatatgcgtacatgtgtatgcatgtgtacacgtgtgtatatgtgtacatttgtatatatatgtatatatgtatatggtggaatatatatatcacagtttatccatcatatatatgatgaatatacaatatatattatatatataaaatatatataatatatatatatatatatatataatatatatataatccttttcatataaagacttatttccctctgggtagataccccagtagtgggattgctggatcaaatggtagttctacttttagttatttaaggaatctccacactgttttccatagcggttgcactggtttacattcccatcagcagcgtagaagcgttccctgttcaccgcatctacgccaacatctattattttttgaattgttaatgatgaccattcttgctggagtaaggtagtattgcattgtggttttgatttgcattcccctaatcattagtgatgttgagcatttttccatatgtttgttgaccatttgtagatcttcttttgagaattgtctattcatgtccttagcccactttttgaagggattgtttgtttgttttttcttgctgatttgtttgagttctttgtagattctgtattttagtcctttgtcagatgtacagattgtgaagattttctcccactctgtgggttgtctgtttactctgctgactattccttttgctgtgcaaaaagccgacatagccaaagctagactaagcaaaaagaataaatctagaggcatcacattacctgatttcaaactatactataaggccatagtcaccaaaacagcatggtactgttaaaataggcacacagaccaatgggacagaatacagaacccagaaataaacccaaatacttacagccaactgatctttgacaaagcaaacaaaaacataaattgggaaaggacaccctattcaacaaatggtgctgggataattggcaagccacatgtaggagaatgaaactggatcctcatctctcaccttatgcaaaaatcaactcaagattcatcaaggacttaaatctaagacctaaaactataaaaattctacaagctaacattggaaaaacccttctaagcgttggcttaggcaaggatttcatgaccaagaacccaaaagcaaatgccataagaacaaagataaatagtaataggaatattttaaattaactccattatatagcccatctatagaattggcatgtgtatcttaggaaagatatactctctcacatgtgtgtcctgggaaatgtgtagctcagttatcttataatgcttattttttaaataacttctagattagtaagtgatcttctttcatattctaaaatgattcatactgaactgatattttcaatgcaacaggaatactatagaattttaatcactgcctcattaactatcgtccattgtccacatacaagtaccactgtactatcctatattgtcataccaatagatagccagggctccaatccccttttctcaggttacagatatctgagatcttctgaaattagagtatcttctttggctaacaaaagttactgaagtaagtcatgaggggtgtcactccttctgcacaattagttggtggggtgctgtgttgaagaagggatgatttcttcagattacaagtgaatggaaattcttactccaattgtggctaataatcaggtgaaaaatgactgcatttcctcagtgaccttcattgtgttcctcagtgacctttactttggttctcccctagttctaacttttaggacagagggttctcttttttcttgggcaaattcactaagctctcatggtgctctgtggggctgcctccacattccttcacttgacatttgttctccaactttttagtaatctggggtgactccctccatattaacattttttatcaggagttttctcatgcctcaaaatccatattctctcaaatatgtcttctataggctataaaatccgagcaacaacaacaaaaccatgtttacttttctttaaaacatttaaattgctcaatactcaagccttggagatataaatatagcatatacatacacatgtacatacaaatatttgtatttcttactccttctgcaataaagaaaagcaagcaaaaaaaaaaaaagttaagtttccataaaaaatagtgtggacaatcctacctatccacagtacaagaaatcccccttttctttgaggggggggaaaaacaaaaacaaaaaaaaaacaaaactggtaaaaactcaataaattcatttttcttttttcttttcttttctttccctttcctttcctttcctttccttccttcctttctctctctctgtctttcttcctctctctctttctttttttctttctctctttctctttctctttttgacagagtcttgctctctcacccaggctggaatgcagtggcacaatcttggctcactgcagcctccacctcccaggttcaagtgattctcatgtctcagcctcccaggtagctgggactacaggtgtgtaccaccacatctggctaatttttgtatttttagtagagacaaggtttcaccatgtcggccagactgatctcgaactcctgacctcaggttatccacccacctcaacctcccaaagtgctgggattacaggtgtgagccaccatgccctacagccatataatcctgttgctattgatattacattggttttagcaatcttcacctacatgaattgttcatctgtttgcttgtaggctatggggaaaaaatccactgtagataccaggaaattggcacttccttgtaggagtagggaatgacgaaaggagtatcaacttaacagagttggctagaggagaaatttcagattgatttgctcgatgctcaaatcctctcccaaattaaataatttcctgtttttattaccttctcctactgttaaataatgttttcctcaatgtcaacctccacccacactggacagactgggagtttgctcttcaattatttttcatattgtatatgaacatataagcatacatggaggaagaaacacaacgacagtgtgttctatattttgttttgtttgattttgttttgcattatttttgttttgtttgaatttgtttcgcaatagattttatctaggcctcattcacacaaactcatctacagcatggaaatggaacaagatataatttaggcaaaaggccataaatttacctaagattttatatgctttattggtgtattttaaattagtgaagaaaatgattctccagttatttcatagcaagtgttatgacaatggctaaataattttgagaacaaatatttttaagtccatattgaaaaaagccttaagaaaaaaactaaacttcaaatatttaaagttatcagacataaaaaatcaaaacaagttgatctcctagaagtagagagtagaatggaggttgccagaggctgtgtggggagaatggagagagaccggtgattgggtacaaaattacaattagatagcaggaataagttctggtgttccactacacagtagagtgcctatagttgacaatgtattgtatatttcaaaatggctataaaataaaatttggaatgccctcaccacaaagaaatgataagtatttgaggtgatgaatatgctaatgaccctgatttgatcattacataatgtaactcatatggaaacatcccactgtaccacacaaatatacacacttatgtgtcaattaaaactgaaagaacacatattaagaagtgccagaaaaatacatagctaaatatgtattcactgaatttattgaaggcttatttgtgttttcttaagttgccgccattatactttgtgacagacctagtgctttgaaacaacactcgtttactatgtcatagttctgtaggttaggattccagatgcagtgcagctcaactgggtcctctgcttaaattctcacaaggccaacatcaagatgttggcagtgttgtgttcctccctggaggctgtaagaatgaatccgcttctaagctcacacagtttgctggccttaatcacttccttttggaggtaggacacagatccattttcttcatttccttgctggctgtcatctggtatggtctttggtccccgaggctgcctgcattccctttcatgccttccatatgtcctcccaccgcaggaatggcaggttcctccctctcacgctttcaatctctctgacttccgccacatccatctaaccacagccagagaattctcttcgttttaaggattcgtgtgattagaatgggcctacccagacaatcctcctattttaaggtccatagtcttcattgcttctgcaaagtcccttttgcaatggaaggtaacacaggttccagggattaaggcacggacacctttagggggtcgtgctgcttaccacagaaggcattctaattaagataccaaaatggagcccattttgtgtttcattacataaagctttgcatcttctgttcctccaaaacacgataatacccaaagcaaatgactttctgtgaaaatccatgtgccacatacgtgagaaagagttaatatcattaacctctaagggactttcattaagcaaacaaagataaacagtatttcaaatggaggcaagggagaaacttttcatttctagatttatttgagaatgtaatatgcctaagattcagattttgggtaagaatggttcaagctcatgctctttttatgtaaatgattatcattttattatgaaaaagacaagtgttatcttgaatgtcttataaaataaaaaataaatatatgaagccatttctattttaaaaattacatgtttaatatttctgaattgttaaggaattgatgttcattatagaaaataagacataaaatacattagaaataagaatacagataataagaagaagtagtctttttataatgttcatacaaaaacacttaaaattggggatcatagtgtaagcagtgtttctaaccttcattttcaaggttgaacactgtcataggtacagagttttataaacatttattaagtacccactatgtgttaagctctcttttaagcactttggatatattagtaaagggagcaaagattgctgcctgtgaggagctcacattctgtcataatacagaaaaaaattcttgtgatatattgccctgtggaaaaaaaaatagatcatagaacagtatttgctgtatgatcctaatatgtaaatgtgtttaaaaaatagaaacagtcaccatacagtaagtgatgggcataatgtgtttagccaactggcttgtatttttattgacattatatgttttattataaatgtttgtactctttcttttaagtaaaagaagttacattcttatacaaaagagtaagagttgcttactcttttgaataagaggaatcataatgagaatcacaatgtatgaatagtttgagcgctttggatagatattgccgagatgacctgtagaaataatgacccagcatcttctcccacaagccccgtgtacgtgtgcttatttcccttgctcataaacactactccaaacatctactaatgacaacaatcactactatgtgtgtttaccacatgttgttgttcaaatttcaacatctctgaaattaggatgcatacccaatggaataatttaacttttttttcttttgtaaagctctatgaaataatgggttgtcttataatccatggcattttagatttttaaaaatccagtaacacataaatcctattgctatatttgtgaatattaattgtaattactgcaaaagttatctaatgctgttaaacattttgaaatatcactggaacacagtgtactgattgttgccatagattgctgattaacttcctaagaaaaatcctattttccatggtcttactgaggaatcagaaacaccagcaacctgtcttaattgctacaaatcagtattacttgttctatattttaaagaaatatgtaagagaaagagagaacatgccacaagagttaacaagaaccttttaaaagggaaagacattttattaaataaatgaaaaaaaaaatagctgcaaccaagaacatctaaattttctatgtaggaaatgtataaaatccttaagaggattttactgattttgtctgctgtatgctactatgtgctatgttttactatcaaatatttaaaaatacacaccaaataaactactgttgtattggttttcactaatacacagttttcacaatttcatacatttagaaacaaatatttctccagttagttgcctagaactaagaaagttgaaatggcatgaattgcttcaaattattaataagcatacggaagtggtcaacttgcttgtaaataaatacataaaaattaaaattgaacaaaaattttgccacaaaactaaaaatgctgtatttgaatataatattacaagttctaatattaaaatgttctaagtcacagtttctccaaatggagatacaaagagtttgaacccaactataagaataactcataaaatgctttcaaaatgcatagaaaagctctggctcttaataattcctcattatactcagctaaaatgatgacattgatgagtaaaatatttagaaaacatattgatgcagttcccgtaacatttcatttgtcttttcacttttttctctaattaacaattcaaggactggtagtggaagtaatataattgccaaccttcataaacatggatattaaaaaatattagtttcagagttattcctaattatttctgtgcaactttaagaaatatattcctgggttttctatctttcactaataagataaacttgatcatcaaagtctgagtaatcaaaaactaccatattatagaaaatcccctcccaaagtataaaatttggattggcacatgaagtggctatgactttcattacccccttgcctaagttgattggctgttctcccagagacatgtcttcaatttttcctctgagcagtttgaatgaccaatctaaatgtgcatactgtcaaaatagaaaatgtaactcagtagaagcaaacattgccatgaataaaggaactgaatgaactgaaatcagcaggtcatttatgaagacgctttattttttctcccttctgtcttccaattctgctgagcgataaggactaaggttagtccttatcgctgcctatggttaaaatccttgcaggtcccatagcttcactgggtctatttttttctgttattaatacatgatagtttatatatttaggggtacagatgaatgtttgttacatgtttggaatgtgttatgatcaagtcaggatatttgagatatccatgatcttgtgtattatttctatgtgttggtataatttcaagtcctcttttctattactttgaagtatacaaaatactgttgctagatatagtcactttagtcggctaaccaacattaaaacttatttcttctaactatgtgtttatacctattaatcaacctctctttatcctccaattccaaccaccaacccatcccagtccctactatttaccattctattctctatgagatcaatttgtttagctcccacatatgagtaagaacatgcagtatttgtctttctgtgactagattatttcaacttaatgacctccagctccatccagatccccagaacagcagcatcaacatcacctgggaacttggtttagaaatgctaattttggatcccattccccagtgagggaattagtgagacccccagcctttatgatgtactctgaagtttgagaagcactgtagtatctcatacttagaaggaagcaaactggtcttttttgggctgccattgggaatcagttaccatagtgggcacttcaattaaattacctattaatagttctaacagcatataaatctgtgtcattagcaagcccctctcctatctagatctatgcccatgggcaagtagtttcattgttctgtgcctaagttaatttgtctataaaataaatataatagaagcgcctaccacttagagttgttaggaggatttcatagattagtgtattaaaaaccctaaaacacatgtaatgtgcacatgtgtttgcttatatcattactattatctcttatatattagtattaacaattataattattatttaggcctccttaagttaagtaacttgctggatgtaatacaactaaaatagtagaagcctgaagttgattccagctttattttcctctaaaataatttttttgtctcccctctttacaacaattatattcacataacacattttgttacctatatacacatacatttcctcctctcatatttttcaacattgctatgatagactggcttccttaattcaacatcacaggagagagtgatgacttatgctctccagtatctgaaatgacacttaggaacatagatgttcaataaatgcttgctaattgatgaagaagaataagatcattaccaattacttcttcaaacactgataaaatggaataaatgtgatatactaataaaatcagagattgtagaaatcatgtcaaagtgatatatctcttttttcccctctgtttttaacagtcatacctcagagtggcctaggtctgtacacaggactaaaaatttagatgttctctgactatatctctttccatttatcaatgtccaacctatttagcataaatggtagcgaaaagtgagtatttatgggtttttctattttaaaaatggtatttaatttattcaactaaagatgtttcacctcatagaattgtaggaaataatgttgtgccttgagattaactaaattaacctgaatatagtttgtataggtttcatattgaacaactgacagaagaagcaataatgttcaatgagaatatttttattactaaaaaatgcctggtacataaaactcaactcaagaattataatcttactgcgtacttatgactacataatcatttccattatgccaattatactagatttgtttgtattagtaagtattcattaaaccaatatactgtcaaacattatactcttctttggttgtagaaggatgagacaatctgatctcaagaaccaaataatgaggtctacagcaaaactactggctgtgttgagggatggccctgtaattggaaggggaaaaagaaatatgagagatgagagactgaatatacaaatggttaacagccagaacatatgtgacaaaactctgacctaccacctccaccgcaactagcccaggaaaccaaaccacaacctctgcaattggttcagaatggccaggatgttggggacattttcaggtcactgactaccaacttccttaatttttatccactgcttccaactcggaactaaccagaggaagccaaatatatctcccaaagcaaacacataggttgctctacttctggttagcctgcttccagtttctccatgttaatttatctccaatcagaacacacctcaagccttccctttttattcattgttagattttcctgctcccctacctacctttgagtctctggcaaatgcaaatgatgcatggctgaatcccttgctatagccaactgcaaataaatagtacctacgtattcacatctggatggtctttcttcattttcatgaagacaacagaggtagaattgttgggcttgaaaaatgattggatgaagggctgaaaagaaagggaagaatcagtaatgactagccttttaggtttgtgtgaatgacaagttagaagtgtcactaatagaaagaaaaatccaaggagcaaagtgggttttagcaggaagaggataaattttgtttggacattttcaattcaaagtaattgtgcaatatatagttagaaatatctaccaagaagtttggaaagtagcacctaggccagaaatacattcaggtctagaaatactaatttggaaagttaagatgtgaattgaagatgaaacttgtaaagatgaagatttcaaccaagtgtctaagtacaagttcacataggaataagtagaaaaaggacaggatccgaaaatatattcataccttgattgttgcattcactcaaacatccctgagcacagctttgcccctaggcattatgtctgctactgagataaacatgctgtaaaactgggaagttttacattcaaagtactgggaagaagagaaaataaaggcaaaaacaataagatgtaatcatgagaacataaaaacataatgaaacaaaaatgataataatccaaaactagaaggcagcttgtaattcctggaaaaagagaattttatgaaagaagaagtggttaacttctgtgtgctgtaaattttccagggtgatgatgactttaaaaggaacatggtatttgatgtcttggcatccttgtggttgtgcaataaagggcatcattagaattttttgggtgaaaaaaaatgttgcaaatcataagacgtgtaaagcatccacacaagaagaaaataaagcttgaagactcaggatggtcaagggcaaagttctccagagagataagccttgacattacaggttgaaaataaagataaaggggagaatgagaaatttgttgtcattagaaaaagcataaagggtgcatggtaattcaggactgaaaaggggggatgaaagcaaaactgcgaggaggagagagatcctttcttggaaataaagtaatagaagaggaatggatgaagatgcacatggatttttaaagtgtagaataacgaagttgaagttgttctcatggataacgttcatacacttaatatgtgaacaagtcatgtcatagcaggagagagaagcaggtacaaaatgggagggagttggagatattttactttagtggctacagcattaggaatataatggttaggtaactgtagagaaagaatagtgatggtgaaacatgagcaacatagaggtcttttgtggtagcatagcaaataataataataataataatggtgatgaaataaaatgttttaatgtagtagctttcttttccaaaaattaaaaggttggtagggtttatgaagcatcatctaaatgagattgggtagatttgagtgaggggagattaaggggagacagaggttgcagggcacttcatatatataaactatttctgagataaacaaaccgtggcttaggaagctttacatagcttgctagtattactaaaatgaagcttctgatgcatgtttttgggatggggtctgagattctgtatttctaacaaggcagaactatcagaatctgtatttcaacaaaaatccaggtgatttttatgtgcatttgagtttgagagttaccactgtatacttagcttctgcctctgaattgccaattggcaaaaaagtatggtaaggatgaaggaagaagagaatacaggatagtttcacggcttgattaaagtagccaaccatggcgagtaagatagaaagggacaagtggcacccaaatgctgctgtatattttcagaatagggagtgataaggacccgctagtcataatggcaactataagactgagtctccaagcttatctgagctttagtgcagcagctgaagtaaaatgaaaatgaatgttgccatagttaccatgaatttacataaaggctataccaatcttgtgaactttcacatggacttacagatttttcaatattactatctccagaaatgaaaggatcagtatattatgctgggagttacaatttataattttaatttcttcttaaatgcgtagttatctataacaaggcaactttatgatgagcattattatttctttaggttttaccaattagtttggctcattgtcaactaaggaaaattatgacaatgtcattcatgaaaaagggttcagaggacgtttttggaatgcacccatttatagattgaggttattgttgtcaatcttttcaatacagcatcaaacattttaataagattttagtgttttgaataatttagagcggcatttttctgagtagtaatgcctaagagtcaaaatattaaacataaggatgtataaattttcagttaagagacataaattcccacttgctaaatgagttgtttgatgttattttatatatcattgatacccaaaatatttgtaatcactttcattgtatactttttgaaggagtatgaaagtttatttagagattttgacattttggattttgtgagaataatttaggaacagatattcattcagtgaggaagatatcaaaggcactacaaccaacaggctaaaatacaaattccagcctatactatttattggcaacattttctgtagatatttttaatcacatattttgttatgtggtaacaagtaaactttcaaatgactttcaattgtataatgaaattccaacaaatgctctgggaggttaatggtttttcttggtgttaattcatgaatagactttatcttctttccagtaggttttagacaatggaagacaaagattatagttttttcttattttattcatcctaatatatactaacacgttaatacattatagcaggttcagaaattcagacaaatttgagcctccagaagaatataccacacaaatatctttgtaaaatataaaatgcatttaaattatttaagagataaactaatagagtaatgtaaggaacttttaaaaataacagctttattgagatataatttcatcatcgcaaaagtaattctttacccattagcagttattccccattcctcccacgttttattctctgataaactttaatctgctttctttttccatataatttatttatctctcagattcaagaaataattcatccaagtctgagataacatgccacactgtcatttgatctggattcctcctattttaattgctctacttgggagtctgataaacaaagaggttggggtggcctcttatgatatatgactgctggagctccaggcattaattctgcattctaaccagaaattttacttagggacggagggacaaagaggaacatgcctcttaacattcactgacactgtttagactttgcttacccaacgtctacatgtgtccttttgccagaacttaatcttatggcattgagactaaggatggttgtcttattccaagtggtcatgaacctagcaaaaaataagtaaagtaagatggatgttgagggataactagaagtttctgccatagtgttaaacccactcaaacttatataaaacttctcaagctagattttggaataccaaaagaaaaatcccggaagagattatagaatgcaattgtacaatgtctagtagcttttgaagtggcaataaaatatacagttattaaacattagtaaccagaatatcaaatctattatggtttttgtcttatttgtgactttaacctcacattatagtatagtagtggctggtaaataattgtttagtaaatatttgtggaataaatgtataaattacttaacaagcattatataccattgtattcaatagatttacatacattattcataggatagtttgctagtctcaccacttgccagtcattccaactttcccaagatttaagatcttttttgtaagaaataagttaggcattgattaagacgttgagaagattttgataaggtaaactctaacacctaaacacggggtattttttttcccaagggtctatccagttattatttctttattgcatcacttagatggtcattgattatttatcgagagtttataatgtgcaaggttttactgaaacagtctacattttttcccaaatatgttgcctacaattataataggaattgtgtttctgagatgataagcttcacagtcttgaaagataagagttcaaagttgttattttttaaagcatttatttgcatttttctaaatggatagaaggttatctggttttgcaagaaagtgtttctgataacctatgccaaaatcattcttatattacctacaatttacatattttgtaacaatattatgtattctaaaatttattggcagaaaactctagaatttgacatgtctgataaataatgcataagttcaatttagcatttaatgagctaggtactgtggggctgtcactatctaaaattaattataatttattagagttgtaagactagaagctttctaatctatttactattcttacagatctataaaaaactgagaatatagttatgtatctgctttatgaagatacaattttgggtttctttctaaattgactaaaatgcaagccccctatttctttcacatgtcctcccctttaaaagaatctgatcaacacagggaacacacaacccacagaatggaagataatatttgacaacaacacaactgacagggactgtttatccagaatttacaatgaactcaaacaacttaacaacaacaacaaaacaaatcccattaaaaagtaggctaagggctgggcacggtggctcatgcctgtaatcccagcactttgggaggctgaggtgggtggatcacaagaggtcaggagtttgagaccaccctggccaacgtgctgaaagcccatctctactaaaaatacaaaaattaggcaggcatggtggtaggctcctgtaatcccagctattcaggaggctgaggcaggagaattgcttgaatcatggaggcagaggttgcagtgagcagagatcacaccactgcacttctgtctgggtgacagagcaagactctgtctcaaaaaaaaaaaaaaaaaaagaaaataaagtaagctaaggacatgaatagacaccattcaaaagaaaacatacaaatggccaacaagcgcatcaaaaatgctcatcattactaatcatcagaaaatgattaaagttaaaattacaatgtcatatcatcttacatcaatcagaatggctattaacaaaaagacaaaaaagtgttggcaagaacacaaagaaaagggaagacttatacactgttggtgggaatgtaaattagtacaacctctatggaaaacagtatggagatttctcaaagaactaagaatagaaccaccctttgatccagcaatcccactacttgatatatacccgaaggaaaagaaatcattgtaccaaaaagatacctgtactcatatgtttattgcagttctattcacaatagcaaagttatgaaataacctgtctatcaacaaatgattgaataaagaaaatgtaatacacgcagacatacacacacaatagtatggaacactattcggccataaaaaagatgaaacatgtctttgcagcaatatggatggaactggaggtcatcatcttaagtgaaacaacccagacacagaaggaaaaatactgcatattctctcttataagtgggagctaaataatatgttcatatggacttagagcttgggttgattgacaatggaaactcagagggtaagggagtgggagggagatgaatgatgacaaattacttaatgggtacaatggatattattctggtaaaggacatactaaaagccctgacttcaccactatgtgatatatgcatataaccaaattatacttatacccctcaaatttacacaaacaatctgtatctctaagctacatctaactgaagggtaggagagtttgtgcttaaaactcaactgtagctgaacatacagggaggggaacaacacttactagggcctgttagaggaggtgtggaggtggcaggggaggattagggaaaaaagatcatgcatgctgggcttaatacctaggtgatgatttgataggtgcagtaaaccaccatggcacacgtttacctatgtaacaagcctacacatcctgtatgtgtaccccagatcttaaaaattaaaataattattttaaaaactcaactatattacttactagctctctgtccttggatatatttgtttacctctctagtcagtgttcttacttatacaacatagatgctcataatacctgataggattgctatggagattaaatgagatgaacttaaagactttgacacacttcttggcacttagtatgtgttcagtaaatgttaactgtagttattaatgaggaccagcccactaagatgatattagactcataataaatatataattacttgactcctaaaactgaaaagaataaatgaatatatgtgcattgaaatagcacttgtaagaatgccgtacaatgattaactatcatatagagatgtaatgactaagagcataggctctgaagcaagactccttggattaaaaatgtgtatgataaagaacaatatacttatagctcagttttatctataaagtaaaaatataattatcagaattaaatgaattaatacataaaaatactgagaccaggatcttacatacattatatgtttggtaaatggtgtctactaatattatcctatcctggtatgtgacttaactgggattctgaatttagttaacttcaggttcaattttaactttacaacatattgatagtaagatttttttgtagtttattcaggcaattgttggctttcagtctcttctgtgaaaatgtggaaaataatctctaatatatgaaacttttctgagcatcaactgaggatacatgagatacaatgtagaaatcctattacagtactatttattgctgattaaatattattttcctaaacccaacaaactgtctttaaaattattcccaatcattttgaagtatttataattatttaaaattattattgaaaatgattttccaatttttaggtttccaaataatttttattcaatttcctctccctcccccaaatttttggactccttgcaaaattaagtcaagaggaagtaatgcactctaattctttttaatgaggaagaaatcaccatctaagatgccaatttcatgaatttctccaaacactacatcatagatccaataaatccattcattaaaggcatttatctacagaaatactaaaataatactaaaaaattaaacttgaatgtataacttttcaagatttctgtagtaatttgaaaatcattcaaacacaactctgaagaatgtcttattcagcatggtaagtttaggataccagaattataaaattatcaataatttcttttgtggtttgcctgcttggcttaacatcagtgctttctgaatggttgttcctcaaataagtagtacaaatgagagaagtatatctgatcctcttttttttttttttttttttttttttgagacagagtcttactctgtcaccaaggctggagtgcagtagtacaatctcggctcactgcaacctctgcctcctgggttcaagctattctctggcctcagtctcccaagtacctgggactacaggtgtgcactaccatacccagctaatttttgtatgtttagaagagaaggggtttcaccatgttggacaggctggtcttgaactcccaacctcaggtgatccacccgcctcagccttccaaagtgctgggattacaggcgtgagccaccgtgcccggactgatccaatttatttggctagaattttatgtgaaataaaatttcttaaaatttatcaaggataaaactctaacctagtgtcaaagtctctgacagtttaataactggtcattcatcataaatctctcctctgaaaatagttatttatgcacatcgtgttaaaataaactcctttttatttatttttatttatttattttttgagacaaggtcttactttgtcccccaggctggatgcagtggcacaatctcggctcactgcagcctcaatttccagggttcaagcgatccttctttctaagcccccaagtggctgggagtacaagcacacaccaccacccctggctaatttttgtatttttttgtagagatgggatttctccatgttgccgaggctggtctcaaactcttaggctcaagcaatctgcttgcctcagcctcccaaagtgctgaggttacagacattagccaccatgcccagccaatgctttcctttttaaatgtatatttgcctgagtcaagctccacaaatcattgaaaatggtaaattaaagttggaataaactgtatttctgctttgaccttcttgtatgcctaaaattacctatctgatttggatttgtccttggaagaccaactagtcaaatactttgaatatcatttctggaatccctgaacttaagtatgagccatgacttacaatctacatacccaacatatctgatcagtgtaacaacgtcagtaatacaaacaaggatgtcttttggatttattgttaatatcaaaatattcagtttcaaatatagataaacattctagatagaacaaaaggacataaatctctttatgtgatttttatgttgaaattccatcattcttttaaaagtgtcaatttgatattgcaaatatgcaacacagtgcctgcaggagtaatctagcatctgatcgtgctaaaataaattattgtttctgcgctataatgttaaaaccttaaagcttgactttaaacttttagtaataaaatagtaataacaattaaaacttctaatttgtgtatccaagaagtttattctacaatggtaatatttagcttcagccaaatgttaattctaatactcaaccttttaacatttaaccaaaatttaatttgctgcacctctagataaaaagggagggcaagaaagaaggtcactctaattcattgattgactttttaaagtacgagcatctcaaatcacactagatttttttgagaggattctcctttcacaaatgtcaataaggaatagatctcctgaaatcatctctatccttgctcctggagggttaatgaaagcagaaagtgatactgtacaaatgagcccgggaggtctactggaagaattgtaatgtactcctttacacctccgtgatagtgatattttgttttcctctaacatttcatcaaaaagagaaacattttatatcacctctcaagtggttcattttactgtcagattcactttcacatatgatcatccttcctaagaatgaagtattattccttcatgaaataaatgaagttatataaactattttcttcaattatggtagaaactagttgaaacagtttaatgcataaactgagaaaaacacagtctcccaaaacagtaccaacaattaaagaattgacataaaagactcaatctattataacttttctattttaaattatatagcaattagctagaggttacacagtagagcacctacttgtagacctaccagtcatttatgaattttctaaagagtttgcaagtactactaatttcttctttgagggcagaggttaaatatttagttttcttttcttgttcatataaaatagtatctatcaagcattaaacaaacttgatggcgagtaatgtgtgttgataaagttaccactgcaccaaaatgagaaaacttttacaaagggctcagtaactatttttttttttctttttctttctttttctttttttctttttctttctttctttttttttttttttttttttttttttttgagacagtcttgctctgtcacccaggctggagtgcagtggcatgatcttggctcactgcaacctccacctcccgggttccagtgattctcctgcctcagcctcctgagtagctgggactacaggcatgcaccaccacaggtggctaatatttctattttttagtagagacagggtttcaccatattggccaggcttgtcttgaactcctgaccttgtgatctacccacctcggcctcccaaagtgctgggattacaggcatgagccaccgcacctggcctcagtaactattatataaagtcacacacaatggtaactaactggcgtattttaaagacaatttaaagacaataataataactagcataattattaaatcaaatatcttaaataatttaggatgtacagtgaacgatggagtactgtacagcctttaaaattattacatactttatagaatatatcacggatagttatttattagtgattaaaatggataaagctaagataaaaagtacgattatggtatgatagccacagctgtgtgtgtacatgtttgcacatgtatatatcgggatgtatgttatatctgacattgttaaattaatgtaacagagaaggttatctagcaaaatacattaagcttgcaaatgttatccatcagctatagtcttacaagaagcaagtggacaataattgcctgcttgtttgtcatcactgcattaaagagcccaaatcacaatactttgatgtaagatgagtaactggtaatgctatttcagacaaatactgtagtcaaaaatgtttgtcaagtgatatgtacactaattactcatataataacatttctcatattgaattactaacctcttaaggttctttaatttaaattgaacactagtactaataaagaatgttttgtgttatacttttctaggtctcagggtggtgaactttttcttcgaattcctaacctgtgagcttacggtaagattataattaatttacctaattttagagttattttcattaccgctttttgatcatgtccagttttttttaagtaaaggaaattcaaataagtcatttgatatttaaccataaatgttgaagaaattatgtgatattttctatcaaaatgtttatgttcttggatagattatagtaatacagttatttgatatagtctttgatagatttctatgtaaattttaaggcatgtcccgcaaaggtaaagattgataccactgaaaactgttctttgaacatgaataacaattttatccattaaatttttcataatgaagtctatttgatggcaatgagttattgaaagtaaaacttattttatcacctgtcaagatgtatcaaaattgggtctccccatgaagcatgatgttagagctccaggaagttgagagtaaagtatgtaactatggaaataagatggtaataaataacaagtgacttctaaggcaatttttaaggctttaattattcattaacttctgtggttatatgtattcaataaggtttgtcaaaaatgtgaatctggattatattaataattgactacagaatatacataaatatgagtttatttgtgttttgaaactgatgaaattaattttcactaagccaactttcagagtttatctgttgcttattagtaaacataataaagatttactttataataaatatataaaatccagataatgtgggcatttgtatcatacattctatacttgggggaaatgacatccttggaagcacaaaggcagttgattaaaactcctatttgggcatatagcattattgcaatgtatcttgaaaaagatgttttaaaatgatcgtagataacagccatctctaagaactataaggtatactttttcattactttttaaagaaacactcaacataacataggattgtttaaaacaagtgtcatataggaggaaagtgaaattcctctgctctaccaggaggactttgctgataatgggagaaatttggagaaattatttagatacactttgagtaataattttatccccaagtacttatttttaagttttaaattatatttcacaaatatacctgaatgaactttttaaataaattatttcaatttataataagaaacaaaagtattctaaaaattactattatctccagtgttttaattatcttatatacatagagaaaattacttatatcttaagtgcgcagttttagtgaattgttacaaaatgaattacacccatataaccaatactgacataagttttttttttttaaaaaaagaacattagagtactttgagtcctgttatactctttctagtcactaaacctatagagcataagcaatatcttcagttctagaagtatacagaacataagaagtatctttgcttctagaatatagaaaaaggaggctcctttttctgtattctataaatgaaatcatacagtaggtattgctttgtttcttttgctcaacattatgtttgtaaaattgtgtgcagtggtaaattgctcattttcattgctgtgtagtattcaactctgtgaatagaccaaattattaaccctttctaatattgatagtaacttaagtagcttccagactttggctttatcaatagtgttgatttggatatcaggaacatgtgtttttggagaacacatgtatgtattttgttgtgtacataggatatgctcatgttctgcttcagtacatattgacaattcaccaagtgtttatcagttttaggagcaggatataagagttcagttgctccctatagtcactgacaccggggtttttcatcctaacttcagcagtttgggtatgtgaataggggtattataattggaatatattgaatattaatgctatcaaacatttgtttttgctcttatttctcatgtggttacactattcgttgaaatgtcctaaaacttttgccttttttttcttactagattatttgtcctttattattaggttatgtttatacatacatatgtttatacatacataatatacatatcgggttatgtttatacataaatacatatatatacatatatgtatgatatatatatacacatatacatatatatacacatatatatatatatatatacatatatatatgccattgtatatatccaatagaggatttaaaactaccaattaataaatcagcattatttctttcttaaaattcagaatcaattctgcaaatgtgtacttgccacagattacattgtccttttatgtatggtttttgaattgcatgtgtttttcctcatgaagtaataatcctgattcaaatatattcttcgactaacattcttacattcttaaatactttctcaaaactaaccatagccaattatggaagtgtcaattatgggtttgaaaatcagtcatgatagaagtattttcacaacatagtttgagaaacaccaaaaataatggctttatttttccttctggagagctagttgtgaaatatttaccagagcaccactgaatatttgcactttatattcaactctttggtggattttctcattactctctggatgatatattttgatgaacagaagttcttaattttgatttatttctgtttattagggttttttcattttccttctatgatcaaagttttttatgtcctatttaagatatttttgccttatctgttgttactaagatattatggtttctctaaaccataatatcgtttaaacttttacagttaatggactccaggtgttacattgttctatgtttattaccttgtgcatttaagataaatagatttgcattagaattgtaattgctctgtatatgttttaatgttttattataaaattcatacataaatattaatacattgatatgtagttatttaataatttaatgtatctattaaaataagcaatatgtagtattttgttaaatcaatatatatatatttatgaattgcccattataagtttcatgcaacaattagttatgtggccacaattttgaaatgaaaattcagcactataacaaaattattttactttaagcctaaatgaattatgataatttatttccatatgatattattaagggaaccaaaagtatgcaatatgaatgttctacagcatcattaaaatatcagaatattaggctaacctttaagcatttaaatgtaatcattgttaaaatatatttattgcttctaaaatattatgtctaataagttatataagcatataacagccataatataaatacagccttaagtattaactacagaatactgttatatgcgcttcattaagattttatttaatacttgtcttgtgagatatatatagagagagaagagagagagagacatacatatctttttttgtttgttttaaaattttcaccaaaaacacaacttattttgtgtctgatagaaaggatggtataaaaatcaggattgtttatttttaaaaattttgtatcagttatgcaaacatacatgtgtttgccacaggttgcagtatacacctttttagaattgcatgtgtttttcctcatgaagtaacaatcttcatttaaatacgttcttagaatgtttgtttttcatctctgggtccttagtctaagccatgtcatgatttaagagtaactcataatgtaacacaatggaagtagaacagcaaagtagatagtatcttattttagtagttagctaacgtgtttcagttcttcataatattgaaacaatgtaataaagaaatgttggggtttataaattaaaatccttgaaactaaagatggaattttattaatccatatacttggatatttgaagagcttgggatttgtttcagaagattttggttgcctgtttttttctttctgctttcttgcctgttttaggtagccaaacatgatgaaatattgagcgcaataatcaagagctaattagatgtttttcactttttctaaattatcgatctctgtgtcataatgaaagcagggagaacaaaggtaaaacacaaatagctgtcttgaagattggttctaagactttaagtagcactaatacttcttatcctccaccagccattccaaaaagataaataatgagcttatctgagaaatagagcataagttatagaaataaatatttcaggatttatttcatgtgtccctgaatgtaagtgatagttaaagggaaaaatccagttaagaaacacaaaccacatatagaggtaattgatgccagttaaattagcttagtttattttcacagtggtgacagggcttggggaaaaatgaagttaaacgacatacaagtaacatcctgcatgaaggaaaatagtggaaactgaagaattactgtgcattatttggacccaaaatttaaatactgaattatgcaatagaagtctaatctgaagtcacaaacaccgtttgaagtccaaataataataataatgatgataatacagttagaaagacgtgggtaaaaagttttggtaacataaatgaagtttgaatttgagatcactgcatgcacaaatactttctggaaatttttgcttcctattcaataatgaattgattacacagaattgttaaagtgcagttctgtggggttattttttttccctaaaaaatatatgggaaaaatggagttctagttctgatgagcactttcaactgatatttctgaaaaactagttcagtgatatttacttgttacaaaatgcctcacctaaatcctttagtctgaatacatatggattatcacctcttcacacctttggacagattattcctatctggctagctcacacataattctgattaaataaattatccatctgtgaatcccctaggcttaacttttaatacttactctatatgatttacacactatatctagccttcccccgttcccgacatgtcaggaacaagtaatttagtttctaagactttcctatttgtctaaaggcaaactttatcaacctctataaaaatgtgtatgttatcttgctccctctttgatatactatggatatctgggaaaatcgagattagacttttgtcgatttgacttgttgataacgaagtgttagggaaaaaaaaagagctttagaacatatttaagcttactaaagcctttcaatggcatatatttaattctggtagcaataaaatggatgggattttattgtaaagctgagcagaattcagcttctaatatgtcagctttacatgacagattattaataaactgccactgttatcacatgatacaaatctttggtgactgactttttaaacttgaaactcaaatgtatattttaaagtaagctttactttgtggctcagttcttccctttaaataccttttttttttcccctctgctctgtagaaattattgtgccatttaatcaatggttttaatttcattacacttataacattcgcaaatgactagcgtatcatctgtgttgatacatgtgcagatagttagaggattattactattattactcgctgcagatgatgacaatgacagagtaagaattaagaaaatgaattgactttaaactctgtataatggccattacctagcaaaatgagaaagtgggcatagtgcattttctcaactgactttccccagtgtctttgcctttttctctcttttattcacaactccttattgtagatacccattattttattcaacaaaacccactaagcatctgtatgtactaagcattgggctagtattgggaaacagtcagctaacagggacccataggaaatttatagtcctggagagcttgtagggtctacagtcatcctccagctacaaaaaggtcttcatctgtgaagtcctctatactatgtgtatatccttatcaccccatcaaaactttagttacccatcagtggaaaattaagagctacctcccattaagttataattagtagatgaagggacatagcatctgattatcgtttaaaaaaatgtgtaaacgtcatagaggaaagcatgtaggaaaacctataaatccatacatgtatgactcagtgagttgtaagtagcatatattttctcactgtcataattggatggttaatatcaaaactgttcactagttgggcaaagctggaaataagagtccatattttcagtcaggtattattcagtatttattacatgtcacatactcttctggatggttttatttgtataatgatcttctaagaaatctgaaatgtattaaagatgagaaggcagaatatttgtggaacttaggaagcctgattctgcttataattaatcgtttgacctcccacctcagtcatttattttctcaagtcttccatgtgttctactacaaaacaagaaggatgtgcactatgaattttgaatcctttcaagctttaaatttaattattctaattatgtcagttgatatgctttgagccacaaataacaggaaactaacttgcttaggctttaagaaaggcttcttattatacaaataagaagttaagaagttgtagaatttcatggatgactcaatgacataatcagggacctatgttcttttcatctttgtgcccaatgtcctatcttaggtttgtccttggccagaatccctcaatattgaaagatgtctgccgtaattataggttacatatctaggcacgagatacccagtagaaaaaaaaaggggattttgccttctttttatgccataaaagattaagattttatgacaatccccactcttctgcctattgccagcaaataccttttcacatctcttctatcaaatgtgtcatatgccccagcctataaggatcatttactattggcttagaccagttgtgtttaccctctgcatttaaaaatgtgttctgcttccatggaagctcaaggctgcatagagaagcatggagggggataaaaaattcaagttcccttaagaagcagaaaaggagaaatggttctttgctaggcaaccagtggtatctgttatagttattatgctttgttggtgtactacatccttcttgaattaatacttttattttccctgaggcaataatagataaaatgtgagtttactttagaatgaagtccccagggataatcacatcaaattaaacaggtgattgcttaggaagtaggcaattgttattgtttacatccacatctcttctcaaaattctttagtgacttttcatcttcaagagaataatttctgtataaaaatgtacagaatggggtttctccctcagttttgctgctctgttaccatccatgagaccggcatacctatgttctttgctctcaatctggtgccttcacccatcctgttctctcaataacacaacaatcccacccctagcagaacctcccacccacaatcaatcatctctgcatttttcctttgaccaagacccactcacacacctttgactgacagaaaaggtactgctattccttcattccttcaaatttcagctcaaatgccacactccttatgcagtatttcatgaatcttcaggtgacctatgtgcgctttcattttcccattgaccttcaacatatttccattagactgattattttatattttttatatctacttgacctctctcggcaatggactttccacactttgagggtaaaattggtgcccttgctgccttagtatttgactctgtaatcactgtcataaggtaaggtttactctgtgtttgctagagtatgtgcctgggcaacaaaatagtgttagtgtcagtgtacataagcagagcgaatgttcggagcatttctttcatttttccatgagaagaaagtaagataggccgaagaaacgcttttcaatattttccacaaatgtccaaaggttttactgccccaaaactttactgacaaaggatgatctatgaaatataattagttatgaccccactacgagtgtaagcttttcttaaaagctggtgtttaatctttgtaaattgtgctaattttatattttatagtgtttagcctttttaaattatgttaaatacatagtctatgtaataaaacatccaggttttatttagcatataagaatgtttaggtattattgtgtaaaactgattctccagcaagaattacattgtttttcctgatatcctaggcaaaccattataagctctcgcacaagtttaatcgaaaagcacgtacagagagaaataatctgagtttaaatttttgaccacaacaccattgcttattgctgtgctcttgagtaattaatttaagctcattgtacattaaacaaataaaattcttatagttgtgtattataatttaccttcatatatatcacagtttttgacagatcaacatgtgcaaattatttttatcttatcgagttcaaagatccatataagtagataataacagtcttcaaaatatgacaatagtttgatttgtgttgtccacgtataaatgtaattagtgagaattttaataagtactggaaaagaaaaaaatatatatacaccaagatgaaattgctggagaagaaaaaatgtgcaggaataaaaaagcaagccctaacagcatagaattcaagttgtcacaaatgaggaggcagccaataaatgattcatcttgtgtccttcatagcatatttataaatccatctgacacttctggcctgttagagagtaaaaaaatgaaattatagattccctactatagaagacaccatcaacaaaggggtttaagtagggttacttggtcattttcatttatctcatttctctgtattccatccttgacagctctaacatataaattcttcaaaatcctaggaaacggggccaaagtttaatgttctgtttccttttttacaaggacatttgtctggtttcctaaatgcacaaaaaatgaataataatgtaacagtttctgggaatatgttaaggtacaaaaaaatgtaaaaatgatttaaaaaataaaggtacctgtagtttatttctgaacgtgtggctatttgtagcattttctttatatttcttatatgttaaaaatattaaaagcatttttatacattaataaagtcttgcaatataaataacaaaaagaaaggaaaaattattcttcagaaatccatcatcattctgcattcagattgtgaggtatcaaaataaaaaggatttttataccttcctttccaatccttatttagatttgcatttagattacatcattcaatacatgcaattttttgcaattttaaatttaataaacatttcactcatcagaagtgtatctccatttctacatagtctataaatgttaattttaaaaaccgcatattttttcagatcagaaaattcctaatcaaaacagatgaagcaagagtttagtgagcttaaaaaggtttgtttagagttgcaaaaagtgaggtaaattaataaaatatattgttagtttacaattactcattcagataatcctttccactttacaaaaccttttacacatattagtaagttttaataaaatatttgaatataacttttcactttattaagcttctttttatgggattatgtaagattaagttagttatcaggacattggagaccttgagataattttgaaactaggtaaatttgaaaactgcatgtcattcatttaaatctttatgaagcaaatagtacatagcccataacaggttagccttaggtgcactgcaaaaaaaaaaaaaaaaaaaaaaaaaaaaacagaagattcaagtctctcttttgttcagcttacatttctggaggcagaacaagaaatatcttcagaagtaaaatctaagtgtgatatattttttctaagtgctaataaatccaaagacagtcactgaactagagttaggaaaaacaattcagagatgggttttcttgagttacatattaatacaggagttcctaaatataatgacctttaaaaatcttcttggaaagcttttaagacatatgtaccccaggattcgaagattttggttcagtaagtttgaaaattgtttaaaaaaagaaagctccaacccaaaggttctcacaatttggtgtgcaagagaatcatctagtaaatctgataaaagtgtgaattcacgaacctcagcctaagaaattcgaatttagttgatctaatgtggagtcagaaatttttaaaatataaatttaaattgacaaggccccctgcattcctcatgccaactctgttatgccagggagattctgagttaacttgtttctaaagggtaacaggagaagcattcctcacaactgatgaaaatttggagaaagagtacttcaagaacttgggcatagctccttcatttggaaagctcatcagaatcactcatggagattttcttttgcacatctgtgagctcctcctcaggttaaatgaataaggatctacaaagttaatacacaggtacttaaactttaaaaagctcagctggtgtttctaatagcctctttggctgacatactcattaaatacactcttgggaggccagatgagcatgctattctaatgatccacaagcactggtagctattagaatgagctggaaaacttggtaaatataaaacaacccaagctctcacctactcagttgaacctaggccaacatgtcttttacttcctctttaagtgactcatatgcccatttggtttgagagccattgggctaagtcatgtggagaagaaagccaggatatcaatggataaggttaactgaagtcaagatttaaatgctcaggtaaagcatgttggttgtcaatatgagtcaattctagttctatagtatgagaatgcaagataagagtattacttgggcataccaatgtattaatgatctctttcaaacatcatatattggatgcatgggatattacttaatggaagctttatggttttgtttatatggttgcagaatgattttcatataacataatgtttaatccttggcataaaagccaaggataaaagcatcaacagctgtcctgatcctctgaatgtggtttccttatttttcttactatgctccagctctgtaggctgtccctgagttctggaattggtctattcttcagcaatcacagtatttccagaatctaccaccatatttctttcttgtccatgcagaataaaataaggagagagtgatccatggtttgggtacagatagaagaaaaataaccaaagctactttgatgatcatgacaataaggtaattaaaaagatactggagttatcatattgtcaaagcattctgatcccaccttataatagtctatccataaggtagttcccaaatgaagtaacccagcaaatttgcacagcgcacctaagccatggattcttctcacatttcaaacttatcgggatagacttgctccttacaacttttattactatatcttgaccaccccttgccccttttatttttaatctctttctgctcctaccaaagagaagggtcagactgaaacacattatatatttcttataataaagtgggtacaattataaccatacaattagctaaaattttatattcagttgaaaaaggtgatttattaaaaatgttctaatagtcattcatctagcaataaatatttggtgagcagctactgtgttctagaccattgtctttctgcttgagttacaccgtaaatacaagcggcaaagatgtctgcccacatggagcttggattccagtgtggagagatggtgatagaataatctagcatatttaaaggttatgtattttacagaaaataacaaaaagtagaacaggttgaaaggaaataggagatttggggataaggagatgtggggtgggtagaaatataattgtaaataggatgcttagagttgaattatccaaaacaacagatttgggcaaatttgctcaggaactaaaggtgttagccatatagataccatgaaggagaggggtctaattgtaaaggcaaaggctgaaaggaggcttgaaaaatagcaaagaggacagtgcaataggagcagaggaaggcagagttctaggacctgaggtcagaatagtaacagaggtggggttgaaggcaggtcaggtagagctttggctttaacactaagagcagtgagaagccattgaaggattttaagcagaaggatgatactaaggtaattatctctgttgacaatggcaaatagggtatggtcttaaagccagaagccatttttaaaggctaccgtaatgcagataagaaataataggggcttcatccagaatagtggcagaggaggcaatgaaaagaatttagataaattttctaggtaaattttgaaggatttgttggcagaatttccaaccaattgcctgagggacataagagaaagaggaatcaaggatggcttggggatttgagagctaagaacttaactgtggagctgccttttaccaaaaaataaaaataagaaaaaataaagaatatgagtgtgaggaaaacagatatgggggacacagaaaatcagatcaattttggacatgttgaatttcagatgtcttttagactccgaagttgggtatcaagtagtcatatggatatatgaggcttcattttggaagaaatgtcagtccagaagattaaaaaagtgaatgttggtggcacagagatgacatttaaagccataaaatgagagaaaaatccttaaagcagcatgtatacatagagagaaaatgtctaagtctgagccatgggccattccaacaataagagcttggaaggagaaggaaccaacaaatgagagaaggtacaaccagtagatagaaagagaaagaaaagtatgtgatgtctttcaatctaagagaaaagatctcatcacctctgaagagaaacagatttttaccaacacggatgttttataaattagtacccttcttttgtttggaaagtaagagtgtttttttcagttaaggcttaaacctaaatgcctttttccctgcacatttctaactgtagttctgaaaatagagagaggctattctttttatacttgtccatttgcttgttctttgtgaaaatctaattttaccccaaatggtttgatgataaatcagtggccatttacttagtagtgttgatgaaaaagagtcaaattatgtaaaatatttgaatggatttattctgcgtcaaatatgcgtgaccaatacgtgaggcacagttgcaagaagtcctgagaacatgtgcccacactgtttaggttacagcttgattttttatacattttagggggacagaagtcacaggcagacatcaatcaatacatgcaaggtatccatgggtttgatctggaaacgtggtgtaaggaacatggctgtgctttagtcaggggtaggccaaggtatgatgtttacatcctgagtgactcagtgagtttagagcgcaggcgtataactccgcttgttatcacaaccatgtagccataacataggaaggccatcattggctctacaacactattgtctgtgaaacgtataactgccctgctaatgctgtacaggcttgcttggctcttggggctcagctcggctcaacatggcttgacatggcaggcacatggcacccagagaaagagagagagtgaaggctacctgtcttgcagatagacaggagggagccaggacacagctcggcttgctcgtgcccagaaagagaaagagttaagctactgaccatgaaggcaagggagaacctgctgcacagctgtgcatgggggcagctggctcaagcagccaagacagggcggacagtgtgaaagtaagctgctaatgagaaagctactttaagctgtgtaagagagctgctgctgaataaagccatattcacctgcccacggccccagagtgtactttctgcccatccacccactccccttggacttcagcatgggctggaaccggaccctaggacctgacaactggcaataagggtgggatgaagtgagtgggtcttcagcccctgaggcttgcccggtcagccatgtggctgcagcatgggctgtggtacccggtggcagtggtgctgcttggatgagcctcaatggaaacatgggaggcagtggacagattccctgtgagtgtggaggaggcgctgaagcacctgaggtgcacaacaccaaggaggaacatatctttgccagcaaagtcggataggcatttgtaactgtgctgcgggaaatacatgcctagtccctgcaagatgcaacatttctagaatctaccaccatatgttcttgcaggctcgccctgtattccaccagaaaatagagcatgagaagctattaggtccaggggtggtcccagagaccacctactgtggtggagtgtacttcctctagtgcctgtgtcctggctgagttgtgggagttaagtaagtaaggtccacagtcatgtacagacttagtgcaagacgtctgagagaagaacattgctgtgcaacccagtcctgccctagcattccagttcaaagagtacctgctgtggttggtggaagtgtagtttttttctgtttggtaagagaactggccgagaagcccgacttgagggggcaccggacaaccggagccacatgtggacttggcaatccactggtctctgaacccagataagtttccaggcagaactgcatttattggcagctgtggaagctggtcagtggaagtgaaacctctgtctgcaccttggcattggcagcttggctctccacttatgcaccgcttatgtctctcccatgcctgaggatattctgagggtggatgtttttcatgggttggcagctgtacggtctgtcacagacttgctggaccacttgacaacagaactggaacttcttgtccagagagccaggaacagtttaccttcatgggagggcaacagtggactttcgcagtgttgctggagggctatgtgcatagctccactatatgtcatagtcttattgatgatgttatgctaacctctcattctcttgcagagttagaaacagcaatgcccctcttacctgggattggatgatgaggctgagacagccaagcagcctattcagtaggcacaagccctacatgtagttaaccaggggtgcctattaaaactgaatgtgcatgtgaccacagatagttttggctagggcctaaacaatgctggagcagttggaagtgccagtaggcttttagtcccagctgcgggagggagctaagtgccagtgttcattaatagagaagcagttagtaatagcgggatgggtgtgttcatgggtaaccaactcccagactgggaagcagttagtaactgcatatgctgcccttcatgctcagagtgtggtaggacagtctacagtcatcctgtagacaacttaccctatagcgggatgggtgtgttgatgggtaaccacgccccagactgggaagcagttagtaactgcatatgctgccctctaggctcataagagtgtggcaggacaggctacagtcatcattcagatgacttacccaataacgggatgggtgcactcatggatagctacccccccggactggaacgtgcggacatccactttagtgatgtggggcgcctacttagagcattgaagtacactgagtacaagtcccttagtagcagagttacaaaaaggcttaggacctgtagtcctaatgcaacataaggccttggggcctaaggtcatggggcctgagacacccctagatcctgaaccttcactgttaggaagggtgtccccgaattcgtaatagggcattatatacagataggtctacctggggtgctccttctgcctggacttttgtctcagtccagcctagtactgataacatatggtttaaaaccaggtgtaaacggagtagctaataagctaaactcagggcagtgtgaatggtaatcaccaaggaggtgacatctgtggtaatctgtgccaatagatgggcagtttatcaacgcttatgtatgtaacaggcctgcgtgctcagttgcttgtgtatgtatcggacctgcattcccagttgtatgtcaggcttatgggtcaagcctgtctatgtatcaggtgtgtgtacccaaagtttgtatggcaggcctgtgtgacaaaacctgtgtatcaaacctgtgtgtccaagccctatgtctccctcggccaaaggggtggagtgtaaggaatatggctgtgccttagtcaaggataggccaagttaggatgtttacattctgcatgactcagtgagtttagagcacagatgtataactccacttgttatcacaaccatgtagccataacatggaaaggccattacttggctctgtgccactattgtctgtaaaaggtacaactgccctgctaacactgtacaggcttgcttggctcttgaggttcagctcggctcaacatggcttgacatggtgggcgcgctggcacccagagaaagacagagagagccaaagctgtccatcttgcagatggacaggagggagccaggtcacagctcagcttactcgtgctcagagaaagaaagagttaagctgctgaccctgaaggcaagtaaaagctggctgtgtgctgtgcatgcaggctgctggctcaagcagccaagatagggtggacagtgtgaaagtaagctgctaatgagaaagctagtttaagtaagctgtgtaagagagctgccgctgaataaaaccatattcacctgcctatagcccctgagtgttctttctgcccatccacccactcccctcagacttcagcatgggctggaccaggactccaggacctgacacatgggacaacttgaagggggcttccagatcataggtggattcaaagcttttctaactggcaattatcaaaaaatctggaatcaatagaaaggaatgttttggttaagataagggggtgtggagaccaaggttcttatgcagatgaagtctctaggtagcagtcttcagaaagaatggatggtattagtctcttttcagatctaaaaaggtaccagtttcttaattaatatctgttggattaggaaaagctctggaaagggaaggggtttctctatagcatgtagatttttttctcccgagagagagctttgcagtgcatttcaaaatatgtcaaaaaattttattttgggataaaatacttcaatttcttccagggcttgctatctgctatgcaatgctatgttagagttaggttggagttcggtatcttattggtacaaagagtctgctttgtcattcttaagatctctgttttaatgttaatgctgatcaattgtgcctgaattccaaaggtaggaggctacatttaggtatgtctggacacccttccccccttccatcatggcctgaactagtttttcaagtttaatttggaatgccttggctgagaggagggtacatacaagtcaattgcgggagctataattttgtttttggtttacaatggcaatgaaacccagacaatttgctgaaaggatactacttttcttccattgatggacgttatctctcacactcaaaataatgaatcagcattctgtggataaagcactgagtctcagggggataagttccctaaagtgatagagtaacaaacagaaccaccatgtccatctcagttgaaatctttactcttttctacagtagaattgaagatactgtctgagattagaatacaggtttctaatcctttgttcttttctgataacgaaaggaccctgcaaggcactgagaaatctttgaggcttcactccatcatcatcaagattttgaaccacagagctctcaatttcttgccaggaattatattttgaagtttggatgtaacttgatcatctgaccatctaaatttgaaggatttgggttgtgttagctctcagagatacaaagacaaagttatatactttaaacaattcatttatcttagatggggccctagcaacaataacttactgaaaattattaactgaggatctacaatgtgggaaggcaccaggcaagaaaattgggggcaagttagattcaaagtgtgaaacacaattgatagacttctaggaatttacaatctatttatgactgttatgaataataaatagagttgaacccttgaacaataaagatttggactggcaggtccacttatatgtaaattttttcaataaatgttacaccaaacgtgcctccttccccttctacctcctccacctctttttcctctgctttcctgagacagcaagaccaacccctcctcttcctcctttcttcaacttactcagtgtgaagacaatgaggatgaagacctttatgatgatccactttcacttaacagtaaatatattttcgctttctaatgattttcttaattacattttcttttctctggcttactttattttaataatacaatatataatacatataacatacaaaatatgtattaattgactatgttatcagtaaggtttctggtcaataataggttattcatagttaagttcatggggaatcaaaagttacacaaagatttttggctacctgtggggtcccccacattgttcaagggtcaactgtacaatctaaggccataaaaggagtaatttaagacacaaaaaataaatttaaaaggaagcaaaggttctattttagttttaatatgcataatttctagaggaggacaatcttttgaactttcaggtgtattcgttagttttgcatttattaaatgttaatatttgcattaaaaaatttaatctcttataaggcatttagatataattttctcatataatataatgggaaaggtacttatagctaatgttttttgtagttttatctgtatattcagaaacataagaaatcaggacatattttgtgacctacttaaatgccaaacgtggtttcttcttgtactagatttacaacatattgaacttagcctatttctaaaatagaaagcaaacaggaaagaaatcagttaagatgctttccatcctacaataatgctgaattttagtggcacaatatatgaagtgtcatgtaattatgtgcatgtgtatatgtttatgtgtgtgtgtttccagagttgatgaaactataatacgataaataaagacaggtttagggaatcactctacagggttatttatacttgtctaactctataaacaccagctttctccctttttctggtgaactcagtcaataatgtgtgatgttgctcaacaggtgactggtcaataattatggggggaacattcaggtttatataggtaaacaatgaaaagactgtggccatatatctgccctaataagatattttattatattagaaagtcttctagaagcataagaaataatatcatacgtcaaatattatgtaaaaaaatgaacatattcataatacatacatgttggcagtattacaaacacagtcttctaaagtccatgctcaaaactctgaaatgtttcacattatgcacttatgcctttaaacaaaccacttttagaactgagtctaaattttctaatatagaattattttcctctttgcacaaatgataaaaattctaacccattagacaaaatcatagatataaaatagcttgtataatatagaatatgtagacgtataagcaagcaaattaaaatccacattttgcagatagactttatttcattgaataattgaatatgcagtttttcctggcttggaatgtaatcactttattgacctatgattataccttgacattatgtacattatggggcaaattccattaagtctaagtttcctgcgtagttaagaagtgttgacgtttcctctgcaattctttttatctctatttctcagtatccgtgtagagattcttattcatttgaagacactggagttgaattctaatgagtcaagcctcaagtgttcatttcatgggtaatttcttcaggtgccaaacaacgaccaatatcttcaggtgccagaggagtgtgattgttcattttctcttggatggtgccagaatatatttctttcaagatatttaaccctacagtatttgcttgacatggacccccactcccccgaaccatgtcaacattttttctaaatagctcccagtgtaacctaaaaacaagagtaggatcaaagaaaaaaaaaaataaaacaggaccatttgtcacagtgtgcactagtaagtaaatactgcagtctttataatattgaggcagaagaatatattagtctctatccattagtcagacattcacccataaaatgctcaaatctcatttgaatggacattctctggtgtgcagtgtgtgagaggccacatccttattggcacaacattgaagataaattacttgatagtgttttccatatttcatacacccacatgaaccagtggttgagtttgcaattaatatttttggattcttgcccacatatcccatgaaatactgtcatatgaaagcgtaaaaggtgaagtttcaatctaacttttctagcccatccataataaaatgttcataaatggcatcaattctcagatgtcatgttcccatcattgtccaactcattgcttttaaaatacccagaatctgtagcaagcaatgctcacatatgtaagctttgttgtcagagggtatatgcctgcagctgtcaactttcctccttcactccagtagggcccaataatcagcaattaagtaactgatacgtgagaatgtgtaagcattattttcttagtctaaatgtaattattgaactttgaaacacattaaattcctttgcttcatttgtctaacaatttccaagtataaaacttaatattttcttcctacctgaatagcttgctaggaagtcccttattgtcaacaatatagtcaagcatatttgtatttacttttcagtaaagaaaaattgtatgctttctttactaaccttattaattcagtaagtaaggggtatccatactgtcatttagaaacaccaaaacactgtagaaagagcatgatctttggaataccaatgtggaaaaaaaaaatccgagtttttctaccttctacttatagagtttgggcagttgtcttaattatttgagtttcagtatcctcatctgttaaatgggaattatgtcatttgttattaccttgaagggtatttctggagattaagtgattaggtttgtacaatgttggcagaaatgctgcttagtaagtgttggcaatgaatattattaataagaaattagaaaaaaataaactgaattcattcattcaataaatattaaatgttttctttgtataaatccgtataacaatttctcagaaacatatttatagggatgaaattttagttcattttctgtcaatcaattgctttcacaatatcaaaggaaatcttaataggagcaggcgactgcagtaagctacattacaaactatcttcccagacattagatgtattggcatgctttgctgcctttgcctccatatttaataaaaaagaaattgaataaattattatactatcacaatgtaaatatggtcccagtgtccataattgctttcattttttgaaatggaagaagacagtccacttaaattagcttttgaaatctgaccaaatgctccagatgttctagcactgtcagtagagcttgtctgtgatccatgtcagaatagcagctgtcaacacgaaagcacacctgccactggtttactgtcagcaaatgacttttcaattgtattaggaaatgaagcaaagtgctgaatgaagcattcatctttgaaaagcagccatgtcacaatgtgattttgctccacaaaaatgcagaaatctctaaagtcttcccagtcactaaccttgaaccgaggaatctagtcttcttgagcactaaccttgaacccaagaagcaatgtctgcaaaacactagataaatctcagagcattcttaggtcattagacagaagaagtttgctataggcttactacagagaagcaagtatttgcatataaaagaagtcccactaaaaattggcacaattcatttcataagctgaagtaagttataaagaactacatttaggaagttaaaattatttaatagtcaatacttttcaagatttgattgaaaagctcatcgtttggagtaacaaaattttagaggtttgaaagttttactaatgtctcaaaatatgactaaatatagaaaatggcaattgactgcgaaattatccaacaaaagcaaaaacaatgactgacttgaaattaaaatcacttccttcttcaatactctttatgtactgctttccttctgttttgttaagagatggcgtggaataatggaaatggcatggatttttgaatcagactgggtaaatcaatttacctctctgagcctttgtttctttattggtaaaagtgagatactaatacctgtcttaactgaggagtaaatgaatattgactattatgaaagtgagaggagagtctgacacctagaaagcccttcaggtgatggtgataaagagttgggcttatgtgtctttatacttttgcttatggattgcttcttttgcctcatggcttcagtttacttcctcattttttttttctcacttctatgtcagccaactctgatttctttctgcatgtctttaattcaaactcactgagagatgatcccattgttccacattttccttttggggagcaacttacagtatcctaaattacagtccactagcagatacataagttggtttggggcagtgtcccttactctggtacaatctggtggggcttagtttgtggggttctaagatcagctttttatcccaggctatatgcagtaggactggcatgtactaattcaccattaaaatggaaagtccaatggaattaaagaaggcttgatgaaagaagaacaaaggatgtactgagaaccatataggagccaaacattaatgtaatatcttcagcctgtactctggaagatcaaatccagctttatgcgaacctgtgtcagaactccagtaggtagatacagagtgaattttcatatatatatattctattaccatttcactaatgtgttatgtatagaataaaagacttgtattgatgtaaaattaaatataatcaatgttgcctagtactaccactggaaagctagaatattcgaatagataactggaattattcacctttagggaataattagagacccttaatttaaatactgaatttctaaagcttgtaaggttttgacctccgtttgtcagctttataagatttttcagttaagcatttactgatccttctcaggtaaaatttatgcagtttatttagcgccaggttgattatcactataaatgagcccctccatactaccccagctccttgaaacattcatatgcaggtttagggtgaacataagttcttatttttcaagaatatacattaaattataaattgagtgtaactatggggtcatgtagtatttacatgattaaatttgcatgataaattttcagaccatttttcagataactctaggaacttatattcctactagcaattcatgagtgatacagtttctctacttgccaacatttggtgatatcattaatttttattttagccatttttagttaatgtgtagtgatatgttcttgtgattttaatttacattgatggctaatgatattgaacatattttcatgtacttatatactctctatatcctctttagtaaaatgtctgttcatgtcttttgctcctttgctatttttttattgttgaattttgagagttctttattttttatactagccctttgccagataagtgatttgcaactagtttatcccaggaagtaacttatctttacattcttttcatgcggggttttacagagcaaaagttcttgtttttatgaactttgtattatggctttccagagcaacagaaccaataggataaattgggatatatattaacattatataatatatatatgctatactatacataatactatacataatatattgtcctacatatcataccatatatatagtatatagtgcataatatactacgtataatactatacataatatacattaatatataattttatatataaaattatacatttcatatatatagagagagaactatatgtatatgagaaatatatatacttctttccatagagagagggagagagattataagaaattggtttatgtgattgcaggagctggcaagtctgaaatctgtagggaaagctggcaggatggagattcaggtaagagttgatattgcagcctaaagtctgaaacttaggcagaatttctatgctacagtagaggcagaatttcttctttggtaaacctaagtcttttctcttaaggccttcaactgataagatgaattccattcatgttatggggggtaatctgctttattcaaggtatcatttaaatgttaatcacattttaaaaatatattcacagcaacatttaatttggggtttgaccaaacaactggtcactacagtctaaccaatttggcactaaaaattagtccaattatctattgggcagaaagcccaatttatttatttttacttttatccatcattcttttgatgtcatgtctaagaaatctttgcatagccctagatcccaagatattctgtgtgttttgtatacattcctaaaagttttgtattttgtgttttgtatttaagactattcttcattttgagagtttttatgtaaggtatgaggtttaagttgaggctcattgtttggtctatgtatgttcaattgttccaccatcatttgttgaatcatttttccattgaattgcttttatctccttgtcaaaaatcagtgaagcatgtgtatgagacaattttgtataagtgtttttatgacatgtttttacttttcttaggtaaataacgaggcatggaattgctggaccatagcgactgtttaagtttaatacatcttcaccagcagttaatgagatcagtcttgttgactatctattttggtagagatgtggcggcatcttatgatggtttcagtttgcatcttcctgataactaatgctgttgaacacttttctatgagtttattggctatttggatggtttcattttaaaatgtcttttcagatatttcacccatttaaaaattggattgtcttttgattagttataagagttctttatatattctggaaacaagtcctttgtcgtgtgtgtctgtgtgtgtaatatatacattatacacatatatatgtataattttctcctaacctgtggctgcttattttttacaatgtcttttgataaggtgaattttaaaaaatgattaagcccgagttttaagctttttttcttttataagtttgtgctttctatttcttatctaaaaaatattgcctacttcaagattgcaaagatagttgcctatgctttcctcttgaaaagagatatattctgaagttgtttgatatagtgtcctaaaagtatcagttacattgtttgagaaggttggtcaaatcttttataactaaattgattttcctgtcaattactgagagcaagagtgaaaaataactgaatataatggtaaaaatgttctatttcttcctttcgtattgtcaatctttgcttcatttatttttgaagttttcttttaagggatatacatttagtattgctatgtctacttgccgaattgaccatttcatcattataaaatatgctcttttatctctggtaatattcgttatcttaaagtcaactttgtctaatacggcactccatctttcttatgatcagtgcttataatacatcgttttttatcatacttttgcttttaactcttttgtgtctttactttaaaagtgtatctctttgagaccagcctggccagcatggtgaaaccccatctctactaaaaatacaaaaattagccaggcatggtggcagacgcctgtagcccaggaggctgaagcaggagaatcacttgaacccaggaagcggaggttacagtgaaccaagatcatgtcactgccctccagcctggatgacaaagcgagactccgtcttaaaaaaaaaaaaaaaaaaaagaaaaaaagtcacatatacgtagcaagtaattgaatcaagctctgtcatacactctggcaatctttgccctttaattgaatgattagcttacatttttagtctcttttctttaatgcaattgtgaataaatttgggtttaggtctgtattcttgctatttatcttctattagtcacttttattattgatcatttccagctttcttcttccttcacttggaatgaattttctatctagtatcattttcatttaacttgaagaattttctttatcattctttgaagtgcatatctgctgatgacaaattgtattacattgctcagcaaatatctttatttcaacttcattttagctggataaaaaatattggacagcagtgtttttctttacactttcaactcttgaaagattttgtttcattgtcctttgtcttgcattttttgtgagaaaagtcagaaaaaattcctatcattgttctctttgatataataagcctttttttcttgagcttctttcacatttttctcattatgtttcatttttagcaatttgcttattatatgccttggactttttcctgatgtgtgtgtgtgtgtgtgtgtgtgtgtgaatttgtgtttatttgagctttcttagatttttggttttatagctcttatcaaattgggaaaacaattggaaaagtttggaaaatagccttcaaatactttttcttttggattgtcagaagggctaaatatcctgatgtacaaaatatccttgtcatacagatatcctatggcatgtcatcacaagactaaagcaactatgacctattcagcctttactatgagtgtcagtcactgaatcacacactctacatgcatttagtcctcaaacagttgaaagtagaccctattattatcgatgttttacaagtgagcattctgagatttcaacaggctaggcagcttgattcctaattaagtcctggctctgagaaccaaacaaaaatttcactgaatctatattttgaatggcaacctaaataaaaagggagagaggatttccaaaagaaaaagatgtttatttggaagtagagcatttcaaatggaatatgcacactgtagtaagctctgcacattcagggaggtaaaggaacacaaaggtttgtaaggaatgatgaggatgactgcgtactttttctgaaataattgttattggctacaaaatcgatagcaagagtgacatcagtccaatttagacagggtttccttgtagaagtatttttgtgtaagtttggtatggcatttgtgcaattttatggtttttgtagagtctttgtgatagctgttgttaccaagcatacaagcatgagaaccctctcttcatagtcttcccctgctctattaggttttattttttattttttgtctttttatttttatttttttttttaacattagtgactccattttgatttggagaactttaacacaagtctttaactcactacccatgtaatagggttccattatttacctggtggttttaatgctcttttagtgaggaacactgtttggtaattactccactatattaagatcataaattatatgactctcaagatttaaaatttttcattatagattaaataacataatgcatataaagcacagcacaatatttagtacttagtggaacatattataaacattcaataagttagtaattattattactataaacacagaatctactggtataagaggaacacttttaaatttgtgcattactgccagaattttacatataaaagggataatttatatagcataaaggtagtagtaattgtcggtggaatatggtcactactagagaggtaaacaaaactgaaaattaagataaatacatagaaaagaacaaagattctatgcaaaatcacctaaggagggcaaataatggcattaattagaaaaactgaacatgaataaagaagataaaatagaaatacatgagaatgtgcagaaaagaaacatctggtatttaattttgctataaaaattgcataagttctagcttatgcaataagacaagaaaaggaaataaaaggtatatagattgagaagaaagcaacacactatttttttttctcagatgacatgatcttctatgtaaaaattccaaaaattccacaacaacttttggaactaataatggattatagcagagcttcaggatctaagattaatgcacaaaactcaaaacaaaacaaaatttcactgaaactatatatttagtgaaaaaaactgctatatatttctatataccagaaataaacaagtggaaattgagattaaaaacacaataccatgtatattggctaccaaaagaatgaagtacttaggtgtaagtctaacaaaatatggacaagatctatgtgagaaactgaaaaaccctgatagaataaaaaaaattaaaaagtgggaagatattccatacttataaataggaagactcaatatattcaagttgttttttctaaaattcgtctatagactcaatgcaatctcagtcaaaatctcagcaagttattttgtagatatcaataaactaattctaaagtttatatgaacagtaaaagacccagaatagccaataatgaacaaagttggaggactgacatcagcgaacttcaagatatacaatacacctacagtaatcaagacagtgtgatactgatgaaagaacagatgtacagatcagtgtaacagaataaagaaatcaggaatagaccaagagtagttacctaaaagagttaaaaattttggtccatgcaaaaactctgtacacagatatttaaaatagctttattcataattgttcacatttgaaagaaattaagatgttctttaataggtgaatggataaagtgtggcacatctaaacaatagaattttaaaaacatggaggaatcttaaatgcatattactatgtgaaaagagccaatctgaaaaggctacatattgtatgattcaaactatatgacattctagaaaagacgaaactgtggagacattaaaaatatcagtagttgtcaggggttagagaaagggagggatgaataggcacagcacagaggatttttagcacagtggaactatgttgtatgatgctacagtggcaagtgtgtgtcgttatacatttgtctaaacccatagaatgagtttgaactcatgcatagagtgaaccctaaggtaaacaaaggaatctgggtgttaatgatgttaacataggttcagcaattttaacaagtgtactattttggtgggggatgttggtaatgggggcaaccttatccatatgtgggacaagaagtatatttgaaatctctatactttcctctcaattttgctgtgaatgtaaaactcctctaaaaaataaaaataatcaagaacaacaagatgagatttagattagcttaaacctccacacatattcaggtatagtcagaaacccatcccaactagaaatgtgggctatcggctagaatttgctcagatttcctactttttaattcactattatagttgaactataataaaattctaaagcagaataccaaatctaaaacaaaagtataaaataaaattattataataaaatacataaagcttagacctattagtgttttctcaaaatatctatctttttatgatccaaggaaaattttgtgagcctagaaaaatggctgtatgactttaatttgtatgaaagcaaaaagtgcatgtagatattaaaatatttttggttaaaatgtttttataaggtcaggtgactgatgttctttgtggttcagaatacatttgaagacacagtcgagagatgttctcaaactgcttttagcatcattgcattaagtatataggccctcaagtgagattattttgaaataaatatatcttaattaaatctaaaccttaaaaaggttaagaaatgtgtgtcatatgtacctaaaaaatcaaaatgaagtcggacttaaaatatttatacaaagtaattattttgggaaccttcattgattaaatgatattttctgataaggaaacctaaaaataagcttttaattcaattaattaaaatgtcgcagaaattaatattacaaatggttaatacttgcttttcacatttggttcttatagtacaatttttagggagaaatggtaaaatccacggatataaataaaagtactgttttatagaaaatagtttggtattaaacaggcttcctaatgctcaccatttatccttaagtttaattcaaaccaaggttattttgaagtgtatcacagagatatgggcaatagcttagatgcattttctacaagagaagagattaagtcaggttttatgaaatttggaatagcttacaaaattgaaggtggagggattctaatctgacagttacctgataaaatttggactcaaagcaaaatttgtattaaaagttctggaaaatggtagcttctaatatacgtttaataaacacaaattgttttaacaatagttaagcacgtattgttttgatttcccaaaagcagttattttcatgttttaataaccttttagaaaaatcaagtgtgcaacactatagtatagactagattataaagaagtagcctagaacgaaaattcatttgttctttgatttgtttttgtttttgttgtttgttttcagtaacaatcaaggttgatggccttgatcctaggcttatctgtgacataaaatgggctctgagatttgcataattctcagcaagttatttgtacctgcattatccatcaccaaaaaatctatcattaaatctaccctaccttggaaaacttagtaaatcttaagtcaattaaaattttgaaatttacctaatctttattatgatataatttacataaaataaaaacaattatattaagtgatacatgatattgatataatgtgaagcccagagaatttagcaattgtttataccttatacctttggaattacaaatgaagcaaattatagaacatttgcatccctctggaaagtagccttgtgcaaatttctaatcaattctacaactctaacatccaccagtggcaacattttctgaatagcatccccataatttgttatgtctattcttaaaattcatgtaaatggaatcttaaaatatgcattctttcatgtatgttttattttgctcaacaaaatgtttttgagtctcattaatgttgttttattagtagtcccattcctttttatggctaagcggtatttcgttgtatgaatataccacaatttgtttatttccatgtatatgagcacttgcattgttttcaattggtatgattattctcacacaagatttttgtggacatacgttttcatgtatctcaggtaaatatctgttagagaattactggaattgctagaaaacgctgagtagggttatgtttagctttataacgaagtggcaagcagttctctaaaataattattaaatttcatgctcctgcagcacaaaacccttagaattttgtaagagttccagttgctcctcatggttgttaacactaggaattgtattgttgattttaagcattttagtaaactgaaatgtcatctcattgtggtttaatttgcatctctgtaatgactaatgatgttgagtaccgttttcacttgattggtgaccattcatatatctcttttaggatgtgcctattctttttctctcagatttaattgggtcatttgtgtttatattattgatttgtcaagttctttatatattttgtatataagacctatgttagatataaatactgctgatatttttttccagtctgtagcttgacttgcttattcatctttttaatgatatcttttgatgatttggcattgttaattttgatgaaattcaatataacttttttattgttagtgttttttatttaaaggtaagagcttttgtgtcctgtataagaaatattggactccttcaaagcttgaagatattctcctatatattcttaatttttcgtacaggtccatgatcttttttggcattaagtgagacaggaatcaatgtttattttttaagatacctgtttgtcacctaaattacccaatttattggcataaagttgctcaagatattctctaattgttcttatactgtctccagggtttgttgcgataatctttcttccctgatagcagtagattgtgttcttctcttttttcgtttttttctgtaagtatctcctttttcttgattagagtaactcagggtttgtcatttttcttgatcttttcaaagaaccaatttttcactttagttttctctactgtgttgtctcttttctattttgttgacctctcctcttatcttgaatattgccttattctgggtttactttactcttattctgctaacttctttctctagaatcttgagtcattatcttagacttttcttcttttagatacctctcttccccacccaacattcaatagttactcagtgaaagtccaaaatacaccatagttattacctcaccattcctgccctgctgccactcttcagccagaccactgacttactctggaaatattctctgcgtgcctcagtggaaacattcttagctcttctattctgtcctagccatcagcataccactttatgcacttggtaaatgcctttggggaaatgtttgtggctggattcatgcttgttctatagctaagcctccttgtgattctaattcatcatgcatgtcatatgtataattaaaacgttgttaaaggttaaactgatataccagatcagatatctatgaaaccagtggcttaaacatttgcattcctcagattctggttgttcaggcatttctgctctacatgatatttgttgaggtttctcacatggttgtagctgggttgggctggaagttccaagatggcgtctctcctatttctggggccttcatattcttctccatgtgactgctatattcacatggtgtttcatcttccagagcgcctccatatgacctctcagtctagtagtataacctcaatttccttatatcatggcaactgaagtcctgtagggagtgttccaaaaagataagccctaatttaaaagtgcttttcaaggctccacttatataacacttctaactttgcctggaccaaagttcaaggaacttcctagcctaggaaagttggttcatagtgagccaccatagtaattttttcgttatttcttgaggtctaccgtgtatttctcctcttcctgtcactcagcaaggtatgaaagtaactacagatatagttgctcctagaacgaggtatttgttttctatttagtcctttttagttgtttttttaatatcttcagctatctgataagttaaaaataaaaaagaaatctacagtcttttagcttatctattgttcttagtattaggataggaacaaaaatttatggcaacgttttgcatcccagcggtaagtggaaccaatgtcactacttatatttcatactttctcacctatacttaatacttcagggcccataacttttccctttaagtagatgatttcatttactggtggcacagaggaagtagaaaccaaaagaggagattttatctcaacttcctgtcaccaaatcgacaaatgcagtaatataacctaatattaataaactaataaaacatattttttaccacaggattttaaaaaataatccatctggaagtctcctctttcaagtcccactttatatgtgttattgccacttcttttctcaacttctgtctaaatgtcccttgttctggatagtctctggctgtttcaacctgtgctaggtagcatttttggtactcctatttcactcagtgctttctccatcatagacttcattactgtacattgtacatcactgtaatctgtctgtaaagatggctgctgtctgtaaccatctcaccttatatctggcatacacacacatactacaccatgatctccaggaggtagaaatcatgtctctttacctcagttctatccctagcacaaagaatagtaccctatactcagtgtttacgtagtaaaatgtgttaaatgaatgactgtgtgagtaacatatctcatctgatcctgtcacaccagcatattgcaaagccctgggtggcagatattagccaagtgatggagtactaagatgccaaagttatgaatgcaaagctacatatgcagtagtaggtaagaaggcatttagtaacttagtggatttctttgtataattaataactttaaaagaataactctaggggaagagtgaaagggggagtatacttccctaggaagaatttcatctcaaaatgggataaaattattcaaatatccgtgtagggtaatttctattcccccattaaggaatattactaatggaaatggatgtgagaatggtatcacatttggaaaagggctgaaaaccattgatttaaaaaatggattcctaaatgtttattgcttttatatattcacctttatgtgcttagagtttagctaactggaaatgcttttcctatatgctgaaccaaagcagcaatttagtgagtagcattctaacatcctaaaagagtttaatgcagtttccacaaatggacaacactcccagttaatggcagtgagcactttgggagaacttattttacttgtatattttatccatcacttttaaaatgcagtacattgctaatacagttaactggatgaacacttttagttaaagacagcgtgtttctaaaggccacacatagttaatgtgaaggaataatcaaagcctaactaggactctaagaagaattattttatcagaatattttagagttggacccccaaagatcagctcatgacttatgagaaatgtaaggtccaggtaagttaagtcttgcttgtccaagagacaaaagtcattttcaacagaagcctcccatattatcacgatgtctttccttttttcaactcccacctaccccctttcattccctatgctcaagtgacagaagctttcctactgattcaacattctaagtttattcccacttaagggcctaggtacctgccactgattcttcagtgtgcatcccatctgcatatcttataattgactccttttcatttaggtctcaaaaaatatgtccccagtgagcaccctgttttaagtaactccttctttacccattgctattattttattacatcaccctgtactgttttcttcatagtacttatgtgaaattatcttgtgcagaactctcttttttaatttttgtctggcatacttgaacctaagctccataacaggaacatggctgtcttacttactgctctatcatcagagcctagaaaagtgtctggcactaggaagtactcagaaaataatttactaaatgattgaattacatatccatatgatatctcttatgccagtgttattatattccaaaagaaaaaattaaaccaaaacaaaagtatgaatttgaatgtaggttcagttctacttgactccttttttgaaccaaagcctttttcatagtctttcattagagcatttgttgggaagtaaaaataatttggtaactattcattgacgtatatgtatcaatatcgatttaaaaatgcatcaatatttttattcctgtctgcctgcattaattcatacatcactatgcattctgcttcttggcatttgctgattccagattctgcagtatgcagcatagcattactgagttgggtgccatatggctgcccttctttggtccaagttttgatcaatcaaaggatggcagactgactcatgccattttaaagacgacagagatttgatgtagagccaatccactaaaatactttttgaagaaaaatgtgttctaagggaggaacataagctctactaaatatatacatatatatgtaaaacactttttatgcttaatggttgtctcggagacaaattgccagaaacttgtttttatccctaaagggaaatactcctttgaaaattttaactggtgctgtgcttgtgtgtgtgactaaaattattttttatcaacagtagtgagggtttttatcccctgaagtaagaaagtctattctttcactgctagcaatctaaagaaaaacacaatgtttcagtttagtgatttgaaacaccactgcgaaatatgaggaaatactttgaaagatgctctgatttgatctagtggtatagaaagtgtaccaagaagtctggcctacaccctttgtctgactccagtccagattctgtttagtttgttactaatagtttatcccactcccaaaagtagtaggggagattgtaaaaatatgcatagtaacacagaacgaatgaggataaggatacaaaggtacagagaaagaaaaatattaaaaccaatctaagtataaatttaaatatgaaaaaaattaataagctcattaaaatgtaaatgaatttggccctgagattattagtgactgaacacaaagggtaaaagcttagttatataatgggtggtatctgtgagatacaaagtttttaatatcagttacttttaagctgcagaattatttttaacagtgaggtttgtgagaaacatctgtcttagggcttcataaagctattaggtgatatctaaacaacacccttagccatatctttacagtaaattcactgggaattctattgaactatgccttagtctaagaacaggcacccaaataaagttctcaaaaacagattctaagatgtgtgatagatttgtatttgaaatttgttttgctgaattgtcctgaactggttttaagagcaaaattagactatggactaagtctttttcaggaactccacgataagaaaatgtgctgttgaatgtgccataacatttaaaaagaaaagtatgatgatgtcactgtgttgatgttacccataattctccactttaaaattatagcaactggactaacgacatggatgcacattcatattccaactccactacttaaaagatgtatgactgtacagaagttcgttaaaacttcgtttttttctataaaaataaaaaaaatgaaaagaatcttatttatatcatacaccttggtaggaatttcatgaaatagcacaggtaagaaccctccaccttcttactcatagtagctggcacatagcaggtactcagttattgatgcatcatgtcccctttactgccttatatgctgtgtgtgagtagcattcctggaaaagcagtggtattgagaggaaggactttcagcaacatgagtcattaggtaaaacttttgttgaaccataggtactgcaattagtagatgaaaaaggctgatacgtacttagctgttcctggaccatctatactctacactacactaccctttccactcacttccataactgtcgttgaaaaggatatgccaaacttttctcttgcgacaagaaagttttaattgaaaacgagtgctgggctgaatacagcttcagcagattcccagttaaatgagaaggggcttttcgtttaagtcttagtgttgatatgtcactgtgctctgtcactttgaaaagcgatagtgctttgttatcagcactgagccctggcaggcttctgatgtaggcttagactaaaatagaatgccaaaatgatgacggcgctgcttaccttcaaaagctttcaggctgtggacgtgggcaaaggtgctgacatattgctctgtccagcccagtgagtttgataatctaccaatcattttcacatttcagatcgtaatttgaaatcttaaacgggttgattggttttcaacagatgcatggatattactgattccattagattcatgccatccaaatgctgtttcttaggcaaataattaataattaattcctgtcctttaatatgcaaattctattttaaatgtttttaaagaaagaatcttacaacttgaagagtcatagaggagcctgacctgccagtaagcatacccatttttgagtccacattgtttgtgtgctaatctttagccaagcactgaggtacgggccgggaatggaaacacaaataagattccctgtccttaagcagagagatacatacaaaaatatgtagttataaaataatgcagcaagtgaaatagtatgcatagaatcttactgaagcacaaaaagcaattatcttgatatgtcttaggaagacagtaacagaaatagtaacagtaacagatactgttatatctaaccagtatccttgtccctgattaccagatcagcaaattctatgtatggctgaatatttatgttgatatgacattacctttcttggttaggaacaagatttctcttaggagtagttaaacaagcatattcaaatagcgaatcttatagcaaaagtgaaaatgtttttgaggaattggcattaccatttctcctaacctgtacctccttctcctgtgtgtacacacacacccctcccccacacacaatttaactctttatacactgaagtggtccagcctttctgttcttaatgacatagaaaggaaatcccttctgaaaatgtttttctgtaacacttccaggccctttaacgtgagctcacatttctgctcagcttgtttctccacattaaactctaatggatgtaataagtatatgggtaaatagagtttaaaactatatacattgtgaaagaaaaaaaatattttcaccacattggctgcttttaaaaaaataaatctgtttttaatgtatgtgtacattgttttcaaagctccctcccctctgggatagagttttggtgacacagcagtgctgttctgagcttaagtcactggacatttgttttttcacactatcaaacaccaaactaacattcaaattgaagatggtaataggttcacaacctttcaatgaagttcatgtgttatgctgtcttttcagagcacttgatcaagtttaacacttttggatcgtttaaaacttgattttctctaatctgtagcctctgaaatattaaacttctacctaaaagcaaataaagctagaatcgtttacatcttcagtcaaagttttcaaaaatgaatcagtatgtgtttgagtctcgtctctctgggggaacaaatccacagagtaaattactcctgagacgggcagaagttcacgaggcagagtgtgtcagtccagaggctgcaggtgtgcaaattagccactcaaaggaaaagaaaagcaaatctacttttccatatttaaagatgctgccacttatatcttgcattttatttggacatttcgctgtctacatttagtctgtaaaattcataacggtgggaacttgttcctcatctttacagttgtattgcagtcccgggactgcacagtaagcacacagcagatacgcactgaataaataaatagctgtctttagcagctgtgagtaaaatggaagctagagttgtagtcacactttaaagacaattacatggtatatgatagaggcaaaagtaaaaataagaaggacatagataactaaaagtggtcctgcatgactatgtacaatgattccagggaggtttccacttttctctaccctatttatgaactggcattaggctagtaatagatattacattttttccctttactcagtgaactttaaaaagcgttattcctgggcaaagcttagttagtaaataaaacgtggtgtcttacaatgttatttagaacctgaagttaaaatggagcacttgtttctaactggtgtataattttaaaaaatttatgtattatgtcagtattaaccattgtataaaactgtcatcccctttgtcaataaatatcacctcatgtctcttagcatcctatttcccaattgtgcttttaggcacttgaatgtaagggcgtgagagattttacctctctaaacaaagccaaatgagaaatgctgccatggaggtaattgaggatgactaattttgaagaataaagaacatgtgactactgtgtcctcattctttcaatattgtataaataatactcttaaaatgtcaaacagatcataagaatatctataatatttctcatcatattttatagagaaacattaacaagttatagctgtcagaatgatcttccttactagacaaaacaacgaatatagcaacacgatgtatgagaggatgagcaacttataagagcactctcttttgcccctatttttaaatatcctgctggcttaagctatggttttattgctagtgtgtgtgagtatgtttgtgtgtctttgtgtgcctatgccactgtttatttagcaattttaacatattttttaaatgagcttgacacatcatataattattatgaattgaattacatcttaagtaaggatacagtaaaaaggagataaatatggaaaagtatattttaaattttttcaacatacagtaagaaaaatactctgaatttgtttgccttcttccttctattccactctcttgtcccacagaaaaacatgcacgtatacatcattattaagacaaatatcctttgctcaatggtcttcatgaatttatattattagtgactgagagatcatcattaatattaaggtggatttataagaacaaataagtgaaaattagatacaacaaattattatatgaaattaagtgttatttgaagcataccatttttgtaaaatctgaaggtcatttcaaatattgtttttattcaagggaaacacagctctgaataatgcatttgaaaaatagaaaaattacagaaaaaatttaaaacagcctgaaaagaaaatacccaaaagaaaacaaaaataaaacccagagcatcaaaattaaacagataatgccatggtgcaataagaggtaatcaaatcatttctttgatctttctgagcaaaagctaatatcaatgtggcagtaatgaatgcattttggccggcatattgtttgacaatgaaaagaaaaattcagctagagacctacctgaaagtcatcactggaaccattaagaaatctatacattgtatgctcattcactcaccaataatcatttataaattgccagcaggtttgatatctatggactgtttgggctaaagaaatgaagaaaacatatgccctccttaaggagccctcacactatcaagagaaagaaatatataaacaagtaatagcactgctatctatatgcaaaatgctataagctgctcacttattatatacacatgccagagtttgtatccataaaaaagccaaggatgttgagcatctctgtaaacttcttctgcactgtcttcactgaattcttcactattatttgatggctattaaacaactgaaggaatgaatgtggtaaaaccaaaatttttaaatagtccacaatggccattttaagagaggtttcagtagttcataagcaaccagtcatataaactgtgccatgttattatgaagataatttgacagttgtaagtacttttttcaatgattgctccaagggtgctaatgtgtacttctgggatggaagactgggatgcaagattgaaatggaagccttcctgaaataaatcactaatcatccatctgttatgggtttcaaactcttagcctgcaaaatgatctgaatcacaaaatccattctctcccatgtcatgggaagcagcagcacagactcaaagatgcaatgaattggaaagccttttcatgtagctttcctgaattctcaaagaaatctgatgtgtcagtctcagaagaatcttttgaccactgttacatctgtgcttccagctgggtggggacctaaccaaagcttgattccatgttgaaagccagcctgcagaaagtccagttccaaatttcagagaggattgggcaggacgccagtttgggtcttggtttggtaaggtcagattgctagaatttacttctaggctctgaaacaatccagctttcatttgtcccagactttatgtttttgttaatttggtaactgaatgttttaagtgtacagtttctaccctcatataaatctctgcagattttatccaccacacagaccttctctctcaagtccatacaaataagagttctttacccatcctcactctgagtcacattcaccttgtgtttcttcctagctctcctgcatatggtttatattcatttagattttaatttttttaaggtcgagaaccatatatgagacttgtccttatttatgctcatatttttaccatttaatatggaatctgtcatatggtggttgcttattagcactaataatattggtaaaacattttaatgttaacaagttttttctaaatatatatataatatatgtgtgtatatatcagtaatagatttatatcaaggcattaatatctacatgtatctatacttacaatcttctgtaacctcatcagccatactatcaatacaacaaagaacacatcttatttaaaaagaactgttctcagtaagttaaatatagaattatatcacccagcaatcctgctcccaagagaattaaaaataggtgttcaaacaaaaccttgagcacaaatattcattgcagcactattttcaataccccaaagctagaaacaacccaaatgcctatcacccactgaattgataaacaaaatataacataatctgtgcgaggagtactattcagccataaaaacaatgagataccgatacatgctagaacacggatgcaccatgtaatcattacaataattctgtaagatttttgccaccccaacaaaattctttcaaacattgccccaacaaaattctttcgaacattgcaagaaaatcacactgaatcatatcatgagctgccagtatcttgtgtctcacattcaaacaaaatcacttatacacaagagtaataatcacttatccaattactaataggtacttattatatgccacatattctctcagccctcaatttccttgtccatgtcatttctgagagctgaaatgacactatctttgtaactcatccatgttgtcatatgaacccgtaagtaaggcagtcctttttagtgctgagtagcattctacagaatggatatatcatatttctcatttagttaaaattgatatgtaatttacatatttacacattttgggggtacatatgaggatttgttgcagcatagaatgcataaggatgaagtcaaggcatttggggtgtacatcactttgaacatttatcatttctgtgtgttgggaacagttcaaattctagttattttgaaatatacaaaatatcattgcttagtatagttagcttactctactatcagacattaaaacttacaaattctatctaactgtatgtttgtactcattcaccaacccctcctcatcatccacctcccacccatattcttccctggcctctggtatccatcattgcatgttctctacctccctgagatcagcatttttagccctgacatatgagtgaaaatatgcagtatctgtgtttctgtgcctggattatttcacttaatatcacctctgttccatccatgttgctgcaaatgacattatttcattcattttttacatcataatagtatttcattgtgtgtcattgtgtgtgacacacaacattttctttatccattcatccattgatggacatttagtcaattctgtatctttgctattgtgaatagtgctgcaataaacatgggatgcagagtctctgaaagttaagtcaattcagcagtgaagcaatgtggtcctgggcttttctttgtttggagacttcttattactgattcaatgtcattacttgttattggtctgttctggttttctatttcttcctgattcaatcttggtaggttgtatgtgtccaggaatttatccatttcctctatgtgttccaatttcttagtgtatagttgctcataaaagtctttgatattcttttgtatttctgcaatatcattgtaatgtctcctttttcatttctgattttgtttatttgggtcttcactcttctgtctggaaagtgtttcattgattttattgttttcagagaccaactttgtgtttcattgatcctttgtattattttttagtcactatttcatttagctctgctatgatctttatcatttctttccttctgccaattttgagtttggtttgttcttgcatttctagtttcttgaaatgcatcattagattatttgaaatctgtatatttgtttgatgtaggtacttactgctataaactctcctcttagcactgcttttgctatttcccataggtcttggtatgttgtgttttaattttcatttgtcaaactttatgtccagatgttgctattatttatacagctgcataaatactcaaatattttgtgtaaatgtatttatatagagtgtaaatatatttaaatatatatatatagtgtgtgtaaatatatttatgtattgtttgcatgtaaatatatttatatatatattcattgggtaaatacctagagaggaattgttggattatatgacagtgcatgtttaactttaaaataatctaattggttttcaaagtgactggcattttttttcctttccaccagcaatgagtgagagttgctgtttatcttcagtaaaatctggtactataacagaagttaattttagctgttttaatgagtatgtagtcctatcttactgtgattttctgtggttttgttttgcatttctccaatgactaatgatgttgatcatcttttcatgtgtttattttccattcatataacttcattagtgaaattaatgactttaaaaacatgtttagttaagtttcttgggtttacattgagttataagatcctgtatactagtgctatgtcctttattacatacatgtattacaaatatttcacccagccttagtttggcttgccttttattttgttactagtctttcaaagactgactttttttttttaatgaatccatttattattttttttttttgtttggagtttttagatttcaatctaagaaactggtaaattcggtgggcgtggtggctcacgcctgtaattccagcactttgggaggccaaggcgggcggatcacgaggtcaggagttcgagaccagtctggctaacatggtgaaaccccatctctatcaaagatacaaaaaattagctaggcgtggtggcatgcacctgtaatcccagatactctggaggctgaggctgagcttgaacccaggaggcagaggttgcagtgaaccaagatcacaccattgcactccagcctgggcaacagggtgagactctgcctcaaaaaaaaaaaaaaaaaagaaacaaacaaagaaagaaactggtaaattcaaggacacatatttttctcctatattttattgtataaattttatattttcaatgggaaaaaattcttgaatgatggattttttttttcccacagtactataaagatgtctttccattgtcttctggtttgaatagtttctggtgagaagcctcctttctttctttttatctgcatgcaatatttcctttttcttcatctacctcaatattttctctttgtcactgaccttcagtagttccattacaatacttcttggagtgatttctttatttttattttctcgtggttctttttatcctttgttctgtaggtttatagttttcagcaacttgggaaaattctcgcaatatgtcttcaagtattttgttctctacttttgccatccctttcctgggaactcaatgacataaattgatgttatttacattgttatcaatctttttttttaaagctttctcagttcctgacaatcctttagaccaagctaatttagcttccaaactaaagaaatattcttctgaaggtgctagatgatgtcggtcctatgtattatggggcctttctactgtcacaggtagaaacatgaattattcccagccctctgacagttccaggaatatttttacttgcttctttcttttggttgtttccctgatctctggtagttttctctcatgaatacacagacaattgctcagtgaaaggcttggtagagtcccttgaagatctacagaattatctctctctgcagcttactcctctctcttactctgccctgtaaaatctagtttccttcactctccacagtttgatttctgtttcctcaatttcacaagatggctggattgtctccctttgcttgcctagaaatgccctataggcaattatttggtataattgaatggctcttttgttttaattctttttgggatcatagtcctacactacttgttatccaatgcctgaaaagcgttatttcatatctggactatgttgcttaaggcagaagagtctttgttattacattctagccagaagttttctgatctaacatgctgagtttacggagttggtagaatatctagcaacaagtctaaaaggacaaacacagtactcaaagagagacatattttatataaaatttcccaattacttctgtaactatagtaattgaaggtagataaataaactccttattgggaaagagaacatataaaaaagaaataaaaatgactaaggatagatgcttgaagagttattatacataagagaagcaagattttaaatagtagagaatcatgctggacaaaaactgaaacaattctaagaaatttggagtcatcctgataattgattagaaaataatgcaagaagtttgtcctgattttcccctaaaaaatctagcaaatttttgattacaattttttaaaacatatattattttctgatgaagagacagttagtaccaaacatttgttcttactgacaagatagtgacatggtgccacaacaagtgcccacgcttcacatggtgtctaggcaggagggagcattttaaacttcttatttctgactgtcattaagttctgaataacaaaatacaccttgctttaggcacagtaatttgacataggtttcacaacagacacttataggtgatactaccatagtgtagtgtaagagtcaattgatttaagattagaaaacattcaagatagtaatctatattcctttcataaaagtaaactcaaaactttgaatagtaatttcatttgttcaatacagacactcacatccatatataaaatgattgaatttgatacaaattaaatcagctctcaagccataaagagttttaacagactcattaaatattatattttacttggcaaggtaaaaataataaggagatgttaaactgaagacctttgaccttatacatcttgaaatacctccttgactccaacttttattgacagttcactgggttaaaataagcaattttataataaaaataaaatgaacatctgaattatagtgaaaactacaggtatataaagcattataagttaaactgccaagctttaggtgaccagaaatcagaactcatcatgttaattattctgataatattgactatttaaactcatttggaaattccacaaagattgtgaaatgctctaaataattaattatatctttcttagaagcatatttcagataaaagtacattccaaagatataaggatcccatcatcagatctttactaatttaatgtggcattaaagttatgtccaattacaggacaaatttgcttacacatttctgataactttctatcattcctcaagattagatggactatagtaaagcatctgcataaaaactctagtctgtatttttaaatatcttacatagactcgtagtaattttatttatgaagcgaatataaaatatttatttttaaaattacataatgccatggtgcaacccctttggaaagcactttggccttaatatacgtaacatgtgggtaggcataccctatgacctagcctagataagtgccctagagaaaatcatgtccatgcccacccaagtacgtgtatgtaaatagtcataaaagcaccattaatagtttgaaaagctcaaatgctcatcatcagtaggctgcatacattaattgtggtttttgccattacaatatcagagtatagaacaataaaaatagtttatgacacactcaacataactgtagtttacaaatgtaagttgggctaaagaagcaaggcttaaaaatatgtataatgtatttttttttaaggttcaaaaccaggcaaatctaaacttcatcctttggtatgcgtatctacctgaagaggaaaagtgaattattactatactacttaagatgctattctcacagggtgaagagaaacaatgatggtttgaaaggaacatatgaggatttctagagtgaggcaatgttttttatgttgacttaggtgatgcttacatggatgaatacctatttgtaaagcagtcaagttgtgtttgacacatgtgtccctgtttgtacaaaaaaaaaaaagtttacaaaggtataaaatttaagaaatatgaatacctactaatattaggtatataaaaggttttcaaactcttttatacatatttctagatatttgactttctctgccttatttttattatttactatagaaatataaagtatttctttttagattcctgaacagattaacctatgatttaatcacttgtatttgaaaaaaaaaattatttaacaaacacagctccattaacttccccataagttgctttcatctcttagtattattaataatttattcctctcaatagagaaaaacacaaatttttctttatggggcattccatttaatttgtgaaacatccctctaactcatggaagctgtatttttttaatttactttttttaaaagttttactttatgtaaaaggaacatcgattgcagtatactgaagattagcaatatacaataagcgttaatcatccttggttgaaatataatggtctgggatgggattcttgtatgttttgtgattagtggcaagaatatagtctacagagagaaaaagggcagaaatccaggactatgaaatgtcaaagaggaccagatacccagatcttccaaaagacaacatgatgtttgtgcatgatattcagtttctataaaaactcctgttacccgaccgggcggtggctcacgcctgtaatcccagcactttgggatgctgaggcgggtggatcatgaggtcaagagatcgagaccatcctggctaacatggtgaaacggtgtctctactaaaaatacaaaaaattagccgggcgtggtggcgggcgcctgtagtccccgctactcgggaggctgaggcaggagaatggcgtgaacctggaaggcggagcttgcagtgagccgagattgcgccactgtactccagcctgggcaacagagcgagactccgtctcaacaaacaaacaaacaaacaaacaagcaagcaaacaaaactcctatcacccaaaatcaatccaaaattagtaaattattcggagatttcaagttctatgcacagcctgcataaaatttagtcaatgtaaaatcgaaaagcattaaaatctctggaaaatatcaaagataatacagtcaggatcaataaagacaaaatgactatacgttaaggatagaataattgttctcatagatctgagaccaatatggtgtttggtttctaggaatcttgaggaacaatatgaaataataaagaaaatctggcaaaaggaaagtaagctttcttgttgagctcagatcatttctaacaaatgttgagtaccctatgggacttttctacagtttaaatgatagagtacacgaacgtacggattagaaaatttgcattattagtattaagcaataaatctttaggaattaaggagaatatttaaataagcaaaatagaatttgagaactaaatggtgaaaggtagaacctagacatatttgttagagtgttgtgatttttgagactgaagcaaaagaaagagagagactggagagggaggaaggaagggaaagaggaaaggaggaaagaaacaaactgttggtaagcagaagccctaatacagctttcagacacagctgtacccaagggctcccatactcacctccagaaattgtctctctctgtctctcaggggtactttccctttgctggctctgttttcaagctgggtctttcctcttggtaacatacagtacaccttccccagcctagaaacccacagttcaaaatataacttgattctgttttgcattcactgccctgggcgaatttgtccatccatgaatgattgatggctgtggctgagggaattcaatgctgtggtgggcccatcttaggtcacctgctcgctcctgaagtcagcccgtcggaagcacatggactgagggttggggaggagtattacaaaagaaaggacacggggtaatgggccggcaaaagtagctaatgccaattccttctgagaaatatgaagatttgaggaataagctgagaagtaaaatagagagaaaagcagagtaggagtcagagagatgtaaaccaggaccacatgctgtctcagaggttgaagatagttttaaggaaggagcggtcaagagtgtcaagtgcctcaagtaaatgagtcgaactgaaaacagcccttcatagtttgctttggaaagtcaaggactttaacaagggcagtttcagtgaaagcagaagccagacttctgtgaggaagggaagacatcttaggaattatagataagcaaagagatagatagaacaggagttagataaatatgttgtgtcaagggaagattaaacacactataatccaatatttatttatttatttattactaaaatgccctcagcaaatttcattcagtttatgaaatgaatctttttgaataaattaaacccaatatctcccctccaatatacaggagacctacatatttagcaaatgtgatttttcatatgtagtggtaactgctttttccaatagtgtacaggaagatatcagtcaagggatagtaaagaaaatttaccagtaattaaatataatctttgcctaaagtaccaattatccacaaatttattgttctatgacaatatattgttctccaagaaataaaaaagcatttttttaaaaattataaaacttaaaattcattatgtttctggactttgcctattttattttttcagttgtaggaaagcatttgtatgtttttaacaacataaataaattatgattaagttaggtcactttttaaaaatagtgaatattagtgttgttttctgctatatacatggcctcctccatagatagatggtcggacccttaggcttttccaccttccctgtcaaatcttctgtgcaaagcagctgtgttttcaggttgtaaatgtcaggcaacttgctacttagccagagggaggtggcacagctggagaaatccctcaattcataattccttttatgctgctcactctagttgtttccaaaatctaaagagccttaagtttcagaattcaaaactctcaactgattacctctttattttgattttaagtaatttactctccagtaaaagcctttttaaaaatttattttttcttttttattatgattagagaaaagagtgcaggaaattacaccaacagagagcatggtttttcccttggcttttttctttcttgtttctcaggtactgggatagaatccagattcttttgtttttctaagacctactctgcagaatctattattattgaaaggtaatttaaagctttttgggggttgtctgtcaacacatcagtagtgtcctttcaagtttttactatagctgaacttacttgttttcgttctatctggttaaatgggttatgttttcattatgtccagatagttccctttagaaatctttcagagttccctctacaacatatgtgcccttccatctactatgggctttagctagaaatgaaactttacctttaggtaatttgtatactagtcaaacagcaaactaataaatacatgaaatgaaataacaaggatctaaattaaaggttgtcaactttattctgaatatgcaaaattatagactgatttaagcttttttttttttttttttttttgagatggagatttgctcttgttgctcaggctggagtgcaatggcacaatctcagctcaccacaacctccgcctcccagtttcaagcgattctcctgcctcagcctcccgagtagctggcattacaggcgtatgccaccacaccaggctaattttgtatttttagtaaacacagggtttctccacgttggtcaggctcgtctcaaactcctgacttcaggtgatccacctgcctctgcctcccaaagtgccaggattacaggcgtgagccactgcacctggccagaacagaccattttttttctgtagtatttataagcccccaaagaacactaaacaggtccattatagttgcagtgcaattagtaccacagaatagcaatgtctcagcatccttagaaatgatcataatatatatttactttgttaaccttttccttttttagtagaacttcatttttctgaccatacatgtgtatgtcatttacgaggcatagggctttaatttcctaaaggaaatctctttttcatttgccacttagagcgcctcccctgttcaggaaaacagtgatttcatgtatgcagagttacttgcttttagagaaagtgcattcctaggaagcactacttcccaatgcattcttggaaagaacagtaaggtttcttccagtttcaagatgcagatgatatacctgggaaatgctgaagtaataatctgccaggtttttttccctttgtctttttagagtccttatgattgggagttgactagcaagtagctgaatgtgggtgacaaatggattgtaagtgtttactaagtagcagaggtggaatgtcaagtaagaagtagggactgaaacatcctggaatgcagaccacgaaattgagagctaagaggaaaaagtatcacgcagacctagtcatccatttctgctgtagcgactttgttcagtacacacatggggtcaggggtgagggatcaaacaccacctgaatcagtaacacctctcaagcagccagagaacaggtttgggctctttagttcttaaatagttatggagaggttctaaatctcccaaacaaaagattaggggctttgattacattttaattaaagattctttaaatttagtgtgcataaaaatcatctgtgatttcagtaccccatctgatgcaggtgtgagctacaaatctacaatttttacaagcctcccagatgattctggtgcagttggtctggaactaagaaaaactggctgaaggatttaaagatttgcttcttcaggtcatagactgcttgctgcctgctgagatttgtttaaatagtgctaaacccttgattctacgactcgtagactgctttaatgaaatcccacagttctgtaacccatgctgacattgaaaattttattggcattcaattaaaatgagagaagttgagaagttgtttgcttataaaaggtttctccagctgccaattactttcaagatagaccatgccaaaaatggaaaataatttatatctcgataactgtttgttgaccatattccttcaaaattagtctgcgcctttgaaagttattgtgaagcaagcaaacgagcataaaatgttaaacagctgagtagaaaaaagacactgtatttcttccagttatgagaacacacaaatgcatgggaatgtgtaaattaaatgctccgtctccctcagtttaatggagatgtattttccatatgttattaactgttcatgtactatacttgagcaggtttgaatacaaagataattctgtcatagtattcatgcatgttctaaaattcattcccagatattattaattttcttatatatatataacttaatatatatatataacttaatatatatatatatataacttttaggagtctatttttacatttaaatacaaaaaaattatgtgctctggggcagagaacattatattaaaaataaatgtaaagcattacatttcaacagaaaccctgtcataaaatagattgaggtgagaacacttttacttcattgtcatctcttgtacgagtaggtacaaaaactaaacacttgaaaaaagttccaatatttgaactaccaatgttttgaagtaccaactttattctaaagaaagtctacatacataggcctattttcaggctctgtacttttccattattttatttgtctatcattgcaccaataccacactgtcttcatgacagtaactttataagatgtgatcatcagtggagcaaggcttttccagccctttctgtttcctcataaattatgggatcaacttgttcggttttatatgataacttttcaggatttttatggattttgttgaatgtatagaacaatttgagatgaatcaacattttgataatattgagtctttcaattgatgaaccatcttgtatatctccatttattatatgttctttcattcctgtcaatatgtgttttatagttatatttgtagttattttgcataccttttgttatgcttattctttagtttggtattttggtttgtgttctaggagttgatttatttcatccaactttttgaatacagttgttcatacgatccttttgtattctttttaatgtctgtagtctcaaaagctatgttcttcttttattcctggtatcaattatatatgcctttattcttttccttttctttgattaggctttcaggattttcttagttgtattagtcatttctaagaatcaacctgtaactgttgattctttctctctctggttttttttgtttcatttatttctgttcttattttcattgtctttcttctactttgtatagtttattacactgatttttttttcctgtttttatatggccactgaggccattgattttcagcctttgttttttcctaggtatgcattaaagtctcaaaatagccaatgaacataatttaactgtatttcactatttagatgggtaatgtttcagtatcatatatttcaaaatatttatacattttcattgtgatttattctttaagttatgggttatatagaagtattttaatttgcaaacacatggagattaattgtttttggtctatttatatctagattaacatactgtaattatattttatttcaattctttaaaattttttgagaaataactaatggtccacatacagaaagaacaatgccctcattatagaagaatacatattcatattaagtatggagaagagagagcaaattaatcaagggagggacatatattataaaaatcttttagccgtcatataaaagcagagagatgtgataggaagctacctgcctcctaggtgaatctttcttacttgtttttcttatgcttttcttctgtcttagaattctactgtgctgccttgtccattctgttaaactggcatgcattacattaaaactctttcacacaattctgtcatatttaatttaaagtggagaactatgtctttcctgaggaaaatatttaatgccctttcgggtcccaggtttttgctattcctccatgttagaggcaggagaatcagtgctgcaatattttctacatttaactacattgccagaatatcaatttctgcattgacctaccctattatgccttccttcttagatttgtattaaagttgctttgtgatttcattatgcattttgttatatgactgaaattttaaagcacctatctcctacacatctacatctatacattatatccacctaacaaattttgacaatgctactatattttcactagtgtgagtagaatcttcccgtagcctaaaaaagaattttctatattaggaagaaacacttcactcatcatgttaaggataaagtttatgcttgttaacattacataagaagactcatggtctgctttgtctctaacttatactttatgattcaacatcacagaaagttgatcctgaatttaccacctaatttgcttctaaaagttaaaaatcccaaattaagtgttttagggagaactttaacattttatgagcagagtcattacttgaagtttccttcctacttcacaactataaaagtatcaatgtttatcaaaaattagaaagtaaatatagagaaatatagttattaatgcattgagtataaaagtaatactttacagaaacccaaaaattaataattttaacttttaaagtatatttctgcatatacaacacaggttaagattattacaattgtttcaaggaatttgaattagaagtttcttttctaagtaaatctttctataacttgtgtaagcattgtctattcaccccaggtggtttgaattattttcaaaattagggtcatatgtgttaaaatttgtaattaccaattaatatgcaccatttttttctggaaatttttacataataaattccaagagaaaaagaaataatgatgtttttcaatgaccccttgctttttaatttcaatatgacctcatttgttatactttgtaaattggattctaatgtttcactgggaatctcaagccacatgccagtgtttctaatactctaagtggtttttttcactgctgttggtgtaggaagaaacattaactgtttatttattagtgcagaggataagaaagctggaggtgtgaaagtgaacagttgtgttataggggccatctttaattaactctagcttttcctcgtctcagtgtttttgcctaggctctttgttctgcttagtatatctatgtcacattacctcatctttacagaaacaaagtctatccccttactaaaatttcaaattagtcatcactatttccagggcgtctccctaccccatacaaactgaattatatgctaatcatattttattgtctcttgtttctaactatgcagtgagttgggtagtggatacacagagagtctccttaggaacattttcccttcacctggcacagtgcctcacaagttatgagaataaataaatgaatgtttaaatgttgcataatttagcataaattaatgtttttaaaattagtgttaatatctctaattattgaactaacatttagtttctgtctcctcatttgatatggtttcatttcactgcaactaatttcaagttacagcatttattatgtttatatcatttgttttcttattcatttttgggccatcacctaaatttatagtgattgggtagcttgttgcttcttgattttgtttgagtccataaatatgtttaatttttagtgtagataaaatggactgaagtaatttaacttccagaagcctaaaataagatattgtggtggctcacacctgtaatcccagcactttgggaggctgaggagggcagatcatgaggtcaagagattgagaccaccttggccaacatagcgaagccccgtctttactaaaaatacaaaaattaactgggtgtggtggcccacgcctgtagtcccagctactgaggagtctgaggcaggaaaatcgcttgcaccctggaggtggaggttgcagttagcttagttagtgccattgcactccagcctggcaacagagcaagaatccatctcaaataaataaataaataaaataaaataaaataaaataaatatatatgtatatatattttattttttgaaacaagtttatggttttataaatgatattcctcatgaagttggcttccattagagaatttaagaatcttttatgtaaggtgttcatcttttctcgatcaagttcacacaacgtagaggctgtcataactgtctgtctttttagagttatggataattttctcacaagacaacaaaagctgaatggtgtcactgctcccattacaatatgttcttttagcttaagtaaatatggatgggagttaaaatagatttagatggactgtagaattaactttccttttgtttatattttggtactcttttttcctttggtataaacaaaataagatccagtggtacaagaagacagagaggaaaaatcaattttaattttcaaagattagagttagagtatactcaaaattatcccaagaacttgaaggttaagcaaaaagcttgaatgttgagcaacagttgaatgcttgcatatgggtacaaataaattagttccaattgcagcattcacataataatctgaaatttggtcttccaaatgtgaaatctaatctcataaatattctcatgtcagttagctgggggcaatattcaatttccttataatacaattctctttaaagtaattcttttttattgcttaattaccatacaaagaacattataacaaaaataaagaatctacagaaaggaaaaaagtcacctttatctcaccatacttaagaacatcaaactttttttcatgttttctagcagtctttattaaatatttgcaaatctgtgtaataattattaacatatagatataattttatttaatatatggttttcaaaatttataattaccttacatatttcttcatgtttttccatatcttgtaatcataattgttgagaatacataatttaattcattttgcaaccacctcgagaaaagaacaatttttccatctccaccattctctcttatatgtagtgatacatagaaaaactttctgtatacagattatcttttcttcctcataattcattttaaagtagttgatggatagaaatgaatctggaaatgtaaattagttatcctcattctctgcattgggaatagtgcccccttaagattaaaatcaaattgaggtttagatatatagccaggtgtttttaaaatctcatagatattcaaacttggagactccaaacaaataaaaaaacatgatattatacaaaaacagagtaggcaagcaatgattatatggtatgtgcggaggcagacactcatacaagctacaggcatagattgaagtgtttacaaaagacttctataccagcacctccaccacggtcaataacaataacccaccaagcttattaattgagacttactggaaaatcaaggattttagctccctgaatgattgagagaaaccaggttggacttttgctacccaacatataaatgtagtattaaagcagaagtcaagaaatgataaaatggttcatgacctcttgcattgatgaaggtttggcatttttaaaaaaagtcctcaaatcagcccctgattagacactttacaaataagtatttgtttaggtatgacacagagcaatttaatgagagaccaccaaagggagagaactaggcactttggagctatttccagagtaggcttattttttacggtgctgcaaaggcagttgaagcctcagagtgtacagcttccatcggtcaggaggaacagtcctcagaaaaggaagtcctcaaggaaacttaccagtaaggcactgaggaggaccttcatttttaaacttaggatgtcagttgaaaaatggaaatcgaagtaactgtttatatctcaattctccttaagaatatgatgtgacaatttcttctaaaaatggagtataaggaagttaatgggacttagcaattttaacttggacattaatcacccaagaactcctcggaaggcaggaatttctctcctgtgataaaatttagtcctctctgtctacttcctaaggaacaatgtaattacagtgtgtggaattccaagtacttgtcttttgctctagcttcatctttctgtttagtgttttacacacacagctccaaactgacagttgccaggaccactataactatccagatccctgtgtattcaggtattcctgtatgccatcaaaaaaactcagttatgattctcattattcttcaacctgatagatcctgttaaagccactcatgctggaggattcatgaagctgatgcagagccctaaccaggagggaaattttattccaggggagaaaaaattccttcctaatttaaaaattgcatgtctgtttctgtcatccaccaaaaggccaaaataaatttgggggcaacaacattttcacaatgttcaaagcacaaaaacaagggactttttgctttggggtacttagcacagattcggacttgatagaattaaggctctccaggaaagcaatttgtttaggcaacgtagatggccacagcctttctggcctgaaactggtaccagcttggctcccatcttaacagccttattcacaagacatttttactctcttctgccatcaacatttatccacgctccctttttatttgaggaagaaaatgctaataaaaaccagcaggtgatatttgattcctaataaacaagagttttgccctttcaatgactatcattgaggtcccattattctttaacttcattgtagataatattcttttatggaattttggtgctatctattggctaaacctgtttgtttacttcagttcttcatgtctgtgtttcatgaaaggtttggggaaggagaagaatattcaggaaagtgtgaatattgcacaaatgagactgagattttttatttgttttttttttgttatatatctttatcaggttattactgagtacatggagatgaaataaaatgtatataaataatttttggatctttaagaaaaagcaaaatgttaatatataaaaactacattatatatagtaagcattttaaaaaatgaaattgtctattgttaaatacacatgagtaaaaacatcccctttctctttgaaatagtttgagtatagtcaagtcataacacataggaaagtaatcaatttagcaacacatggaataaaaagaagggcaaagatattagcatgaactgtgaacatttttatcacactgtgtgagacattttagcacttacatagttttatctgtaaaagtcatcactttgttttatagttgtttgaaatcctagttgggttttatgtagagttatatcccttgaaaagactgtggccatttactgatactgtttaataggaaataaatcagacatatactatcttgttattttagtgggttagaagatgagtccctctgccagaatttatgagatcactaattacaggccagtagtagatgtgttaaccagtaacacatctagatcccaaaagaaagatttttatttgctaaaaggaagaaatgaatttatttcctaaattgttattatcattgaaagaatgcatgaaaatctgttatatttctcattagtaatgattactcgtgattattattgtgtttttttttttcatcaccatagaaggcaaaagatctggtcttgcactctaaagagaacagcatagcagcccagaaacccaagtttaagatttgccatagacatatgggtactatggagccagtcaaattatccctgtggccacagatatgttgatagttgtgtatagtccccagggttagaggaacaaaagaaactcatgtatctcctaatatttaaaattttaagaaagaatctcctgtgaatacaagatgccatgatttttattgtcattgtatacattttccaaaaagaggctcacgaaatgagaaaagatagttattaacgtttttgattggaaagcgaaattgcatttttatcactgaaatgccttacatattctctgtaagctaaaacaaatagtgtcagcttattaaaaagtaactgtcttgagtaaaagactgttactttatgtgaagataacccttctaccttttcaagggcatactttatctctttaaaaagattatatttttcttgcttagaagccttttaaaaataaccttttacccccttactcatatacccagaaaaatagaaataatcacctgctcaatcatctttgatttctgcatttattctgtcagaagaaagcttgcatactaattgaagcaatggcttttgtgttttcaatcgctaatcatgtaattacgtctttgctagacactgttgggtctctttgaataagagagatcatgagttcaacaagtccttagctgtttctcttattaaacttatagtgagatgcaatgagaggaaaaacatatctctggctccatagaaactggattgaagttacttccaaaatatgtcataatctgttcttctagatgggatttttttctgtaagtcgcatttatgacctatttcctagattatgtaccatgtgtctagtagagaaggataaataggaagaatgcaaatagcagttttaggtcttctatgaaaaatttgctcatccttaggggaaaacctaaagttgtttggaaatagtttaactttggctttttgcaaaatgtctctgagcatttgacctacattacagaaatgtctcaaataataaaagagatctttggtattgaatacaattatctaaagtataaactatggcaattttgaaagtattaatatatgtttaaagaattaataaacatttgagaaagaataaaaatataattccatatttttatgagaactcaagtcatactgaattaaagcaatgcaagagatatgatgttgatgttgctgtatttattttaatttaacgtttgacacttgtaaattttcataaaaatccttccttttgcttgatcttcaaagaatgataccaagatttttgttttttcagttaggcaaacaatatgtattataaatttctatcagcctagatatttattacatggataacaaatgattttgccatttgacagctgaaaatatggcctacagatattcacctagcatcagctatgtgcttaaagacaacagctgtattgaatctcagctaccagattcttctttcataccaaaagctttgcattgcatgttaccaatttgtcaatacctgtttagtgatcagtacgtgtactctttaccatagaggatgagggtatttataaaatgtctccatttactacatagtcataaatatttttcagaatatacagtgtgatatttttaattgaatacaacaaagtccaaccttaggaaaaaaataaacaaaaagctatctgcaaatcacacacatttcttttgaaaagcatttgccatggcctttgttcatagattctattgtacaagagctttgtttggagtggatattttgctcgacttcattaattttggcagaaatgttgctatctgtagtgtctcccagaggtcccactactttcagcctccatctttaattagaaaaattaaatggagaaaattaaaaccaagtagtgattaaactttcctttcttgctctgggatatttttgtcaattatgtaaaatgagtaaaaattttaaggcatttaaggttgttttccaaattgaaaaaatatgttttgccactattttattttattatataatgaggtggtaaatcaaggatgcatgattatgcctgaagagatcatggtgaggccgcccaaataggtgggcagagccaatggaaagaaaggaatggcaaatgtttttttctagaaaaaaaaaaaagtaattttgccttttcttaatggctggtagtaagatatttaaaagtaaaggaccaaactttttttaaagcagaagcattctttttgagactgaatattttgaaatgaaaatgaagtaccttaagtgacagatattaccagtatagtttcaagtattaaagcaactaactatccctcttaatttaaatatttccttattaagaaatctatgtttcgtaaatcacaatttaattcaacatgcatttaatgattgcctaatatatgctgggaagtttgctcattgctgataaaaactaaaagaataagacatcctgtttttaaaagtttatagtgtgtcttacagaatgcagttaaaaaaaagagatactattctaagtagttccaaaaaagaaaaaaaaatgactttaatgtaggatcatgtttaaaatacaaaagctgggaagccaaataagtgttgatgaggccaccttgatttgtgaaaaacagaaagctactccacccatatggaaccaatgtgaagaagttcccagtaggaagtagggccatacacaggtaaaggtgatcctgtgggaaacagacatggatgagatgtagcaattttgaggctccttgtcactgagcaggaaagacaaggagaagtgttctgatttctcactcttcttgctttgtggcctcttgttagggactatcaggcagccagttggaaatggaaactggggaatgcagttacattagatacaaggcacacagtaaggacagagaatagagctaaggccaaataggcaaatgatctggaaagtaattgtataggacagcaaaatattttttaatgttttttttttaaataaaaaggtagtttcaataaactgtggtaaatgcaactgttactgaaagccaggagtttggtgtaacccctgctactcactgcacagaaagccaatcactgccacaatgaagatagccaaggaatacggctttattctcatgctgtatctgagaagaagggagatcagtctcaaatctatctccttgatggtctaaaatttagggtttgttatatagcaagaaagaaatggaatcatatgtgggaaaacaggaattagggagggctaaggaagaagagttggtcaacagaaagcaggtgatcaattaggcagtcaccacaagtgaggggtctggtgtgtcattgtccagttgtgatgatctagtaagtttcagttccttgacactatctaggaggcttgctggctggtttcctgagaaaggaattcagattagacaattttaactttctcaagttttaatagtaggagggtcaatttctatatttatatttattcaaaagaaaccataaacatcagtttccgttaccaaaaatgacctttagtgtgcagaaattacatgggtttttttcccataattaaattaaattagatatatgtgtattttacaggaaaaaaatacaacccagcaacttagaatggcttttcctccatgtattgctccccataatctactttctgagcttgctaatgtttaaacttaatcatggcattcctcttacatttcatttatgtagtattttaataatttataagatttttttttcttggaaaggttttacaaccatatttagtaaatgcaataacagttggacaattggaacggtttcacaaccatatttagcgaacgcagtaacatgtaattaatatatatatggtaaatgcaagggtgatatacagactctttgagcatacataagagggccaccacataatgccttgttaataatggatcattcaaggaagatttcacaaaagtggttaaatcctgctgcgtcctgaagaataggagacagccagggaaaaggaaggagataagagcagggaaagttgctgaaggatgaatgttcttccaggtagattgatccataagtacaatgaattgaaaatgagaacatataataccttttgaggctcaaagaagactgaaaatgtagtggagaaagaagcaaacttaagtgatagtttataaaatgtgggctttagttggaaagcaagggaaactcatcaaaaatgtaagaggagaaatgtcattattaagtttaaacattagcaagctcggaaagtagattatggggagaaatatatggagaaaaagctattctaagttgttgggttgtattgtttttctgtaaaatatacataaatctaattgtctttactttcattatggaaaaaatagccatgtaatttctactcacgaaaggtcatttttggggaatggaaagtagaagaaacaacgcgttgaaagaattgtgttacctcctggctttcccttttgtgcctgtgtattgctcattagtggtaggggccactggagcgcttcttgtataaggaaaatagatacagtgttccaaaccacaaatttaaaaattatctttacaaaaacatcccatttataagtttggaaatatgattgtatgtgtactttacttgtgtgtctgaagaagagcaagagaccaacaaaacataacagtaaaatactgaagtatgaacttgctgacatttcttataaattattaaaatatcacataaattatgtgtaatcaattaaatattgagaattttatgtgtgatagtatagaagcattaggctattgatacaataataaagaatatagatttttaagagctcattttccccttctgaaatgagttttaagttttctctgaatacagagctacccaagacacgaatgacaaaaatcaaatagactttggtttatgaaggcacagtcgagattttaattaccatagcaacctgaacaatgagtctatatcttaaatcatctttataaacagatttttatctgcatctggatcattaagtgttacatacactaagattagagttatttacattataacaacactacaatcattgttacagcagaaatgacctaattgtctttactaatgataattatttttagttcacaattcaatagaatcacaagactgattgcaataaattcctgtaaaatataaaacattcataatttttcttccttaatcatcatactagctttactttctgttctccctttccatgggtagaaaatctaattcttttataattcattttatcttgtcttcttttccaggttattttcagctgagtatttttatttttctctaagaaaaccattatattttgttcttagtacaaagccttacatttttattgtatacaattcagacaatccaagaaagtatatagaagccaataaaaagcactatttatcctattacccaggtagcattcttaatatataacaaatttaatcccagtttctgcaattttgtgtgtttgtgaatatagatagataaattaatatatattgtatatccttgcttcttttcagacaaaattgacattataatgcttactatcctgctttttaatcagttaattttatattagaatcattctcttgatgccattcaaattctttttaaaatttcatcttttattatttcctagaattcaaacttctggcaggaacataatttgttcatccatttactgttgtttcatatatgtattgtttgaatgtctttggactatgacatatggaactaagacaagtatacttgtatataatctttgagtacatcctttaacttctagaaatagaattactgggttacttaattttctataatcttaaaacataatcattattgctttccaaattttgctgtttgttaaccagccttgttaacaagactggtaggtcctgtgacttttctggccttttcattcagaggactcaactaagaaatacctttaaacaccactggtagaagatgtctcagtcagagccttgtaacttgcattactccagataacttcttaatgtgcttttccactaaaatatatggatttcctcaacttctatctaggttagtctaagccatctcaaattgagtattccaaaggtaatttttaaaaaaaggaatatgctgagaaatgatatctagagacaatctgatacattcatctctaggccatttctgttatcttctagacattatttaaacaaaactttcccatttctttcacatcaagaaacccatataagaagcatgatcttagaatcataaatctggaaggacaaaaaggcaggattctaaagattgattggacccatctcactggaactaatctccaagaagtaagatattgtgattcttaggaaagtcttttttttagctatataatcagctcttcttccctgaagctctccctttaagataaaggtcctctactgcttctacaaattttaagtacaatatttccttttgtcctcagtatgaatggggaaatttcgaatcatgttgcataaagcaatgtataataaacatggagacagttatataggttgctgcgtgaatttaaaaatctttataggtgaaatactatagactatttgaaatgtattcaaaccagctttgaaaatttaacaagaatatttttagcctggttttccatcacttaaagacatttgaatgttgagtttatttttatttttatttatcatttaagcccctatgtcttgaatctgaaaaatcagacctgtgtccttagattatgagattatctactctcaaattattttttttctgcctacttagggatgagagagtatttccgatttaagagttggatgtttattggtgattgtcccgtcactgtagtccattgttgtgttgtaatgtcccatgttagaaagaaaaacgaagtagttaagcatatcctaaaaattgattgttccttgggatcataaataaatttaaaaggtttatcactgttataaatatattaaacatttttaagtagatgagaacaacatcaacaacaaaaagtacccaattattttccctggtataattatttcatctttattgattccctgtgtgagcatgcctagatgaaaccttgccacctatcatagaatgcagtatggccattgacttgacaaggaatatatcctttgcttcttgagccatatctttaaagaagtttattaaaatatttgagtacctcaaataataatgacagctacacgtttctctgatactaaatctggcatcaaatttattccagggttcagaattcagtcaggctaaaagtctttctaatctgtggattctaaatatttacatcctatattgagcaatgaatctgggccacttttgcaagaggaaagtaaaattctgatggcaaagtagaccaacacgattgaaaaatgacgtgacgatatgaaatgatctataaagaagagaaggatttaaaaaaatggatctactgctgattaattatttaatctaagagagtcggctgctctagtcctaaatgaaaccattgtggtagaccaagtcctccaagaagagatcaagagaggattaaacatgcaaatgatttattaggggaaatacctatatcaaaggaaatagaaagtcagaaaagtccagaagggcaatcaaactgtgatgcaagcttgaccctgagtgagggagcaaggtttagaaagttaggaggaagtgtccttgactactagttccagctagtctaagtagttgttgagctagtctgtcaacaaagacattctggattgcccaagaatgatgccttcttagcctctctactgcaatcattattaagtattctatttctttttgttgctactgtgaatagaattgttttttaatttactttttgaacagtttgtaaagaaatataactgatttttgcatattgattttcaatcttgtaattttactgaaatcatttattagttttaataggtttttgttacacctttagggttttctgtatacattatcatgtcatctcacaaatagagataggtttgtttctccctttcagacttggatgcgttttatttctttttcttgtctaattactctggctaagacttttagtactatgttgaaagaaatggtgagcgtaggcatctttgccttgtatctcatcttagagggaatgctttcagttttttccttttgatggtgatgttagctgcaggcttttcacatggtaggtattgtgctgaagtgagtttctttaacacctgttttttgaaaccatagtaaatgtgtgttggggatatggcttaagatacatttggaatggagacaagggttgtataatttgcggccttgtaggtcatcataagccataagaattatctactaagaacaatgggactatgaaatctctatatctggaatattttgtggtcatatttgagcaatatatattgggtaaagacatataaaacagatgtcaaataagtagaaatatagagcaaaaacttagaaagtactacaaaatccaaagcttgtccatttaagaatgtctttataaattttagaaaaagccttagactacaatctctctagttttcaactgtcaacccaaataatagagagagactctgtaaaggaaaatgatatttactttggaatagggtattgcaatgagaatacccttgccatggtaactatgtggtgcatttggggaggtaaaggaagacaaagatttttaaaggaataatgagaaggattacataattgttttgagattattgtctttggataaaataatggataacaaaagtggcaccattccaaggttggacatgtagttgctgagcagatgtcctctcagaagtatttttttttatgtaaggtggcaatggcctttatgtaaagttatggtttttgcagtcttctgtgataggcatacatgcccaagaatgcttcagagagcctttgtaaaatcataggcatgtgtgtgtgagggccctcccttctcagcctcctggctttatatatttactttttgttagagtttgacacaagtgactctactttgattctgagaacttacacacttctaccatagtcttgctacaagattcggaggtttgatctgttataaccaccattgattcctatgcaatatttactgtagttgactaaaccatatgatcattgtggcagaaatggtagtactcagcaaacattccatggcctcctctacattttttcatctggtcttacagttatgagcccagatacttgagcgcccatttgaacctaagccccctattgacatgtgtggcatgtgtagtgtgagaaacagatcttatttcataaagacactaaaaaatgtgagtcactttgttatcagagcataacccacacatctcatctaaatgatgtgctgtgattcaagacctataacaagaagaaaaataaaaaaaaaaaactttttttggtataggtaccagaactgaaaatagcctattaaaaatccaatggtaacattactgagctataactaaaataagaataactctcaaaaaggagtatctgagagaaaattacaattttgacaagatacatttaaaacaactaccaaccaagtcccttctttgaccttatttatttacttatttgcttgtctattttaatcaaggcaaaaaatttcagtgaaatacacagaccttgacacaatttgatgaattttaacaaacatattaacctgtgtagtctgcccaccaatcaagacacaagatatttccatcactgagaaagattactttaactcctttgcagtcaatctaatcccactgtgaaggcaagcttgttctaatttctgtcaccatagaatagttacgtctgttggagaatgtcacataaatagaatctcattttgcatattcttttgcatgtagcttctttgcttcaacataatgtttttaggatgtatacatgttgttatatatcatcaatttgctccttttttataaacaatacatgaatatttcacaaattgtttaatcatcattctgcagttgaaaatctgggttgtttacagtttggggctattatgaataaagctgctataaacaatcttgcttgattcttttcataaacaaatgtttttatttctcttggttaaagacttagtggtggaatcactgaattatactcagtgaatgtgtaaggtcataagaaagtattagtccaaagagttatatcattttacactcaaaacagaaatacatatacgtatggtaaaatgttattcagccttaaaacagaaggaaatcctgccacttgcaacatggataaacctggatgacatgctaagtgaataaaccagatacagaaagataatcactacaagatcccacttatatgaagaatctaaaacaatcaacatcacagcagcagagcgtataatggtggttgccaagggctcagcagagggagaaagggggagatattagtcaaagggtaaaaagtttcagttatgccagatgaataagtcctagagatctaacgtacagcatggtgtctatagttaataataatgtattgtataaaaatatgctaaaaggatagctcttaagtgttcatataacaaaaaatgatgataaatgagagcaagcggaacctttaggaggtgatgaatatgtttatgacatcgattgtggtagtggtttcatgggtgtgtatgtatctccaactcatcaagttgtagactatgtgtatgtcaatcatacctcaataaagagggtttaaaaacaaaaaaagatttcctaaagttccctccaaagtattgcttcagaggcatcccaccaagttttctctgtgttgtttttgtgttatttttaataatatttttccgtttactatattttctaaagttctttgtgatatcttctttgactcactggtagtctaaaattttgccatttcatttctaaatattttggtcctgtctgaatcttatttttagttatttataatttagatatgttgtatccagaaaatacaccttataaattcaatcttttgtaaggtgtatagttttatggtattgcccagtctgtagtctattttagtaaatatttcatacgcacttggaaagaaaatctattctccagtctttgggcatagttgatatacattaactagaacaagattgttgattgtgttattttgatcatttatatatttactgattttttgaggggctagttgtctatttcacacttttctggccatttttatagatatttaaactctgttattaggtgcatacacatatatgattgttatgtctttatgtgaattgaactgtttataattaataaatatttctcttttacctctggttatattgtttagaagcctactttttctgactctgcttactatttgcatgacaaatatttttatattcttttacttccaatctgtgttttaaaatttaaggtgtaacttgttaaggcacacttcattttagtgactcttatttgtccaatttgacaatctttggcttttaataggaatatttaatccattcacatttcaagtaattattcatattattatatttaagtttttaccttgctttttattgtttttttggcccattaattatttattgccttgtttttcctctcctgaattgtgttttgttaattgaatatcttttagtaatacattttatttcctaagtagctttttagccatagcagtgtgtattttgttaatggttgctctagggattataatatttatccttaacttatcagtgtgtacttgcaattaatattgaacaatttcacataaaatagagtagtataaaaacagtaataagtccatttagaatcatccgttgtgctttgatcaaatgtttcaattctacatctattgtaacaccctcccaaaacaactttattatttttgctttaaacattcatctgtcttttaagaaactaagagaatagaaaaaaaagtcttctatatctacctgcatatttattatctccagtcttctttatttcttcttatggatccaaatcttcatctgtaatactttttattctgcttaatgaacttcctttaatatttctttagtacaagtctgtttatatacagcccagtgttccacagggaacccactctcaagcctccgtggtgccatctgcagagctctctcctacctgataccctatccaaccaaatccagtcaacttagcagcaccaaacctcaatatctatagtctcaactcagtggcactgctgtgttctttagctgtaccttcctgtactgctatcaggaaaattctgctgggaagaaatccaaggaaatgtagaacctaattcattttgttatccttcaaaaatcattaccctggaatgcatatcgtccagtgcctgaaatactcgcttcatatgttgtgtgctactttattgttgtttacatcgagaggccaagcctggtgtgactttctctatcatggctgggaggagagattacactttaactttagatggttgaatttaatgttttattacttttcataaaatagctcctgaatgaaaagtagcttttcaaaaagtactaggaatggaaaagcaactgagaaatggaggaaaagtaagtttttggcagttttttacagcccattcaaagaatacttctgcaaattactcctaaacaatgctgtgttcataagaattaatattcaaggggcagcccaagaattgttattaatttacagttctcttccaaatgtttattgctgcagtatcacttctgcttggtatggatcagttttcattgcagtttattggcaatcagcagttattatttggctctagtgtttacaaactataattcattagtctcttatcttttatttatgagacagtgtcaaatgaaggaaagaaatcaggcactgtttttggttgggagagttctgtacactagagggcattaacactatccatgcttgtgttttgttttaagtattcattcagcattattgaataaagtaggtcctaactgtgagaagaaacaggctgttttgctgagttcctgctgtgtacagaatgtttgcccatataccagtctgattcactgataaataatactgataggaatactatgtcaaattagccaactttaccagcaaaaataatgtcttaattttaaatgtttgaagataaatgagtttttgtatatataccaaaataactcacaaatatgatagctgaagtaaagtttataataacaatagatttccatttgatgaactatagttcggcaatatatttttaaatgtctagaaacagtaaatataagaaaatacagagtggtgagtggtacagtgaaaagcacacagaaggagaagtcagaattcatgatctttccctgccatgaatgcacatatattttagcagtcttttcaatttttcagaagttgtttcttcatccattaaaaaggggataacatcatacgtcttgataacatcacaatgtttttatcaacatgatgaaaaatatatattctactatctgaatgtcgtgattatctttgaagagaaacaataggatttttcttccaatctatgctcattgttgatttactgtgttgccttgagaaacaatttagtgctattttccaaattcttaaataatggctacaatgtctactcttttgagctgacagagaaacaattgataaagagagggagagcaagagtgagacagcaagagcaagtgagagagggagagagagagacagagagagaaaaaataagcctaaactctttaaagaaaagtatttatggatctgatttaattgtgattgtgaattttttaatgaaggacacttttgaattaagaacacagatatgttctaattgggtaatttttgtgtatttatcacagatcatttcctgtcttacaattattcactagattttagtgtgcctatgttcattgttctatttgtacagcattttatttctcaagtcagtggcaaaatattcctgaatgatcattctaatgaggtatttaaatttaccccaataaatatttatatggaattctactacctcaaaatatttctccttacactgtataaaatttttcttttctcaaccccagtaaatctgcctgccactaaaggccaaacaaggagaatttcatatctacttcttaaatactgtttactgaaatgtcaatgaagtgagaatgaaaggctctggagaaagttccctgagctgagatatgataatttatcaaatctaaatgaaaccccaggtgaagtccaagtttataacctggatttaaattacagcatggatttactttttatctttccggatctttagaagttacagctctatctgtgaagcctgtacttgtgcaatacatcatttatgtcaacattcatacttggcttacaagactgcgtaatacaagagggaacttaagcaataaaatcacttctcttgcagaatgccactcaaagagcataattttatttttaattcaaaatcctacaactgtgccgctaaaacaatgttgaacagaggcaggcactactgtaaagcaggagctaggagaggaaacttctcttggtaagtaaactgcttcctggctccttcatggattccaattaaaacacttaaagatccctttgaatgtgcaaaactgggaactgttatctcaggcaagcaaaatacattactcatcttatagaaattcaaaatgttaatgttgaaaggcactgtgaatcatttaaattgacctgcacagtttatagatgagaaaactgaggccctgatatgtgaagattctggctgaagatcgaagtcaatatttgacaaagtcaatacagtgaccattccagagtttcattccataacagtgctacttttggataaactttactgctattatgatattatatcttaaatatattgagctggctatgtgacttgtactgtgctacacatttgagtggtggaggcataaaggtggtaattatatctctataaatgagataatgttcctatttctcctctttttgagataacttctaacagtcatctacagatggtgatcgttgacatggacaaatgttcttaccaaaaccagtccaaataaaaatatttgttcgtaaacacccttattttaattgtgaaataattttgtttataaacttagtttgagtgaatgcgtgtcaatattgtgcatgttggagggggatgataatgagctgctctatcaaagtgagtcatttaaaaacagcaataactaaaagactcttgaatgccaaatctatttccaaaatggactcttctatgcaccaaaatatagactagagaagaaatttgatagattggactgtagtgaccagatagttaagtcagttcccactactatctcatttactttattttttaaattgaggtaaaatacacgtgacataaaagttactatcctaaccatttttaagtgtacagctcagtggcactaaatatattcatattgttgtgcagctatcaccaccatccacctccatgacgcttctcatcttataaaactaaaactccatacacattgaacaaggattccccattctctgcctccccaaacacccctcaacaataagcatgctttgtctcagtgatgttgactctttaactacctcatataagtggaatcatatagtatttgtctttttttatgactggcttgtttcatttaggataatgtcctcaaaatccatgttgtagcatatgtcagaatttccttcctttttaaggctgaatgatattctattttatgtataaaccacgttttacttgctcattcgtcaatggacacttgagttgctgccacattttagctactgtgaataatgccactaaacatgggtgtataaatgtctcttcaagaccctgctttcaatgtatttttgatatatttccagcagtagaattactatatcatatggtaattctatttttaatttttttaagaataaccataacactgtccacagcagctatatcattttacattcccaccaacattgcagaagggtttcggtttctccacatcatcaccaacacttgttattctcttttttgtttgtttgtttttgttttttgtttgtttttaaatagtagccatccttatgggtgtgttaccatatctcattgtagtttgggtttgcctttttctaatgattagtcatgtcaaacatctttgcatgtgcttattggacatttgtgtatcctagttggagaaatgtctatttcagttctttggccatttttgacttgggttttgttgttgagttttaggagttctctatagattctggatatctgattttctcttatcaaatatttgactttaatatattttctctcattatctggtttgtctttttactctgttgcctttttactccttttttctattttgctgtacaattttaaagaattctcctaaagtcaaaattgtctatttttttaattttgttgcctaagtttttggtgtcatatccaagaaaacactgtcaaatcaaaagttgtgacacattgagacaggatttttctcggcccctttgccagactcacagcaagggcaccctgtttacttggcctgctgtgctcaaccttgaaggagggagcatgtgagtgagcaagtgtaggatccagccagctgctacgggagctgacacaggagcaagcttcatgcggggcctgaggtggcacccaagttggggtgcctgctaccccaaagccccacaaggggtgttacagtgttctgttggtttcattgtctgcagatggaggcatcttagcagctcagttggcccattgcctcatcacgtggggtggctgccctctgccagtgagggcaaagggtcagtgtgacaacagttttgggtacctgcactcaatgggtcctgagctcttgtccagcatccaagaagaatgaggtcacatggacaattgaaggatagtgaaagcagagaattttattgagtgatgaaaacagctctcagcagagaggggagtcggggcggggatgggaagggcagatcatcttcccctaagtcaggtcgtctcttccccgaggtctagtcactccctcaaggtccagccatctccctgaggtccagctgtctctccctctaccgactgagtctggggtctttataggcacaggataggggcagggcgggctgtagggtttttggaaaaggcaacatttgattggtaaaaaggcattattcagaaagaaccaattgggagagagtgggaaaacaggaatagaagttctcactttgggctgcaggtttcaaactgttgggtttttgttgttgttgttgttgttgctttttttttttttttggcttgaaggtgggattttactgggtacccatccctgtctgcctagaatttctctgctgcctgtttctatcatcatcagacttactaatttcagttttcttctctgagttgtatagatttaggtctgacatttagacccattttgaggtaagttatgtgtataatgaatgaagtggggtctaagttcattgtttcgcatgtggctatctagtcttcccagtaccatttattgaaaagactatagtttcccccattgaatgctcttggtgctcttgtcaaaaatcattttaccaaatatgtgagtgtttatttctgagctctcttttctatccattggtctaagcatcttgtttttatactagtaccacactgttttgattactatagctttgcagtatgtttttaaatcaggcagtgtgaatcttacagttttcttctttcttttcaagattgttttggtaatccagggtcccttgaaatcccatatgaattttaaggttgggtttcctatttctgcaaagaaacttatttgggatattgattaaacttgtgttgaatctatagatcactttgggtcatatcgacattttaacatgaagttttccaatccattaacatgaggcatatttctatttctttctgaaaacttctctcaacaatatttcatagtttactttttacaaattttccacctccttgattcccaagtattttattttttatttcaaattgctcattgttagtgtataaaagtacaactgaattttatgtgctgactttgcaaatcttaatcattttgccggtggaggctcttgccttgatcttgatggctgctgactgatcagcttggtggttactcgaggttggggtggttgtggcaatttctttagaacaacaatgaatgtttgcctccttaattgactcttcctttcacaaaagttttgttctatgcaatgctgtttgatatcattttacccagagtataacttctttcaaaattggagtcagttttctcaaatcatgtcactgctttatcaatatgtttatgtaatattctaaaccatttgttgccatgtcaaaaatattcacagcttgttccaagaatagatttcatctcatgaaaacacattcttttgctcacttataagaagcaactcctcatgtattcaagttttatcatgaggttgtagcagttcagttacatcttccagctccagttctatttctcttgctatttctaccacattggaagttccttactccactgaagtcttcatcccctcatagccattcatgaggattggaataatcttccaaactctgttacggttgatattttggccttctctcatgaattacaaatgttcttaatagcatttggaataaaatctaaattttttctgcaaggttttcagtttaggttttatccaggtcaatcagagaaattactatctatgatagatataaccttacaaaatgtatttcttttcttttcttttctttttttttttttttttttttttgagacggagtcttgctctgtcacccaggctggagtgcagtggcatgatctcggctcactgcaagctctgcctcctgggttcacgccattctcctgcctcagcctcctgagtagctgggactacaggctaccgccaccacacccggctaattttttgtatgtttagtagagacagggtttcaccgtgttagccagaatggtctcgatctcctgaccttgtgatctgcctgcctcggcctcccaaagtgctaggattacaggcatgagccaccctacccggacacaaaatgtatttcttaaataataaaactggaaagtcaaagttactctttgatccatgagctgcagaatggttattgtggtaccagccatgaaaacaacattcatatatttgtacatcttcatcagagctcttagtagactctgttcctggtgaattaacagaatatttggaaagaaatctttttatctgagcagaagttctccacaatgggctttaaaaatttggtactacagtgtaacaaatgtgttgtcatacaggctttgtttttccatttctagagcacaggcagagtaccttaagcattattcttaagggccttaggattttcagaatggtaaatgaaattggcttctatagctctttatttacagtgagagatgtaaaattattctgatacatgaacacttagaggccttttagggttattgattggcctaatttcaatattgttttatttcagggactagggaagcctgaggagagggagagtgatgggagaatggccaattagtggagcagtcagaccacatacatttatctagtatgtttgtcgtcttatatgggttgggttcatggtgccccagaacaattacaatagtaatatcaacaatcacaggacatggaccaacataacaaatataaataataataaagtttaaattattgcaaaaattaccgaaatatgatgcagaaacaaaaagtgagcacgtgcttttggaaaaatggcatttatagacttgcttgactcagggttgtcataaacctccaatctggaaaaaaaaaaatctgtgaagtgcaataaagtgaaccataataaaacaaggtatgcctgtacgtgacttttattatgttggaatactttccttctagttctaacttgttgaatgtttttattatgaaaagatgatgaattttgtcagttgctttttctacatcaattagtttgatcatgttgttttatattttgttaaggtggtatattacattaatcagctgtcatatgttgtaccattttggcattccaggaataaacatcattggtttttggtcgtggtacataatcctgttaacatgctgctggatttggtgctggcttcattgaatgaattaagaagtgttttttcctcttcatttttagggaaaagttggagaatttatgttagttttttttttttttttatgtttagtaaattcactagtgagtccatcaggtccagggtttttatatatagaagatatatgtcaggttttttttttattattgatacaatctttttgctagttataggtctattcatatgttcctgttctacatgatttagtcttgggaggttctgtgtttataggaatttgttcatttcatctaggttatccaaattgttggcatacagttgctcatagtattctcttataatcctttttatttctgtataattggtgataatgcccccactttcatttctcattttagtaatttatgtatactctctctttttcttagtctatcaggctaaagatttgtcagtttaaaaaatccttttaaagaatcaccttttggtttcattgatttactctactgtttttctattatctatttcattgatctctgctctttactgtttccatccttctgctagctttgggtgtagcttgttcttctttttctaattagttgtaaagatagattgttgagttgatttttttctcatttttaaggtgttcataaatttttctgcatcacatgagttttgatatgttgtggttttattttattcatctctaaatattttaaattttctctctgatttctcctttggcccattagttaagagtgtgttattttccaaaaataagtggcttttccagttttacttgtgtttttaacttctaaatttatcctgttgtggtttgaagatacacttggtgtgatgtctattttctaacctattgagacttaattagcaacctaacatatggcttgtccttaaaaatgtctcatatgctcttgagaagaaagtttatgctgttgtttttgggaagagtattctgtacatttccgttagatctagttggtaaattatattaagttctttatttccttacacatcttctgtctagtaattctacccatttttcagagttgactattaaagtccccaactattatcgtagaactatttcttcctttaattccatcagtttttgtttcatatgtctctatggtctgttattaggtgcaaaagtgtttcattgctatatattagtgctgtattgaaatttttaatatacaatgtatttttctttgactcttgtaaatgtttgatttaaaatctgttttaaaatcttatatttgtgcagccaccccctgctctcttttgcttactatttgcatgaaatgtttttttccatcctttaactttcaacttgtttgtgtctttgaatctaaagagagtctcttatatacagtgtataattagatcattaatttttattcattctgccattgtctaacttttagacaatgttcatttatatttatattagttcattatagttcatttagacagtacatttatattcatattaattagttcaacaaacaattcgttcatttatatttatattaattactaataaggaataacttacctctgtctttttgctatttttttctataagtgtcatagtttttcttgtccctcatttcctgcatcactgtcttcctttgtgttaattttttgtagtgaaatgtttaagttcttttctcatttacttttatttatattttatagctgctttctttgtgattaccatggtaattatatcctgaatttataacactctaatttaacttaataccagcttaacttcatgacatagaaaagttctgctcctttaaaagctatgtccccactgtttttggttgttgatataacaaaatttcatttttatacattgtgtacccaaaatcataaacaaataattctttgaaatgcctcttaaattatatagtaaacaaaatgtggagttacaaaccaaagttacaatactagcttttagagtaatatatgttttaatgtgttagttcattaaattgtgtggaaagcgacaaatacaattaaaaactgtcattacaataatactagcttttataattgcctatatatttatctatattgagatctttatttcttcacatagcttctagctattgtgttgcatcttttcttttcaccctccaggattcccttgagctttttttgcagggtaggtttagtggtaacaaactccagcaactttgtttatctgtgaatgtcttaatttcttcctgagttttgaaggatggttttgccaactatagcattcttgtttggcaattgctttcttttagcactctgaatatattaacccactagcttctggcatctatagtttttgataagaaatttgcacataatcttatggaggatctcttatatgtggcaagttgcttttctcttgctccttttaagattttctctttgtttctggcttttgaaattttgttgacaacctgtcttgatgcgagtttctttgttcaacttacttaaagttcattgaacttatttgatgtttatattcatgtcttttaccaaatttggaaacattttagactctatttcattaaatattttttcatcttttttcttccttcttcttttattctacagtgtgtatattggtccacttcatggtgctccacagatacattaggttctgttcacttcagtcttttccctttctaatttaaagactcagtgatattttttgtcctatttcaagtttgctgattcttctacctaatcaaatcttcccttgaagccctctatatcctttttttaaaattttcattattatagttttcagctccagaatttcttttaggtttcgttttaggttttctagctctaaatcaatatcaccactttgctcctatattgttttcttgactttctccccatcttcttttacttctctgagtatgtttaagactttgttataaagtctgtttagtagatgtgtcatcaagctttgtcagggacagtttatttttttcttttgaatggtccctttgttcctctctctttgtatgtcttgtgggttatttgttgaaagctttgcaattgaatctaataatgtagtaactatggaactcagattctcttttccacagcgtctgctattttttggaatgttcgtgttttatttcatttgattgttataggctgtgtcagttccaaggatcagttgcaggtgtaagcttaaagttttccagattttttctgcgcctatgtcatttcctgggcatacagttacttcctactgtttctcatatatgcaattatttatgaatgccctaatcttttcataaggcttttaaaagagaaaaatggagtaaaaagagtgctggccctttatgtctcctggaaatcacttaggccaagagtgagggccttataacaatagtgagtagtgcaacaataatggcctcctgcctctttgtactgctatgttcagaagcagcaatcagcaatccaagcaaagatcccatatatttggagaatggggttctttttgcccatcctgactcttgcaatctgggtgcaagctgcttcaggaacatgtccacagctgcttgcagtgtggctaggggtggagaatgagtgtctgctactgtgctgagcattgaaattcatcagaaattaactgcaattcccagtctgagcctttacctggaagttgcaagccttaaatagacagcagagttccaaaatgtttacatcagatatactctgcaagtgcattctcctaagtggggagacaaattccttgtgttttccacttcctagaatcctcttccccagttacttttaactttaaaaataatagccttatttttatttagttaaaaatctaatgggacggtggaaattcatccagatttgaggacttcattgccctctgaactcaggaagctgagtgaaagaacctgagagcagaaacactattctccagttgctttccaggtacaactgagtgggagagccaaggtagaggcagcaggtcttggcgtatactggaaagtatggcatcaaaatgaagggtctaattaggcctcttgatgaaaagcagcaaaagaaattgtagaccactaatacattaaactgtggaattacaccaaagaattactgtagcagtaactatattccagagagtgatggagtgatgaacattgtctcatagtatgcttgtgaagcaatgtgtaggtgaatagtgtaaggaaatacatattcatcttgacactgggagaaaaatattccgcattatttacatcagacagatactacattatctttctgtctccatttcttctgctgcaaaataaaggttacaataatagtggatcaacatatataacaatccaggaaagtctacctcataggtttatggcacacaaatagtataaaaataaaatacctcatgggaaaaatactcagaatttatttaatttcaagctattattttgacaagaactcattatctttcaattcatgaagtacatgtgcattttccacatcacttctgtcagattctgtgtatcaaatactgggaattattagggatactttctgatattacttagttttgaccctcaaaactgaagcagaaagtccttctgtcactggaaatctaagtgtatatattgtaaagaatcaaagtctatatcaagagcagttgaggaacatatgcttacttagatgggttgtttttaatattattttaattatcatgtttctacaataaataattatgattgaaaataatgggcttgttaattgatttggaagtcatttcctaaagcaaatctgagagtgcaaatgaaaaactaagatttttttgaattaagaaaatgaatcatgctgctataaagacacatgcacatgtatgtttattgcggcactattcacaatagcaaagacttggaaccgacccaaatatccaacaatgatagactggattaagaaaatgtggcacatatacaccatggaatactatgcagccataaaaaaggatgagttcgtgtcctttgtggggacatggatgaagctggaaaccatcattctcagcaaactatcgcaaggacaaaaaactaaacaccacatgttctcactcataggtgggaattgaacaatgagaacacttggacacaggaaggggaacatcacacaccggggactgttgttgggtggggggaagggggagggatagcattaggagatatacctaatgctaaatgacaagttaatgggtgcagcacaccaacatggcacatgtatacatatgtaaccaacctgcacattgtgcaaatgtaccctaaaacttaaagtatcataataataataaaaaagaaaatgagtaatgactggtttgctctattttattattaaaactataatttatttaaaataatatggtactggcaccagaaaagacaaatatctcttcacagtttgagaacttgccatttgcaaggcacggtgataagagcgggtgaagtgtctggtaaaagaaagcaggcatgacccatacttttatagaggtggagagtaaaattttgaatacagacaaaagaacaagtaattataatgtatgatgttaagtgttgtaataggggaaatactacatttcaagagagcttttggagggtgtgtatcctagattcaatgaacgtctttgggaagaagcaaaatttaatctgagatctgaagattgtacgttatttaagagaaggtggattccagtgccaacatagcctgtttgtagacggaatatggtttgaagactatgagagggatgcaaacaataaagaattgaacatttgagaaggaaggggcaagaacaaaaaagaaaagaaaaactaagaaggcagcgatagagatgagggaggaaaaaaaaagcataagagtgtatgtgtctaaaactaagggaaaatatttcaagaagggaattttccatagcatcaaataatgctggaaatctgaaagacatgaagttttgtttttttgttaaagtccattggaagcaataagaatactgttgccttgggaatagtatttgcagggaagtgatggggtggaaaagagactgaaacagcagcctaacaatccatccttgtttgaagacgcaaaggtaagggatgttgactacttattcaaggttctctgtgaaaggaaaacaaatgcataggagggagctcacatagtgacttcaagggaaggctttttttttttttttttttttttttttttttttttgagagagagtcttgctctgttgcccagactggagtgcagtggcgtgatctcgactcaccacaacatccacctcctggattcaagctattctcctgcctcagcctcccaagtagctgggactacaggcgtaagccaccacgccctgctattttttgtatttttagtagaaaagaggtttcactatgttggctaggctggtctcaaactcctgacttcatgatccacctgccttggcctcccaaagtgctgggattacaggcgtgagccaccccacccggcccaagggaaggcagtagagatttgggcagacatagacactgatgggaagggtctagtggagaaagtgatatccctagaatggctaacagaataatccactgaatgagagggacagttagggatcagataggttcagtgtaaatttggagaaataagtcttgtaccagaatcgcaatactttagaagaggaaagaagaaaataatagaagaagatgcagagaattttgtggaattatggcataaaattgagcagatcttatttgatcacgtaatttctttgttaagtaagagactagattatctactaagcaactaaggaagttgaaggattggaaaaaatgcagtgaatattatataaacatacactaaaaactggaacttcagagaagaaagattgaaaatgagctatgcactaagcaaagtgatcaaaatttaagattgatacagataagtagaggtgctatattcataatgatttaaccagctgcatttatgaatattattttttattccaaaacgtttcttctaaatgttactaaatttagtactctaaagcctaaaacctatttctatttagagatataatgacatgttttactactttacaaatcatgcttagatattaagtctagaattagtggattatgcttcaatttttttacccataatagttgttttcaaaacatgtatcagttttctgaaaatgtattatagattatttttacagtggagagagaagtcctgaaacgacagctgtttgacacatttgaacatccattgatctttcaaaaactgcaagaggcaaatggcttatcttgaatgcactttggggaacaatgtgacatttacagttaaaagcattacacatccatatgcataattcataaactggaaattatttaaatcccagaaacccactttgatagtttttgctttcaatttccaatgcattgatgcttctaataactcattttctctgtagaagcctattgtttactgttacatgaagcttctctacaaaataaaaaccgggtatatagagacctaataggaagaagcagtattgcttggtggtcaagactgtaggctccagaaccagacactttgagttctgatcttcattctgcaatgtaatacctatatgacctcgtaaaattttgtttcttccttgtacctcagttttcatctaaaaatgggcccaataacagtgtctttctcatagagttgttgcaaggattaaatgaaataatgtatatgggcactgaatgaatgtaaaccaataacaaccataaacaaatgttgtttgttctgctttttattaaagtatgatttacattcagcaacaaacatgaatcttgaatgcaatttgactgtttgcatacgtagacatccatgtagccacctccagatcaagatatagtagtacattttcatatgcccaggaagttatgttgtcttcttttcctaaaaaataccccattcccttttcctgaactaactactatgctgattctattaccatgtctattcttggagttcatataactggaatcctaaaatatgtataccttaatgcctggcatctctcattcaaaatgacattttttgaattcatcagactgacttacatgaccagaaggtttcatttgttattttttttttgctgtatagtattctattatatacaatagaacttttaaatgtttaaaatttttattttcctattaattataattagtttaaatcaatctcttattaacccattactttttccaattcttaaagatttttctttacttaaatataaaatgcagctggtcattagtttataaaaaggatacaaagatgagtcacctatagaagatagtaaaatactattatatggtgtggattttttttagcacagaaaacctgtaggtagggacttctagaaaagcatttataatataacataaacgtgataggatacaaagggattttattgctgttttgttgattttcaaaattttaacttcagagaagtaggcaggtccaaacagagaacgaattttcacagagaggattatagcatgacttaaaaaaaaaaaaaaagaaagaagacattactttctttgttttctgtaacaccatgagcccaggaaatgagttacttattccttgggctcagagcatccagagcctcctctatgttcatggtattatcactcactgcaagtgctacctagtgaggattctataagccctctagcaatgagacaaagaccaaaatgtgatgtttttctctccatctcccaaccaatacccacaagttgcttcctttgcctaatttgtctttagactctagtaagcttagcagtagtcactcaactgttgaaaacttccgtatttttattactttatgcatgcttttcctcacctctaggttgcaaaaatgattggcatctaatttcctaaatccattgactcccttgtttacatcctgacaaatggtgaagccacatgtcaatcttcacgcatcctaaatgactctaaattgtattctgtaatgtcataagggcaacgtacttgctgtatgaaattactagtgacagctgatggggaaagcaatgtggtgagataattaaaaatgcacctgtgatcatcatattatcagtaaaaattaaagtggtctgtctccactgagtctttctgctgtcatgttctatgcatgatttctaagacaaagaagcatttattgtaccacaatgcttttaaaggatagatcttattcttagatatcaatatattagaaagcatttagtcatactctgaatgcagatttttttccttatcacagaactgcagaatttaaaatgatttcattaagatggagaagaaaaatcaacttttaaatatgcagtttgccaataattttactggctttacttaagaaactatttaaagagagtagcgtctacatgttagaagcatttgagttaaacttccttgcaaactagaactttagcaattacttatttgcataattgtgatattgctatttaaatccttcagtaaaatatagaacaaaacaaaatgctgccctaaggaggagccttaattgtctcttcatagcctcaattatcttctgtgaatatttgtaatttctgtttataaacaagcttattttaagcataaatgtgctatttaagttgtgcttagaaccactgccatctacggataatagctgatgtcctcagaagagaatggcagtaaatacctgaactatgattctatctgtagtgctggtacaagataatgtgtgcttacttgtgatgcttctttggcttttctcatccttgtgccagactcccctcttctcaagtatctggacaatgaaagaaaagaacaattcttcaaatggtgcatgtgtgggtacaaagattatatagacacttcaacgttctaccccattttgctgtgaacctaaaactgctttaaaaaataaagctcattaattttttaaacaagactagatattgttgaatcaaagtatgcttagaataccatgactctagaattctaggttaaaacaagtgttatactttaagtcatttcactgaactggtttacttacttttttctcaaatatctaggaatgtccaggtatatgataaagaggagatcttattaaaattttgtgtctattaaaatttccagcaccccacctctccccaaaagatcttactctcccaacctcgcccacctgtctgtacctcttgatcacttccttacctgtcttctcggggaactgctagggccagatacagatgctgaatgggattcatgtggcagagtagctccccagagactgttaagaacatgttgactgggagagttctcttatgatgaaagtgaaacattgaaatatacctgtgataattcaagcagatttgattttattaatttttatctattaagattctttgggttagataaaatgcaataaaaactgactaaaatgatcaaaagtatttctttagataactgcaaggacaggggctaccaggtttcaggtatggagcagagctcaaactctgtttctgtgattctcttggcctagccctcttctattgactaggtgtcaaatggggcaagaatagaactgaacgccagcactgcaatatgacatttgcgagctctaggcattttcgccttcatggacctctttcttcattaaaaaaaatactaccaagtatgttttacaattgcgttgttttaaaaaagaatataatccagcttgaattaactattatatatttatttttatattcatttttcttctgattttaaataaattaaaattaaaacattttgtagacctctaaatgtactatgggcactagacactagtcctacctactgtgtctgatgggtaaatcagccctgctgagcacaacagaaaattatgctattttgacatattatcttcaaaatttccctgtaatgttgatgttcctgtcactgtgttacatgttgagaaaactaaggatcagcaaggctaatcaaattgattgaaaacacagtgatgattgtgagtcaagaattgaatctgcctctgttggactttgataccctccagcttctacctcaccaagtctgatttttttactaggtaataaatactaaaaatatctcattattttccttagtgtctactgcctagtctgccctcatcctcgctacactccaccctttaccacttaactgtcatcatcatcatcattatcaccatcatcatcatcatggaagtgtatactgagtgcacattctaatttattccaatttatttgcctttaaaattaaatccatcatataggcattattacatgtcttcaacagataacgtagggcccagagaaacagaataacttatccaagttgacccaggtagtgggtagcatgtggcatatgaaggaagcctgtagacagcatgattaatcctttgacagttccatctcttagcagtcctttcttctttcaaatatgatatcagagacagtccacgtaccacatgttttagcatttagttgtatgctttttatttttctctaattattgatggatgttaatgttgtatttttatcaagactattgcatcctaaataaaaggaaattttctgtggccacagcacttaatatactaaaaaatatatggtatatatttttacgtactacatatcatgtatttgaaaaaatatacattactaaacctggagcaatagcaggaaattactaaaagaaaaagagacactataaacatcaatacaaactttgaaatctaacattttttttaaatattgctttttaaaatgtttcaccattttcttggtattgttttagctcagttttattgccttgcatataacttcttgaatgtataagctttcattgtgttttgagatctggaagaaaattcttttatatttgaaaaggaacttatatttcaaatatgctttcagctttaactgaatatatgttttcttttatgggaacaattctgccttttctcccttgtgagcaatgtctcaagccgaacttaacttagaagagaaaatgtatttcttttaatgtcagcatatgatttaagaaaactgtgaataccaccaatcaccatctccttcacctcagtggaattattcacattttatccatgcacccttggactgatggatttaatacctgaagcatatgaatgcccttattctttcaatgtgcccaggaacaaattttgtgggcagtattttcatggcatttttgatagcaacattctgtgataggacaattgatcccagatattttgccatcaaactttaccattattcttgctcatgaaaagagaagaaattaagtatgtagcagtccatggcatgacagtctttctgagtagcctgtcagatttgcttttattatatagtttatataccaaataaccattcagtattgtcagtttctataagcctgcagccatcttcattagaaaattgacattatacttacttgatgtttaaaactccagtgctttccaaataatttgtatcttcctgagaggacaaataggggaatttaagagttttttgttttgttttgttttgttttgtttttgtttttgctgctgactaaattacttaaggttttcaatctataaaacaatagtgattgccatcatttattatcaatcaaataatttctgttatttggaagaatggtatctaataatacttaaaagtgttggtgcaagtttgaattctatatagaaaaagcaagttaattaaatccaatgacttgtttttagtacttgtaaaattggcatagaaatactgcctaccttgtaatgatgtcagggacttaattgatacaaggtttgaaaagaatcaagtcctcaacaactggtaactgttattattgggaaataattctgagttagttttcaagaaatatacaaaaacagcaatgagtgtatgtgtgtgtgtgtgtgtgtgtgtgtgcatcagttttcacattttctcgaaggcatgagatgtttttatttgctttcctgaaaatggagatgaaacacactagaaatgttttataattccaaatgctagaggtgggtgtgtgtgtggggggggggggggcgtgtgtgtgtatgtatgtatgtgtgacttatttatctcctcatataagaactatttttggacaataaaaatgaccatctagttcttcttagatgcaaaatggtctaaaggcaatgagtaaagtacacattatgaaagaaaaaaaacataaggaaaaacagactttatgaaccattgtgtgattattttctctgaatccagaaagccacatctaattagcctgtgtattatgtgttatgatgtaattattcatattttaggccatgtttactatgacaaaccaagagttgccaaaaaatttctcccggtatgtgaaagcagctcatatatcagctgcgtaagcaaacatgagatggaactcacttgcacccttgaactacctccaacagagcagaattctgaggattaaactcgagcagcatctttaacaaagaagaggcacttgaaatatttggggttttaaaattttttttcaacattttgagcatcaaatttttaaaaagattaattaattttcaactttaatattattcaatactctatgaacctttgttggcattaacacttacaaaaggctaactctttgggatagagagagagggggatgcaggacagtaggaaataaatggttagatctaaatgtgtggcaagatctgtttacttactgcgtgaccttggacaatttacataaccactttcatcctcactatttttcattttcagaatgaagtttgttgttagaattagagataatgtatgcaaagtacttagcactatgcctcacatttaatgggctcaataagtgataaatgacattgtttttatttttactattgttattcagctattaacctctcagaatgtcagaatccaagaccttaaaggcatttcagaactaagaagatgctgtcattttacttctttccttacttgcctgaagtcagtcattggtgccttgtttgatacccatgcagttaatctgtagcataaatctcacaagtattagaaagacccgggcacaaatgtcttaaatgttcaagttattaacagggcagtttacttattgctaaaactgtaacaaggccaaagaaggtttacgcataatctaaaaaaacctaaattatttgagacaatcaaaacaaataacctcatagaccacaaatttttcagaacggtccatgtgtagtacaaatgtaaatgtaatattttcattactgttattaaatttttgagaccagtggttatcaatcctgggtggcttttagaagatacacaaatcaatctccagcctgagtttttgagaactatttattacagatgttataaaattcaatttgagaatcaacaaagattaagcaatattattcttccttaacattggctgtgttgttttttttgaaacacgtttgtcaagaaaatgtacagttctaatagcatcctttgcatagatctcattatcattattacattcttgcaccatataatgtaataagtgaccaaaccaattttattattattaggtactgggaaatacgtttcagagtccagtagtagttccttgcacggatatcagttcttttacttaataatcattgtcatacttgttttgggtcttaccctttcaacttggaaattaagataaaaaacaccagcctcatatcagtgatatggatagtaaaataaataatgtgtggaaatgaataatcagaactttaaaaagcattttctttgagtggggtgactacacctcctcttatgcctcagatagttttgatttaatattattgtcccagtttaattactaataatgcctcaatttaccttcaaatggtcccagtttgtaagaaaaggaatcccacttatgagaaacatgagcatcctcatgctgttaatctcaatgggtgatatcatcatagagcagaacctacctttacggttagaggcaagtacacatcagaactgaaggtagtgagatgactacagttgaatagtagtaaactgataaataatttggtttatgggataaaaatattgtggagtcagacagtcctgggtataaatactgtcttttccaatggcctacattcttggaccatttgctgaatcactcacttaatgactgcaggtaaatagtaccttttttgcattgctattgtatggtttagaaataatggtatgaagggccaggtgtggtggctcacacctgtaatcccagcactttgggaggctgaggcaggcggatcacctgaagttgggagttcgagactaccctgactaacacagagaaaccccgtccctactgaaaatacaaaattagtcaggcatggtggcacatgcctgcaatctcagctactcgggagtctgaggcaggagaatcacttgaacccaggaggtggaggttgcggtgagccaagatggtgccatcgccctccagcctgggcaacaagagaaaaatccatcgcaaaaaaataaaaaataaaaaataaaaatcagtgctttgtttattaggtttcttatgtaaaatttcagatttctatctgtatactcattagtatgagcagaggagttatacataggtaaaattcaacatttataaacataagttatattatagaggccacatgctagcagtgaaggaaccaaacataaagatgttctggtccttgacatcaatgagttttctgtcaagctaagaagacaaatgtgtaaactgacatgaaagctacttaagtatttcctacccttgattatccccgtaacacatcactattcattgtccttacaaaatctgttataatcctcaattatcctgtttgtttatatattccttatatattgtttctcttctgagaataggcccctggctagatttgttcacaccatgtaattcacaatttaaaaagaaaatgggcagagtgaatagaaatatttgcttgctaatcatctatttcctcaaaatccagtaaaaaatatatatggcaggagtttatacatcaagaagagatagacacactaggagtcagccggctgaactgagggattctgttctgatacctagctcactatgcaacattgaggcagacatatcactacgcctgttttctcaccaaaagatgaaagattatgaatttttggattctcaacttcaattctcatattcataaatggcccttttaatatatcagtagatataatgtacagtctatgagacttttcttttctctttttaatgtagtggagttctacctaagattttaatttaagaagtgatgataatccctacaatgtgtgaaactaccactgcggaggtagcagtttatatataacataggccaaagcctatttctagagctgtgtgatcttagtccatctgcatcagaagaacctggaatatgtgctgaaacttcagattgccaagtcacacacaagacttagtgacctcaaatctctgtggaatgttagaatgggcattttcaataaacatgcagatagtctaatgaaaatcaacattcaggaattatttaactggaagctatctagtcagggacatctgtagtgaaaatgaggtgacatgatccctaccatttcgtaagacactgtctgagcatgaatccaacacagagaagagcaagggtgacagaaaaaagagagttttgagtcctgatgacattgattgatccatggatcagtgacataagaaactagcacaatcatggatttatgagctgataaaatctatctttgcttcatcttttttaggttcgatttctcctgatggaaaatgtcacagctaatgcaatgttttactcaaaatcttccataacagctgttagtgccatagggttatatgtaaaaagagtgaggctatacaggttgtttatggttatcccttttattggttaatgacattctagtattggttttggatggttgctgtacatgtcatatgcttgttaaatattctgagagtcaaccctacataattgcagatttcgtaatatattagctattgctatttgctgtggatgttgagaaagtaaaatagtaaacataagtagtattgtataatagaaatatttagaaactatgttaagagaaccattgcctgacttcagttggtagtatgtatcacccctggctatagttagagtgatcgtgcactcttctagcaggattctttatttttaaaagcctgtacttcatctacattggctggtctgttttcctccttaaaaaagtaaaaacttgagaaaacagaggttccagctagagaagttaggccagagaaagaaagaaagggtatccacattggaaaaaaggaatccaattgcctctctttgcaaaccacataatcttacatatgtaaaaatctataaaaactccaacaaaaagtcctagaattgataaattaattcagtaaagttgcaagatacaaaattaacataaaattagtagaaattctatacaccaataacaaactatttgaaaaagaaatcaagatagtaatctcatttataatagctacaaaaaaaaccctaggaatagatttaactaatgaagcaaaatatgtctacaatgaaaatcacaggacactgatgaaataaattgaagagaacacaaacaaatgaaatgatatcctgtactgatgggctagaagaattaatatttttaaaattaccgtaacgaccaaagcaatctatagatttaatacaatccctatcaaaacaccaatggaattcttcactgaaattttttaaaaattctaaaatatatatgggaccacaaaggtccttgaatagccaaagcaatactgtgtaaaaagaataaagctggacccgacttcaaaatgtactataaagctatcataatcaatacggcatgatattggtataaaaacagaaaaatagaccaatggaaaagaatacagaaatcagaaattaatttacctattgcagccacctgattttctatagaggtaccaagaagatacgttagggaaaggacaatcttcaataaatggtgctggaaaactggatatccatatgcagcagaatgaaattaaacccctatctctcaccatctacaaaaatcaactgaaaatgcataaagacttaaactaagacccaagtctataaaaccactagaagtaaatataggggaaacacttcaggacgttcatctaatagattttatagataagacttcaaaatcacaggcaaagaaaacaaaaatagacaaatggactatatcaaacaaaaaagcttccgtaaagcaaaacaatgtagtaaagagaaaacctgtaggttaagagaaaatattgcaaactacccatctgacaaaggactaaatatccagaatatataagaaatttaaaaacttaacagcaaaaaaaaaaaaaagattttaaaacggacaaaaagtctgaatatccatttttcaaataaacccatacacatgaccaacagatatttgaaaaaatgctcaatctcattaatcatcaaatgaaaataaaaaccacagtgatgaagtatgtcacccctgttggaatggccatcatcaagagaatgaagtgctaacaaatgctgacaaagttgtgaaggaaagggaactcttacacactgttagtgggaatgtaaattagtacagcagttgtgaaaaacaggatgggggtttcttagataactaaaaatagaactattataccatgcactccagcaatctcactcctgggtatttttccaaagaaagaaaatcaatatatcaaagagatacctgcacctccacgtttattgcagttttattcgcaatagacaagatatggaatcaacctaaatgttcatcaacagatgcctagaagtatgtgttatatatgcacaatggaataccatttagacataaaaaagaataaaatcctgtcactcaatacaacatgcgtaaacctggaggacattatgttaagtgaaataagtcaggcacagaaaggcatattgcatgttttcattcatgtgttctcagttatatgtgagaactaaaaatcatctctcagaagtagagagtagaattgtggatattagaaggtgggaagtgtagggagaggggaagataaggatacattggttaacaggtataaagttacaactagattggaggaataaattttaatgttctgtagtaatgtagagttcattaacaataatttcatatatattttcaaaaatctagaaaaggattttaagtgttaacaacacaaagaaataataaatatatgaggtgtggatatgctaattatcctgatttgattattacaccttgtatacatgtaataatatatcactgcatcccttaaatctgtgcaattaatatgtcaactaaaaataagagaataaaagtaagaaaatggataagatgagttgaaatgttttatttcagttttaaattgttaggattttatgccgattaagggaacttaaaaagcaaaactctaatagattaaaattgagttgtttttcaggagtgtgtaaaatgatgttttacacacctgctttatagtgataactggtcacagcaagcattattcaactttgtgaatcattattttagcctatttttttccctcaaatgctgtagaaacttgaggttggctgcaaactgaacagcttacgttggttccctcaagtatgtgagattgcaagtgcctaaagattggagtagggggccgggcgtggtggctcacgcctgtaatcccagcactttgggaggccgaggcgggtggatcatgaggtcaggagatcgagaccatcctggctaacaaggtgaaaccccgtctctactaaaaatacaaaaaattagccgggcgcggtggcgggcgcctgtagtcccagctactcgggaggctgaggcaggagaatggcgtgaacccgggaagcggagcttgcagtgagccgagattgcgccactgcggtccgcagtccggcctgggcgacagagcaagactccgtctcaaaaaaagaaaaaaaaaaaaaaaaagattggagtaggggtagattatcatgctcatgtattatttaacttgtaaatgagacacgtccttttgtaattaaaatgataaggtagaatagaaaatttaaaatattggcatagatcaccatcttatatctgtcaatataccacttagacacttaaaatatttgatacataagtaggtaatggtctatattttataaatggaattttctggtaattgcaatgtgtttttcatttataggaaacaggatttgaggagtaaactgtagttaaaaaaatcattaaaatgtaatcctcaagatatacttatcccttcaaaacatgaaatgtgaccatttaaatgtataaaaatagaagtatgaatgctgcaatgctgcctatataaattgcatttttgcatgaaatataatgggggtgaatgcctaaagtgcattctaattagcctaaaagtttgtgtaaagaaaaataaagtaactgaaatgcattgaattgttcaaaataagtacatgagagcaatacatctcctataatgaaatttaaaaatcaaaatatagtaagattagaaaacttgatcaggaatacaaaaacataataaataggaataattttaaaatatagcaattttgacatttctattttatagtgactcacttctatttaagcaataaattctttaatgttcattcagggagcatttttttatttgaaatgagaagagtattgattttggtaaaatgtcaacaatttgatttattatttataattgaaggattgtgattcttattaagtcaccaatgaaatatgatcgctttgtaggttgttccatgagaaattctcctattgctattgtcactgttgacagtataataagttcagctagaagaaatatccagttgtttcctttggccttcattcatagaaatatcaaatgtgtgtccatatatatgtatatgttggtatttatagatagatacatatagatgcacacaaatgtagtcaaattgtgaattaaaatatgtctgggaaaatgatacattattttgcaactataggaccaaggaaggatacaaaatgcagagacactgaagaacaaagtacttaatgctttacattttacagatttatcagttctgttagaccccaagacctgcatgttacaacctgatatttcccatggaaattgatagatggctgcacccattggaattctggtctataaaacatttgtgaggaaaagatccagatactacagtctaagtttccatcccaccaatcatttatgattgaagaataagcctattcatgttaaatctgtagttttatcttgcctgattttaaacctccccatatgaacttaataagttagcatttgagacagcatggcagcttcacattgattcgtgtccctccagacaaatgatgaaggaggctcttgttacactgatttccaattcctatcccctgaataccaaaacaatccatatggcaatttattaaggtagtagagaatgtagatttcttcacttgaattggaagtttggtaccatatacttcagtccaatcaaaatggagccatgccattggaaaagaggacagctgcctttatttcaaaatgtttattcccccttttactaagtgtatactgttagaaaacccttctattccaactctatcagttgactaaaattctatttttccaattctaattaataaaatactttgtatttaaggcatttaaagaattcaaagtttctgctaaataacaatattatttattctttaatgtgatattgacttttgaaactgtacaaaatataacatcttggaaatcaatgaaacttcttccaataggtggtatcttgctgtttccagtacttcaagatgaagatggtaggtttcagaaacagccaaatgtgaatatgagaaacatctacaaaaatgctgcaaatataaagagagaaaatcctagaagtgaccatacaaatataaatctaatatcccatgcagttaaaaagcctcatcatattacacatccactattaacaccactagttcattcaacccactgtgacctgacagcctggccaccactggcactttattacagcttctgcaaaggtatgcacttgagataaaagcctcctctttattctctaccatttctgtcctctgggagttcatccaccccagtattcattttcttttactagaagtaacaatcaggcaaagcaaaaacctcctttcttctgcctacatccaaataatgttccccatagcctgagaatgattcctgattgaatggttttatgaacttacggtattctgacccctcattggacatatgccatgactgcatttgatttttcattatatacaaaataagcaagtcaatttgcatataatatataagcataataagaacagacacttcccttaggaagcccaggcagagattcaggcattttaaaaacttcaagaagaaacatacccaccttgaactgttagaaagcaccaactttgtatttttctctactgcacatccaccgtaatatatattgtagaatgtatatgctcaaattagttgccagcactcaataggccttttcatctgtcatcagttaatcatgtggtcttttttattgcacattattatttgaaataggaagtattgttactataaaccaactctaagtagaaagcctctgtctcaagctcagtagatgggtttttaaccacagaggctttctggaacccaagtacatcggtcatgtgagacccagtgagcccttttgatttaaggctgttctctggggaacattgccagctttatccttaaaatcattgctcctagaagacaacagtttcagattatttctaaatgagaactatccaaagataatgcaagtcacatacataatttaaattttctaatagctgcatttacaaaagtaaaaagcacatgaatttaataatatataatatttatttaacatatatccattagcatttcaacttatacataatattttaggatgttaatgagatatttcatatattcttttcatactaagtcttcaaaatctgttatatattgtatgtgataagcatatcccaatttgggccaaacatttcaagtgctttatgaccacaaatgtagctcttagtcatctaaagctatgatgctaaagtcacatataaatatttgatgaaggattgaatggtacagtttccctgtgagattttgatgtaacccctttatggagatattttactctacatacacatgagaatttgccctgatcaaaatgattaaaaatcataggtttaaatagacacactaagccttgagaataaacctgtcagtgtgcctggcattacgtaaatgactttctctgataaaaataaaattataatttaatttcagaaatataaccaaaccatttttcaatatatgtgaaaattacaatatgcatttctaactatatatatgcatttttagaattaaaattttaaaatatcacttattttgaactaacaaaaaaagtactgggtttataagctgaaacaattagagaaacatatatagactgaaatgcatgtttatgaaataaagacattgaatattaataactgatatgtcctaatcaagaagttagaaaaagaatagtagctaagcctgaagagtgctgaaagtgaaaaatatcaaaagatatttggaagactaggataaagacaggaaacaacacacacacataagtatacttgtgtatgtgtttacagatataactaaatgcacatatctatacaaagataactacatagatatcttagtaaagattattttttgaaatgtatgtatttcatatagattattttttgaaatccaaagacaatattataaacttttaccaacatttttgaaatattataggaaatgaagtttctaaatatatataaattactgaaagtgattccagaaaaaataaaaaccgataaaaaaactgaatcaatagttaaatactacctacacagaaagaaggaaagagagaaagaaagagaaaaggaaagaggaaactaacagtaggtctagtaggagtaagttctacaaatcctaagaagtaaatttccacattcaaatgcaaaactgctccacaaaataagcatggtataaagttcctaaatcactattcaaggatagtgatgtttaatagtaaagttggacaattacaggaaaaaaatgtgtaggctaacctgtcttatgaacatgtgtgcaaaatcttaagttaaaaattgacataccaaatacctcaatgtattttaaaatgaatagttaccaattagatttacagaaaattaagtggtttgatatttgtgtaattaaccacgtaaactgattaaaggaaaaatatactatgtgatttcctaaatacatgcagaaaagtcaatacctacttaaaactttttaaaagataaactatagaagtacaaaataagagagaaatttaacacaagaatatctactgaaatcgatagtaaacatgctatttatgaaagataagagatgcggtcatttctgctcaacttttttttttttttttttttttgggagatggagtcccgctctgtcgcccaggctggagtgcagtggcacaatctcggctcactgcagcctccgcttcctgggttcaagcaattctactgcctcagcctctcgagtagctgggactacaggtgcctgccaccccgccttgctattttttgaatttttagtagagacagatttcactatgttgaccagggtggtcttgaactcctgacctcagacgatccatcagccttggcctcccaaaggtctgggattacaggtgtgagccaccatgcctagcctgttcaacttctaggatagattttggccaaagagaagaccaaaaaaaaaaactgggaagcattaggttaaaaaaaaaaaaaaaaaaaaaaaagataaatgaaccatcatctctatatgatgtgattattcctatacaaaatctaggaaaggatggtgaggacacaataaatgtgtcctcttctatcttagtaacaactgtttggaaatgtaatgaaaaaataggtattgagaaatacattaccaaaattctatgatatcatcatgtaaaaaataaatttcatcttatacatgagtggaaagacttaggaaagtttaaattcagctattcggctaaatcaaaaaattcaagaaaatcctctcaaaattataacatggtatattttctcagtacttgacaagctaactcaaacttacatgcaagaacaaaaagtatagattagaaagactatttggaagacaaaaaaagactgaggagaagaagacaacacatcacaaattgtagcaattaaaattagtaaggcattttgcacagattaactgatagaaaatcaaaaagtccaggaaaaaatagatatggaaacttgctttaagaaaaaatatattttaaatatttggagaaaggatgaactatcaaataagttgtctatccatacagaatatccctaagtcttactaaacacattcaaggagaaatggggaaggcttggtcattcatgtgaaaagtaagtatgaaacacagatttgtgttttgaatacactcccttaattaaatgaaaataattcatcagcgagttcctttgcttcaattaaattatgtaaactttctaatgcacttcagaattatttttttctacagtgatttgtactctgcagtttcactacagatgaatatttttgaattgtatagtatatgattcataatagcaacttcatctagaacactgatctgggaagaagataagctagattttattttattatttacttacttatttagagacagggtgtcactctgttgcccagtctgaagtagagtgacacaatcacagctcactgcagcctcaacctcctaggcccaagcaatcctcccacctcagcctcttaagtagatgggactatgggcacctgccaccatgcctagctaatttttgtatttttttatatagaggaggttttgccatgttggccaggctggtcaggaactcctgggatcaagagatccattcatctcagcttccaaagtgctggtattataggtgtgaaccatcacacctggctactagattttatattgtagtgtgattcatacaatgctatggaattaaatatttttgtgaaatctctggcaaaaaataagcacaatttgtggtcactgtggctgatatgtattgcaatggttgtggccgattgggtgtattaggagaaacccaccaagatccagcacatggctaatacccacctccttaccaatagcattctgtcttgatttccatggaagcaaatcgccacttcccccacccctgacatagatgtaacaatactgtcaccagcaagaaatgacagcttaaatggtctttcattaagcaaaatctcacattaaatgtttggtgccttttctagatccagaacgcattgggtttggggcatagaaaaaggcaaaaagatggaagagaggatcgttctcaaaaatcaggaatttggaaatcaactctaaactgtcctgtagagacagaaaaagtctttgtctttcgggtatttgttttccagtatgaattctgatatagctacttaaatttatattgctctcacccatttatgtattagtgataaatgttatattcttacacttgagtaatggactcctctgactcaaacaatcagtttgcatattggtttttggctcttagccttataaaataccatcttgtttatgcctaggagggattcaagcaaattcattatacattttccatatcttaaggataaagtatttgttatttgttttattgcaaagttttaagagttgcatcttttctttggcttttgttttattggaagagtgatggtattctctcatactagaaaagtttcagctgttatattgatgattacctggtacatttctacagcttattaaactatattgctgtattttaagatcaaaactatacagatcatgaggaaaaccacaaaagggaatacaagaaccagagcttagccattggggcaggagatctctgtagccagtaatatttgtaaatatggaaaatacctttaagaataaccagaattcaattgtctcacaagaaacttcaattattctgtactttacaaccctaccctaaaatatgcaaaatgagcacatgaggtttcatgcacaatgctctagacgcctgcattggacatgcttaattaacatcccataaggttaagcctagggaattgaggagcataagtcactttttgctgtacctttaagacctgggtaagaaaggacacaaaacactggaggaataatcatggttaaggaagaaaataaataaataaaaaggtactcattgctaaaaactcatgtttactgcagatggattttatatttgactggataatgtgattcccggggtggaaatcaactaacagatggaatttgatagactctccaatgttaaggtgatcagacttaagaactaaaccaagcaggaataacagaaactttcataaattcaagcaataaaacataccactaaatgtgtctcatgctgtgttagacttcaggcgactcatagaaaggccttaattttaaacacagagcaatatatagtcacaggagatgaaaattaggcaagagttaatgataattttgtttctataattaaacagcttaaaatgcaatgatagtaactatacaaatctaaataaaaataagtagtaagagaattaatcaaactcactatttatacttttactacattttggaaacaataagctgtggggattccaaaagcagggagggtgagagggagaaaaggttgaaagattacctattggatacgatgttcactatttgggtgatgggtatgttaccaaaatgccagagttcagtctaggtcccattgctcactggagagaaagcaaatcatctagacaatgagtgtttcctggaatggaggctttattaaagtgctgcagccgagaagtgagatcagactcaaatccatctcttcaacgaactaaaattaagggttaatatagttgggaataaatgtaaccatgtttgagaaaacaggaattagggagtggaaagaaagaggagttagttaacaagaagcaggtagctggttatgcagtcatgatgagtgaggggtctggtgtctcactgtccaaatgtggtgatctggtaagcttcagttccttgatactatttgggaggcctgatggttgatttcctaagaaaggaactcagataagacaaatccaagtttctcaagttttaagacttaggatagtaaacttctgtgtttattcaaaagaaacgaaaagtatcagctctatcagaaaattgggccagtttcaagtacactagaagcccaatgcccactatttcacaacatacccatgtaaaaaaacatgcatatgtaccctctgaatgtaaaatttaaaaaaaataaaaataaaaatagaaggttttaaaaaattgtatgttttctttggattgtattttttcagtcttagaaattaaaggaagtaggtgataggaaagtgactctaaacttctaattacatactctggttatattttggtctcctttgcctgcctcctccacctccagcttgctcatatgtgcttgcttgctcacttgctctcttgcactctctctctctctggagctctctccaaatctccctcttcctgcccctccctccctcttccaacccactctctcatccagaagtagtgaaggagtctagatttggttaatgtagcctgtccttgctgttttgttgttgtgacaattattcctgtttatctttccaaatttaaacttcaaggattcaatgatccctagctgcctgattcttaaagcaaatttccaaaggaatgttgctgtaatccttcatccaaatgacctcacaactgggagagccaaggtagaaagttgaattaataccaggacctgtggttcagtctgaagaggccacaaaggcttttgttcctatttagtctcttcgaaactaggtgccacaaaggcttttgttcctatttagtctcttggaaactagatgccacaaacaatcttttttacttttggtagtcagttcagtaaaacatagtgtctgaaaatgtttaaattccttaaactatacaatcggtgacaaagaaaactgatgtgatgattctttcattttttgtgggtcacagcagacaagaacttttggtaaagactaagggggtagaagagggataaagtgtctaggaggagaatttatagatcccaccaaaatttccatctctattgatcatctgccatgtcacctgctatactccgaagtgtgagcactgtcatttttccctgttaggtgatttgggtcacaaactggaaaagtacagcatttagggagatcgaaaaggaaaagttaaagaaggggcttgaacataagggagaaggatctgcaaaacaacgaggcaactagaacaggccaccctggaggagtcatgtgcatggtttttattgttggattgttatttgtttctactcttattaaattatctgttttaaaaatctgatttaacttatctgtatatattaaatctaaaataattttaagtgcatattcaatatgttaaacatataattttatgacaatgacttctggtgaatcatttattgcctttctgcaaaatcttttagttacaaatacatgaatatgaatacccaagactatgacaaatgagaactattatttcacatttcaaatgaatgtcagttccattcttggctgcatagttcactgccagaaattactattaactctagccctctagttctaaactcccttttctctcaaaaatcctaaaaggtggctgaaggtagaattatataatactttgaagtcctttagattcccgatattgaaagtctactcactcatactttttaattcaacagatatttattgtgagtcgactatttgcagatcaatatatcacatattggagacataataacaaacaagacatagatattatagatcaggaagacaaaaatagagaagcaaacattaataagttatggcaactactataatagattacaacaaagtaatttggtttaatactataatacaaggaaggaggaataaggtagaagtcccaatttaaatataatggttaaagaagctgaggagatagtatttaaattgagacctgaaggatcagaagtcatccgtgaggagaacgaggagagaagcctacagaaaggctcatagattctattctctgcacagttcatttactgtttaacatccaaatgccttcactctaggtctggattattgctgcctcaatctggcccataaattcctaacatagaggttatgaacaatttttgtgaggctgtacaattctctaggaataatgcagacttacaattttgtagaccttttgagggtatgagtatatgggcattttcctgaatagacccctagctcttgccacattttcagatggttcaaataccctcaaatggttaagaacccttttcatattaactttcttccattctgtttgtatatcgtgtgtttgtttttccatgttctctcatttctttatctactctaattccattaaatcttctccctgggctacttgacttgagagaggctgatttggggacattaatttaaaagtcatattttggtaataaaaaatacagacaacttctctatgtaaaattagacaatgatatgattttatttaaaattccgattcaggaagtacctgtgcaggtatgttacatgggtatattgtgtaatgctggggtttgggcttctagtgaacatatcacctaaatagtgaacatagtaccaaataggtagtttttttttaacctcaaccctacttccattctcctacattttagatcccccagtgtctattacttctgtctttatgttcatgtatacccattgtttagctcccacttataagtgagaatatatagtgtttaattttctgtttgagttattcctgtaggataatggcccgcagttccatccatgttgctaccaaggacataattttattctttttaatgacttcatagtattccatggtgtatttataccacattttctttatccagtcaaccactgacggacacttaggttgcttacatgactttgctattgtgaatagtgcagcaataaacgtaagagtgcaggtatcattttgataaaatcatttattttcctttgggtagatacccaatagtgaggttgctaggatgaatagtagttttatctttatttgttttagaatcatccatattgttttccatagggggttgaactaatttccattcccaccaacagtgtataagtgtttccttttctccacatctttgccaacatgctattttttactttttaataatagttattctatttggtataagatggtatcttattgtggttttaatttgcatcgcttcgatgattattgttaagcattttttatatgtttgctgccatttttatgtccttttgagaagtgtctgttcatgtcctttgcccactttttaatggatttgtttttttctaatgttgattcgtttagattatttgtagattctggatgttagttcttttttggatggttagtttgcaaaagttttctctcattctgcaggctgcccatttactctgttgattgtttctcttgcggaacagaagctcttttgtataatttgtctatttttattgttgttgcatttgcttttgaggtcttagtcataaattctttacctgggtcaatgtccagaagagtttttcctaagttttattctaggatttttaatggttcaggtcttacattgaagtctttaatccatcttgagctagtttttatatcgtgagaaataggggtcatttcacttttcttcatatagctagccaggtgtttttagcaccatttattgaataagatgtcctttccccattgttcatttttgtcagctttgtcaaagaccagatggttgtaggtatgtggctgtatttctgggttctgtcttccgttctgttgatcgatgtgtctatttttgtaccagttccatggtgttttggttactatagccttgaagtatagtttgaagtcaggtaatgtgatgcctctgtctttgttgtttttgcttaggtttggtttggctacttgggctctttttgggttccatatgaatttttgaattgctcttgctaaatctgtgaaaaatggcattggttatttgatagggatcatatttaatctgtaaattgcttaagaaagtagggtcattttaatgatattgattattcctattcatgagcatgggatgttttctatatgtttgtgacatctgtgatttctttcctcagtgttttatacttcttgttgtagaggtctttcacctttttggttaaaagtatttctaggtatttttgtggctgttttaaatgcgattgagttattggtttcgttctcagctcgaaaatggtggatgtacagaaatggaattgatttttgtgtattaattttgtatcttgaaaatttattgaaatcatttatcagatctaggagtcttttggaagaatcttcagagttttctagatataagatcattttgtcagaaaacggagataatttgactttctctcttccaatttagatgccttttatttctttctctagccagattactctggccagtatttccactactattttaaataggagtggtaaaagtgtacattcttatcttgtttctgttcttagtgggaatgctttcagcttttccccattcagtatgatgtatgggttccttggttgttgatagcttttgtgtggtggctttctcaaatactgctttgctgtagtgatatactggacatatgagccaacacactatctcctgtggggccattccatggggctttgagtttctcaggcatccacctctgcagactttctggtttccttttccacaccccagcttcttcacgtgggctctctgataggtcctggctcagttttccatttaaagcatgaccattcacctgcaactctgatttattttcttttgtgtatgtgtatgtgtttgtttgttttcatttttagacagggtcttgctctgttgcccagcctggattgcggtggtgcaatcttacatcactgcagcttctccctcccaagctcaagcaatccttccacttcaacctcccaagtagctgggactgcaggcatacaccaccacactcagctaatttttgtacatttgtacagatggggcttctacatgctgcccaggcaggtctaggattcctggactgaagcaatccacctaccttgacctcccaaagtgctgggattaaggagtgagccactctacttggtcatttttgtctttctgagatagctggcatccactgtcccaagttagccatcttggggaaacaacagcaacaacaacaaacaactcatgattttttttaagcttttataattctgtctcctgacacaatatttttcacttttcatacatttcatacacttcatacattttgaagtaaagacatgcacactcattatacaaagttagcctaaaagaataaaatcttaaatcaacctatcaaaaccatttacaatttttttttgttaaaaccatacaatgttagtaaaaaataaacgttttatactaaaaaaatagtggtacaatgttggatttcttcttgacagatacagaaacatttttattttctttataataatgaacatatgaagtgaaatatattttccattgtacacttgaattgtttactcatttattaaagtctcatgttattacatggtactttaccactaatcgtacctagattatatctagagtgtaatttaaaggaacttctatgctctgaaaacattgtatggattatgtattttctaatccatattttcttaacattctaaagaaaatctaactaaatcagtaactgctttcaaagcataattgtctcaccaaattttatagattaatgatcacatttaaacataatgtgaaaccacttattatttatgaaatactttttctacttcaaaattgcattttaaataatttttagacatgacaatgttagacgggaaacaccaccaatgatggtagtagggatataatttatagtgttagtggactgctctatgccctttggggaaaaaatgccctggggtaaagttatgagaggggaacatacataatttgtcccagtaaaacttatcttccccctgtatttgggggaaaacatttaaaaatatagatacttggaaaatgactgaatgtatggaaaaaacctaatggttgcatattagagttaaatatatgtaacatgttgtacaaaagaaactgtatattggaacatgtctctaaaactcacatcacagtgaaatctttcccataaaggaagaaaagaacaaatggagccccataaaatcttccccagaataaagtataatacatcatgccctaaatttttgcatagcctccttggatgttctgatattcagagtgtttaattttatgttctttaaccccaatcactgaaatatagaacacagaattatatttttcagccattattaaactttcagttcaattaattcttatacttagtcaaataggaattataacagtgcccaagagaggactttgataaatctggttttggatcttagaactgagtttagagagaccgattatcataaaggactatattgaatttatagggttttttggggtttatttgtctaggcaaatattaatctatttttatcatcagaatggaacttcatgttaataagcaaggagggtaacagagtaaataagtaccaattgtactgtttcctcttttgtcttcctttgctcccttgtacttcacctagtacttcacttactcactaccctattgctgtcctgttggaatgattttcttactgatcctaggagacaactcattgtccttacagagagagttgccctatgactgggcatgccatttggacctacttttccaaacttgtcatgcctgttacagtagttctgtgatattgtggtgtcttatttatcactactctttactttgttttttcctatcctcttccttcctctcttcttttgaaaatatcacattttagtaaagagctcaaggtctcaattctggaataaaacttcaggagttaaaattataacccccacatttaccagttgggtgacttttaagaagttatttaacctctttatttctcagtctccccatctataaaatgaccctattaattttatttactatgtagcagtttaagattagtaaatgaaaaaatacagatatgtatgaaatgtatagctcataataagcactccataaacattagttattacttattaaagtttagaggtgatagttagaggctaatagtgacctgagagagaccttgaggcatataagtaatacatttttaactctatattctttctgccatctggtttggtttgggtttttaaatgaaaatatgtaagaacagggaagccatgaataaaagcggagaaaataagactgacattctttctctctgtcatttaccaacttattgggaggaattgaatggttttgtatttaatctttatctaaagcaatctgtacggtttatctgatctatatttttttattcctaatcaatacctggaagcatttagacatcagcagacattggggtttgtgtttgtagttttcaataatcagatcagtccactctaactcctttagtttattgtttcattgaactacagagatgattaaaactgagttatgttcttaacaatgtgactaaacatgcctcagttgttataattaaatttccattatattctatgtgttggatttggaaataaacgtattctacctgtaacagtttattggaaaaagtgttatatttcaggcttggattagtattttctttaatgtttggttgttgccaatttaactttggcaacatttatcaataaatatggcaagtagtaatattaatgggttaaatattgattgttcaaggttggcctttcttttaatcaattaaggagcagttattgaacaaccttcagcttaatcaatgccttgctcactgccttcatgtggtccctctttccctgctctagtagcatccatttgtgtttgcttattctgtttgaactttatgaaaaactatttcacagtagcttattgtttttataatatttagtatattgaagtcaaaaagagttttttttctacaacctattccatgcttttgcccctttatattgaacaatctagaaactccaggattattttctttgcttctttgggaaagctccaaatttctgattcagttacttggatctccatttaggcttaaatgattcaccagctaattaacacagctgagtaatgataatattaatcttgaaaggccttttgggggccttgtaaaagtaaactccagacttttagagtagctgtactgagataagattacagatctcttatttaacctgtgttggaatgattgttaatgttctgcactgttggtattgttatgatgttatattttacataaatatataatattgtatataaaaatcaaaatgaaactagagagacataattatcactgtatgtgtgcataattttcattctctgcatatctgtatcatgtacattaatatttttaaaaattaatattttaaaaaatgaggcaaggtgcctaattacttcattttcccatctacatctctcaatgtcatctaatatatctgttaaacaaaaaaagagggttacttagaatatcaactgcagaataaccatctatgctaccaccagatgttaccacatttatgaaagtaaaacttttaaggaaaacaaaacatttttaatgtttacttcttttatatttcaacattgtccattaaaattcttatcaggaaatggggatagataaaacgcaatacttgggttgttttttctttttggaaatagaataaatctgtgcccttaggcactcttcttcaagtttctcacttgggccatgattatacagattctatttaaacaatgaaatgcttgtattacatacatttaataaccagtaatcatgcataatatgtatatatatatatgtgtatatatatatgtatatatgagacatgatttacatctgattcacctgtcttttgccaacatctagtattgagactaacacatagtcggtgctaaatgtttgtagaatgttgttaacttttacagtatgtgtaatgcaaaatagctatacaaatatacacagttaagaataaactatatgtaatttacagttacagttgtgtaaagtatgctgttcttggttttggcatgtgagaaatttcttttggctattcaaaaccttttgcaattctaaaatgcttatcttgaaaattcttactgaactaatgggaacacttgaatttctgatcagtagtggggaattcagtgtaattgtactagagtttaattgtgaagtgttcttcaaaccataattgttttatattactgtagtgcctgggaataatcagaaccatagccattttataacaaaatactgcagtgatatgctagagccaactcatactggattgcaagaatgggtggctggtatgtcttcccaattccatgtccatagatttcacattggtggcttcaaaagagccaaaccgggagtatttcctcaagaaaatgggtaaaagctacaaatcagggctttttttgttccccagaaagccagcttttaaacctttgttagctcatcactggaaatatctaacaactcaaagatgctcaatttgtttaggcttttaaaaatggatattttcatttttctcattttacatagtaaacattgtcttacacttttttttctgtaagaatctgtcgtgaaattctttcaggaaatataaataaggaaaatataaaaagggaacataactgaaattttaaagaaaagaggatgacatggaaatatgacagatatagagaaatgaagtactggaaagacattttttagaagtggatctcatgtagagtaatatactaacacatgtagcagtgatggattgaagagtaatgtggcactcatgaaattatccttctgagtttctctttgaaagctctttaggcccttatatctccttatgggcttcactaaagaaatgctttaaacaaatatttgaaacctccttttcccttaaatccaaaaatgtcagattaatttaaagcaatttaccttttagtttatgttacttatatctgttaagatatatccatatttttgtaagctattgaagagaacagtaaacaaacatatacacctcatattcctgcacttgactgaaatataaatggaattgttcttttcatgttggtaattaccaagagttacctttagtaataagaatccccttagactgtaatttaataaggcaaccttgaatcttctgaatatttctttgaatggttattctatgaatatttccccgacacagatgtgctttcaacaataaaatggtgataatgatgtggtaaaaaatattttataaaatattatgatattatgttgccttttggacttcagaaattatttggaaatctaaataattctgttttacttttaatatttgcttattaatataaatgtggcagcctctgaatatgcaaccgcatggaatgattataaaatgaggttaagcatgtaactacatgatatagatggcttgtaaagatgtttaattacccatactaacaaatatgtccggcataacattatttaagtttgcaggcaatgcattgtgtgggggggcgttgaaagtcttgttttaacagcaatattaatttccattccatttggataattaatatgtatcagtggtcacatcttatggatattaaatttccagtatgtatatggagcaaaaaaaaaaaataaaataggcttcagttaaatgtcacacaaaatttaagtatacagaaaaatcatatgaagtccagattcaaaagagggagttttaatgttaaaactgtattttaattttgaaagaatgtgcttgttttgtgatttatctcaagagcttgagcaaataaaattttggatattattgaattagaaatagcttagtgttctttaataaattgcatttcccattgtaaatattaagcaaattattattttacattttcctttagggatatgtgaacttcatattataattatgtgatatatctgataattgactttaacttttactaaatttacacaaagaatctttaagtctgtgaatccttagcaaatcctttctatttaatgctcaaagtaatttaagagtgataattgtataaagatgagtaagttagctatgggaagtttttttctctctttctcataagttaagccaacttctgtggtttttctttacttcttatttattttaccccaaatcttatcatattcatttttgatgtatacttccatatttacttagatatacccatacattcaccagtattttttcccattattcattcttgaattttacacattcagtctggaaagatttattttgatttaaatttattgtagtgagaaatgattggtagtaaactctactactttgttctcagttttaaaagatatttttaatgagtatagaattccaggttgagaattgtcatcaatcaacacactgaaaatattattctattgtcaattggtttccatttttgctgacaaaatgatagttattggtttaaatgacacatcttaagttgatttatcctttctattttgttacttgtgatatctctttgtttttggcattcagcttttttattataaactgctaggtatagattgttatatatttgtttctcctgctagagacattttgggctttctgggtgtgaggtattatatcttccaacaattctagaaatattttttatactgtacgtatgataattctattctttttgctatctctttctagaaattcaaagagacataacttttaattttctcttcatattattttatttcaaactattcatctcctcttctctctgtaatgaattttttctcattcatcttctaatttattcagttgtatctatagcgcaaattcaacccattcttctaactttctaaaattaatttttgtattttttatttctaaaaaaactatttggttgcttttcaagtgtactttattaatttaatgctttctaactccttgctcatattttaagggtttttttgaaacataaccttttgtttggttgttaatttttatataaaaagtctatgtgagtttgatttttcttctatttctactttctctcattcataccaacttgctgccttatttattttgtaatttttcactgcagggacatgtttctaggaaacattttactgggtaaaccatttgaggctatattgaagttgcattttgtccagtgaaaattcgccattgatttaattcttctcatggtgcttttatgctcaataggtaacacaaaaatggaaacaaactgcaaaattgcatgaattcttgttattaaaattttgtggtttcattttttgttttaattttgaattatttaatatttctatttaatgctaaaatcaagacagatgaagtgttttcctatagccttgtgtttatttctctttaaaccttatactgagttgctgttccttaggttctcagatttacatgatgtcttctagtgttctccatacatggggtaaaacttgggcttttccttctgtgtattgcaccttatataaacagatgctcaaggatatcaagatttcatttagagagggtaatgctgactttggcatttactgaacaacttctacaatttttgcttttttattctttgacctctgtggacttttttgtcttgctagctcagtgatgtattttaaaggatacagttatttgactgtgtgtctgtgtgtgtgtgtgtgtgtgtgtgtgtgtgtgtgtgtatgtatgtatgtatttacttagatgtactcaaatattcaccagtatttttgcccatcattttttcttggattttagacattcaatttggaaagatttattttgatttatatttattttagtgaaaaatggttggtagtaaactctattactttgttctcttttttaaaagataattttacagggacacacacacccccccccataatatgtacaattaatacatatttaatttttcttcatacagttttttgaattgtgtcaatcaagttacgaaaacaaaattctaggaaacattttcattatgtaaatgcttaggtctcaggcatgctatatttactgaatcagaatattcatatctatgataagaatttacatatgtctttcttataacaaactccaaaagtaattctggtatatattcctgattaagaaaaatagctatgggaaatgcaaatcaaaatcacagtgagataccaccttactcctgcaagaatggccttaattaaaaagtcaaaaaataatagatgttggcatggatgtggtgaaaagggaacacttttatactgctggtgggaatgttgctagtacaaccactgtggaaaacagtgtggaaattccctaaagaaataaaagtagaactaccatttgatccagcaatctcactactgggtatctgcccagaggaaaagaagtcattatacaaaaaagatatttgcacatgcaggtttatagcagcaaaattagcaattgcaaaaatatggaaccagcccaaatgcccatcaatcagagtggataaagaaactgtaatacacacacacacacacacacagacacacacacacacacacacacaccatggaatactactcagccataaaacagaacaaaataatggcctttgcagcgctttggttggagctggaagccattgttctaagtaaagtaactcaggaatggaaaaccaaatatcgttcattctcacttataagtgggagctaagatatgtggacacaaaggcataagaatgatatgacggactttggggacttgggaggaagggtgggttggagtgagggataaaagaccacacattgtatatagtgtacactgctcagatggcaagtgcaccaatatctcagaaatcaccactaaagagcttatccatgtaatcagaaaccacttgtacccccaaaactattgaaatttaaaaaaaaagaatgactgctataagatataattgaggttatgtctgaatacacatccaaaaatcatttagccataagtttctagacaatgtgaatgagcaaatgtggaatccccctgcttacacactatatgtttgcaaggacgaggttctagacaaagggtctgctggaggactcaaatgaactagttactttttccttcacagaggctgtactccatcagggcaggttccttatattctctcagttttccagaccattatgacctgctgttaaacaggtgacatccaatcagcaattacaattcactactggtagcttaaaaatatatatatagcaatttgaatttctcactgatttattgggtttggaggaatgtacaagatggagaattgccttattcattaggcaatctgttaataatgtttgagataatcttacattaataaaaaaagattgaattgctgagaagtagtacacatcagcacaactcaaaatacaatatctataattccaaaatggtaagttatttttctccctgtggttgttgttctgttttgtttttattgttttgcttttaatctcgtgaagaaagaattcactgttctggaattctggagaagagacagttattgccagcggcagtatagaagtaaagataatttcagacaacagtaggctttcttgcacattcttttccatttcattaataacatggtccataaagggacatgctttgcgaagctgaaagtggagataggaattcctcagagagagcagacatctgtgcaaataactaacattttttagatacaacattctcttttttcactggcttcttagtgagttgctgatggaagacgaggcaatgattagcaacctcatccattagccaccctgctttttaatcacaacctataccacagtgtgtgtgcatgtgtgtgtttaatccccctgctgaaaacagtaaatttcctggatctctttgaactacaccaagaatgtaggctgacctggtcttaaaggactccattaaatatcatgcccatgtaagtaagagctgacctgttttcttccctattatgtgtgtaactcttagagcagggcatccagtgaatgcttatcagtctgttttcacactgctgtaaagaaatacaaagactgggttatttatgaaggaaagaagtttaattggctcacagttccacatggctggggaggactcaggaaacttacaatcatagcagcattggaagcaggcatcttcttcacaaggcagcaggagagagagagaatgaactgcaaaggaagaacttgcaaacacttaggaaaccatcagatctcatgagaactcactatcttgaaaacagcatgggggaaactgacaccatgatccaatcacctctcaccctcgacacgtgaggattacaggtccctccctcctcgtgtggggactacaattagagatgagatttgggtggggacacatagccaaaccgtatcagagtgttcattaagtgctttttgactaagtgtataaatgtgatttgatcatttttatttttgaaaattttacaacttcttactgcctccattgttactaccctgatttaaatgcatggggctcctacctggtcttcatacccttcctttcttctccaaaacctgtttctatcacagcagcagaatgaaccccttcaaacacaagtcagttcgtgctactcctcttttcagaaccgttcaatagtagcccatttcaccaaaaatgaaagctagtgcagtctgtaagactatgtggcctggcttctgagcatctccttgatctttcatcactcagtcatttctttaatctggcccaacggcactgacctcttttgctgctttttgaacatgccagacacatttctacgtcagtgtcttcagactcatctttcccttccctagaacagcgttcttccatattctgcctatttcacatactgaggtaccctagcaccccatagcaattgtaatcaaatgacacatgttttattaagggaacatgtagaagtcccttgagaactaaattttttttcttttaatttcaggggtacatgtgcaggtttctcatacaggtaaacatttgccattggggcttgttgcatagattatttcatcagccaggtattaaacccagtacccattagttatttttcctgatcctctccttcctccctcttacttcctaccctccaataggtcccagtgtctgttgttcccctctttgtgtccatgtgttcttatcatttaacttctacatataagtgagaacatacggtatttagttttcttttactgtgttagtttgctaaggataatggcctccagctccatccatgagcctgcaaaggacatgatctcattttttatggctgtctaatattccatggggtacatatatagcacatttacttatccagtctatcattgctggacatttaggttgattccatgtctttgccgttgtgaatagtgatgcagtgaacatacatgtgcatgtgtcattatgatagaatgattaatattcctttgggtatatactcagtaatcggattgctgggttaaatagtaattccgatttttggtctttgaggaatctccacactattctccacaaatggttgaactaaattacacttccaccaccagtgtatagcgttcctttgtctccacagccttgccagcacttgttatattattgacattttataatagccattctgactggtgtgagatgttacctcattgtggttttgatttgcatttctctaatgatcagtgatattgagctttttttcatatgcttcttggccacatgtatgtcttcttttgaaaagtgtctgttcatgtcctttgcccaatttttaatgtggttcttttcctttttattgtaaatgtgtttaagttccttatagatgtgggatactagacccttgtcaaatgcatagtttgtgaacattcacttctattatgtaggtaagatgtctgtagattgaccattccttttgctgtacagaagctctttagtttaattagatcccatttggaggtcagggatttttaatctattgtgttcccttctgtggcaccattgacaataacattgactgggtgctcaataatgtgccctcaataaatatcaattgaagagacagtgaattgaataaagaaatagagttccagttgtgtggaatgatttgccaaaggccacattgattcctaatgttaaaacctcacgaaagtctcaggaggtgtgaagcagtttggatacaagactgagcttagtcagcattcttacagtgggattttcttccctcacaggtatattaagtagatgggtcacaatggaacataaggtatcctctcttccttgttttatctgtgaagagacctatctttaggccactattaaatcctcaacacttgggaggacagatgtataagttctttaggaatttgtgttaaccttaatatgattgtaactctcagggaatttcttaagtgtagtctttcttgaactttgactttcttgtcatcatgttctgttttgttttgtttgaaggatcatcttggaggtgccacgtgcaaatatcaaacaaaatattatgtcatttcttaccacatggctttcataaaataatctttatccaaaacaaatgaattaaaaaatagaacataatttaaagtggagttctttaaattcagttgaattaactttatggaaaagcttgcctaaattgtttctcacttccttttgtctaaacaatgttctgcacaactgtgctaaggaaccatttcttacacatttgaacttgcataagcacaagagttcctgacacccaaagtaatattaccactatacttttctgctgtctataaagacctcaagtaatctatatgaagctgatatggtttggctgtgtccccacccaaatctcatcctgaattatagttcccataattcccacgtgtcaggagagggaatcatgggaggtaactgaatcatgggggcatttaccccatgccgctgttctcgtgatagtgattgaattctcatgagatctgatgatttgataagaggattttccccctttgcttggcacttctccttcctgctgccatgtgaagaaggacgtgtttgcttccccttccgccatgattgtaagtttcctgaggtcttcccagccatgcagaactatgagtcaattaaacctctttcatttatgaattatccagtcccgagcagttctttatagcagcatgagaatggactaatacaggtgccaagtgaaaattgttctctaaggattaaccaaccatgagaaagaaatgtaaaaaggaagaaccactttttccagatctcaaggaaacagatccatcaatggcatgcataactgactagctttaatttgtattgtccatttgcagggataaacgtgggacagataagtatggtaggtaagaggcatgattgcttggttctaggattctcatagagacagatgtgaatgggctacagtttgacctacccatttattatccagaataatctctagtttaaaactgataccaatgaggatccatcaactaaacttgtgaaatattaccaagtgcaaaaatcttacaaattgtcatatcacatgccaattcatttatttgtgtgtttgttgctcactcatttttttaaaatttgatcaagaaataatttaaaacactatttgaagatacacataatagagcaagaaaattaggttaaaactggtcaaatggaacaaatgaaggatagagaaaataggtcagaaagtagggtcaatttacatttaacttgcaagtaggcatgtattctttaaatgataaatctaatagttgtagagatcaagtatttgcttacatggggcataatttgcagctatcaaaaattaaaatataaaagttactagaatttgctgcaccatttctaaaagcatatatttaaagagcttcttagagtagtatgaagaaagggaaaaggttgttctttttattacctgtaactcctaccccagtctaacttggggtcagaaagtctccttggaaataatagaaaagggccaagaatattgactatctcctataccttaattctaaaatgttatcatatccataaaaacatctgtgtttattagagcactggcaatcatttgaatcaagttaattcattctaccaatttatggagcatctgcaaactctaaaatgccatgctaggcacaatatcacagaacatagttctagtcctttgggtctgagaattaaagatgggatcacataggagagattattgtttgaaggatttacataactcagatgaaagactcacaaaaaatagatatcaaatcttttcatatttatcggactcattttatcattttaatctctaatgaggtctctgtcttctttaaaataaaaaactagaagtcaaaaaagtaaagcatattatagaactctcctatcaaattagttgttcagaaaaaaaagtagatgcacgaaatccaaagaacatgttaagtggtatggtacacagtataaatcaacagcaaaactttctaaaaatttaataaattcaagttgattatacagtgtttggccaaacaggatgacttactcaagaaatagtccaatcctgttttttcttgactgagctgtaatgaagataaagtccatatgattttattttgccactgtagttagaaaaattgtcattatgtatagtagacaaaaaagtccctatgcattcaaaaacatgaatgaatataagtgcatgtttcagtcttgctttcaagcttgttccagttatccactgctgtgtaacaatacactgtaaacttagcagcttaaagcatcatcttttttactgatactgaggaccaggacctccagagggtcagcttggcacttctattccatgggtgccaactagatcagttgggaactggagtggactagaagatacagaatagcttcagcgatgtgtctggtaccttggtgagaacagctagagggctgggtcagctgagctacccccttctctatgtgttctcatggcttctccaagcgatctttctgacaagtagtcagacttcttacgtaacaacccagggcttgaagaggccagccaaagttgccagttttctcacacacaggcttggccttgatctggcaaagtcaaacttctgttacattctgttggcctaaaccattacaggccactctggattcaaagcgaccaaaaacagactttatatttccctgcaagtaatatcaaagaactgtgaccatccttaatcctctacaaaagagtagtttctgtttagtttctgaagtggtttaataatagtatacatgtcacaatgctaactagaagtagagaacagattagttgacccttgggatcctgtccatgctgttatttatttatttatttatgccatatgatttttccaggtataattagctcacataatacttccattatgttttagtaacagttgaagattttttttaaagaggaatggatattaagaacatagaatggccctatttttgaaattcattttatattgggttcaattttcttctgtgatgcagattttgttgcataattctacttgtggcacattttggggatttatgtttaaagccaatttaagaaagaatacttatcactaagaaaagcaaatacacacacacacatatatatgtacgtgcatacatatggataaacatatgtaaacatacatgttacatgtatggataaaaatgtacagatgcacaccacaatggctcaaataatcctttaggaaataattataccaaaaagattccctttatttctttatagtcatgtttagggtaaaacactaaacagaaacattaaaaccaccgccaaaagaagacattcccagtatggccagagatctggttttttgatcaatggcaacattctctgtttcttcagcttttgatttacagcttcagaaagactttgaaaatataatagaacatctttaattaaatcccccaaactcacatgcacagataaataacaatccatcagctattttgttctctaactgtaccccagagaacttgacagtcatttataccttcatttgggctttatttcagtcaagccatttagtggagtttatctaaattacagtatctgttttcttatcacaaattcagagctgtaacacagaaactaatttcaggtgcaaaatagaatatctcagaggcccagacatcagtactacaggcgcattagaatgaaaagttacctgtcactaatggatatttgtctctgtaatgagctcaggcgaaaggaactgtggctataagaaaattaggggacaccagtagcattacagacttctactgatcagcacgggagttttgacctgctccgtttccgacctgggccggttcacccctccttaggcaacctggtggtcccccgctcccgggaggtcaccatattgatgccgaacttagtgcggacacccgatcggcatagcgcactacagcccagaactcctggactcaagcgatcctccagcctcagcctcccgagtagctgggaccacaggcacgcgccaccgcgcccggcgcattacagacttctgactctgagagaacatacagatttttgttttcaagctctggaagtgagaacattttgaataagatatatcttgaaatatgttccattacttattttgggaatagtaaggagaatcccaagcaaaggagaacacccctgctattgctcaaataccatatcacataggcgatgtttcagcagaagcaattttatcacttataacaattgtccttagcatgacaccattctgcaaagcttgagtggtaatcaaatagcactgtacataatgatatcattttagcataaatattcaaaagggacattaatgccaaattcattcattttggaaaagtggatttttttttcggttttaactctaaattattctaaagtggcctcattgattcagaatttagtgtaacatgttatattgatagcctggcagatatgtctccatggaaagggcagcatgataattcctgaaatgagtatctcattcataaacagcagagaacagatcatttagttcatcacctagtttctccctccatcatcaccttttgccttttgaagcctcagcactctatgctccagctgaactcaaatactttccaccacttccatagacagcattatctttccaatagagaatttcagacatactttttcttttgtctagcagtttatttctacctttttacctgtcttcttcctattcatctttctagttcaaacttaatttactctaagaagcccttcttccctaactcataccctcctgcacctcactgccttagaaactggtgtgatggacatagttatgcctcccacaccgcttcgaggataggcttgttgctcagctgcctggagtcttgtcgtcaggtagtgctcagttgatagcatctttggtatcacttaagctgtagagagacacctcattcaaggtcacactctttccaaggtaagatgaaccatattaaattattggttgagataatgatataaagacccagccattttggcccaatgaggggaagtctcacaggacatttcagctctggaactttctgtagattgactaggctaacagcaggcctgaagatcagcttgacttcacgctctgcccatcatacttccttcgtccccttcaaatgctgatcctagggtagcccctgataaatattccgcattctaaactccaactcagaaaagcccatgtgctaaacataatcatgaatcattataccttggtcttgccatgccatattattgcgattgaaacaattttgtgatcatcattttatctctgtttaacacaagaagataagtagatactcaataaatatggaataattaatggctggattaatgaacaaatagatttcttgaagacagaattttgggataatattgttttaaggaagaatgtctaccatcggtaaatagatactgctgaatccagtatcattccttggagacttttaaagattccatctgaagttatcggtgacaactgttatggaccacactttctgcctaagagatatgtattgaataatggctttgcttttttgcaaattctattgactctcctagacaccctctttgtactgttgtctcttttttcccaccatgcaaattaattgcccctttctaccttttcacttttgcatttaacaatttgatagatgaaaataagcctgaattatgaagaagaaaacaagtacaaaccacgacaaagcaaatggacaaaccaaaggaaaaataatttaaaaataaaatacagtaaatttcttgtgcgtacacaaatttgataaacattccaagctgaatatttacaagttaaaagctgaagttggtaataattttaggaatttatgcaataacattacttctatcctccatgagattggacttctgattcttatctaatgcttatatataatgatattttcattgaactgtattaaaatgcagaattcaatcagattaagttgaaggaatttttatggtttctagactgcatgacaacctaaccttttgctttcatgaagctggaggtatagactttgacttgtagtgactttactatgtcatgatgatggtcataaataggctgggttttgacatcaagtttgaatcctgctctgccacttcccagctgcaagacactggaaaaattatttactcactataggacttagtttcctcatctacaaaatgggataaaaattgtaccaacttcctagaattactggattgataaaatgaaattatacaaataaagtgtcagtatctatgattaccattaatgctcttcgtcttcacagtgatagtctttaggtagtgaaggtaagaatcttcactgttttgccaaatagccctttgccaaacttgattttatctgacaccaaagtaagggatctgaagaacagttcacttttcttggcttttaatggaatgcacctctaatctgggggctgaaagggctgatgaagcagtttcctattgtgtttactcacatgctgttgctgagcttgttgaaaatgatctgtttccggtagtctccttgcagcaggttgttcagagtaaaatgaaaacagaatctgatacccaatagtttatcacattattccaccttatcagttgtcctacctgataaattgttagataagacctaagactcctgatcctcagtttctttgggatgtctggtagccttggaaatcaaagtatcttcatcagagtatgttatgcatgaatgaattttctaataagtggggtgctgtaccctaagaaatgattatatttgtgggagagtactcactaatttctttcttatgcttcaaacttctattgattaaaaaaaaatctaatgtattaacagatcttgtttatttttaaactgttttctgctctggagtcatataagccatatatattttaatgctactttatactactttatgaattcttatctttgaaaggaagaagagaatgagatgaggtttataaaatgattatggaacattgcacagaaatattacttggcattttatttgagtgtattatttcatataggatattgacttagttccatattaacaccacagactgataatgataaagttgaatttaaatgctgtcctagagcgttcccattttatatttgatacatagaaaagtttatataaacttacatttatacaaatgatacatttatgttcaatttagaatattgcatttatactttgaaagaaattagtactcacatacattaattatttaacactagaatgttgatgctaatattagtacataattttcttctcaaattgcaattttggaagaactgtaaagataatgtttaactttttaaatactaattcataatatccagtagtagtcatagtgaataattagcaatcattttgataaagctcggcatcatagtccagagacttagagggatagatgctttggttggcccagtacacaactaactgatttatacaatttgctaacacatttagattcctttgtgaactgcctgtacatatataaattattttcatagcagtaaagtggagtctattatgactttcacacaatgcatatttagaaagaagtcagaaggaactttattccaattaatattctataataacagtatgagattatttatttctcagttccacagaacatagcttcatggttgtgtcccttatccctaacatgattcttggatacgttattttaaaatatttgttaaatgaatagtagtagtcttttgctgtaggcactggctataggttgacttgtatcttcccaaaattcattctgttgtaatcctaacttttaatacctcataatatgatgctaaagataggatcttcatagagattatcaagtgaaagtgaatttattaggttgagctctactccagtataactgtggccttatgagaagaggacattaggatacagagagaagcacacagagggaaagccatcggaacatgaagatagccaacttcaggctaaggagaaaggcctagaacagaccctctcttcacaggcctcgcaaggaaccaactctgcagacaccgcaatttcaaagttgtagcctccagaactgtgagacaatgaatttttgttgagttagcctcccactaatacagcactataagaagcagaaatacttgaaatgagtaaacaattaaacctttgttgactgacagacttgccaagttcagggagggatcagcatatcccctcgggttaactgtgaaatttgaacccagagcagcagatctcagtcccgtgtcaaatcacactgctctagatataccaccatggatacaccacaagttataagagatgccacaatctgtttatctttaatgtgattcagaagttggtgaataatttacatcttaaaagaagttcagctgatcccaagaagtgtgatagtctaattcccaagatggaagaaccctcaagcaggactactaaaacagaaaaatctgccagataatagagaaaagaatgtagttatgaaattttaaaatatattaaaaatcgcaacagtctcagaccctttgacatgggcataaaaaaacctgatacacctcattactctcagggggcatcattgtgattacagccatctagccaatagctcctggtgacagtgcaatcaaaaattataagttatattcagcttattttgtgaaagacatcagtaaaataagtaataatacattttgaaaaaacttccaagaagaagagttaaaaataaaaatctagaatttcaaagagccatctttagttatatgataaaatctgttatgtggaagagctcattctctgatatttcgttgtttgtgtttaacttttaacatcgccctctcagccctctgccaataaaggcagaatgtgcactgaatatagtgtcccagtgaattcgctgcccaaaaatattagagtttattacattgctttaagaaagcaagacgatattttccaatgaaggaaaagatctgcattgtactacataacacaaacaacggatagaagggtgaagaaagtagtcagagaggctagcagctttcctgacattctttattcatactattgccatgggttcaggtatcgtagacaggctttttttttttgccttagtaactttgtttggtatataagcaaaaagagacagataacaccagcctgaagtctccaggaaccagtgtggaaaattctgcggtacagatttgcttgactgaaaatgtatgcatatgtgctgtgtaaaattaatgacactgctaattatttaaatgttcataaaatattccaacttctacttccttcatgtagagagattttttttttcaattcctgaaatgtgccatttttgaatgagggaacaatgacacatatgcctttgtataagagtactaataattaacagactttcattaagtataaaatgtattaaaatatttacattttaccaataaatttaaaggaaattattttaggatgcatctgtaaactccatccaaaaatcaaggatgaaattagggagagtttaattcttgccagtatgtaggtatctaatcagtcagtgttaactataaatccttattaaagggttcaatatatccagtgtcttagtcttttcccctgagaagcagagcctaagaagggccttatgtgcaggtagtcctattttgggtctcagggaataggagggaactagaaggagtgaaaccgagaaagagtgaaaatccattgaaggatgagttaaatagggggtcacagcttagggcaactagaagcttatcatgcagatacttttttaaagaagaaatacacctcagaattgttcacccaaagaatagaagaaggaactttatttgccagctaccatcccccattgacccagggtcatcctacagaatatttattcccttgcatttctaggtaatacatggttgggtgttggaaggatcaggaagtcagagcagaagtagaggtgaggtcagggtatatatctacaggaaagtgagcaggcagaaatggagaaaaaggtgagctaattgaatgggaaacagggctaaagaagtttctaatacatacactatttactttttgtgccagacatctgatttccattactttgcttttcaacaatattaaatcttttgctggtaattaaaaatgggtaaaaatattacttaaatgataagttagtttattatatcccacaggtttctaataaaggatccaaagcttactaagacattacatgtaataagtattgaaaaccaaatattaatattaattaatattcaattattatagtcatattttatctccaataattcatagataaatatgatatatgcaacttttacttacatgtgcttgctggaaaatagttatgaaaggcagttgaaaaatccaataaaagaaatctttaccaaagatgatgaagtgtaataaaacaaatccttagcacttaaaatctgttgacaaaaataaataaaaaggcagggtcttgctctgtcatccaggctggagtgtggtggcacagtcatagctcagcttactgcagcttccaactcctgggttcgagggatcctcctgagtagctgggtctgcaggcacatgccaccatgcctggctaattttttaattttttgtagagatgggtggggtgggggggttctcactatgttgactgggcttgtctcaaactcctggcttcaggtaatcctcccacctcagcttcccaaagtgctgagattacaagtgtgagccaccgcaaccagccgggtcctggcgttttaaagtttaaactttttcccacttactagcaattcttgtttgggggtgtcagggccaagatgatcaaaaaataatgataatagaaataataaagaaagtaaagcggggtctaaaatttgccaaaattttaggaaatacattaaaagagtttaaattatctggacctaattatcagtttactccataacttgattcttaaatactctttgtctttaacattttattcattcaatgacaaagaattctatgaagagacaggtattattatcaaagtctaatgaaaacagaggatactttaaatcagaactatctgataagaatattatataatatataacaatatatattatagattatatattatactatataaaaataatatataatctggctttgagtaacaacaatgaatgtcactgagaccagagcaacctaaataaaatgtgcataactgacacattgtaattgtacatatttatggggtacgatttgttgtatatacatatatttctgggttctctgttgtgttctattggtctgtctatttttatgccagtaccatgctgttttagtttatctatctgtatagtatattttgaagccaggtagtatgattcctccaactttgttctttttgctcaggattgctttgattatttgggattatttgtggctccatataaacttcagaaccttatttttctatttctgtgaagaagttggtattgtcattggcatattgatagggattgcataaaatctgtagatcactttgggcagcgtagccattttaacattattcattcttccaatgcatgaacacaggataccctaccatttatttatctttccttctatttcgtttatcagtgttttatagttttcagtgtagagatacttcacctccctggttaagtgcattaaataagctattttaaatacagagaaccctaaggttaagattgtttttattctctagtgaagaagctcagagagatctaggcactgtttgtacaaacattaatttagaatacttaatcttagttttcattgattcagtttttactctaggactcatattacaataggtaaagccatttgttgatcacattccagaaagtgtggttttagtatatgcaaaaccgcagactgacagaatgtcctctgtaaagcgatattctggggcttctgcaatgaggattgcctttgtctaggcaaattattttaatgatttttctgtttagctgaatcatgttaaaaagaaaactgcgctgcgtttttgagcttattagaaaaagtggccaaaccctcagccacaaagattgttaggaatgttgcagatctgtctctatcagatacaactttatttgacactaaaattttaaagtaaattatccaatttggtgacttaatgctgtggtcttacatgcaatggccattttggtactaaaattaaagtggcatgctattcttttgcgacttgtaaatatgtatgcagtaataatcaagaagatgatttttcagaaatgtatctgtgtaaaatctattttgtgaagtatcattgtgactgttgcttcattgtgacttattgtgactcttgtgatttccagtaagttagggaaaagtttctaatcaaaataaaaattttcctcataataaattaattttccactttttacttaattagtttctaaagtcaaaacaggaaaaacaagcactttaaaaaaataaaaagagaagaatccttgttgattgcattgaataagtgacctacatgtataagccttcttaataaagccactttaagtataaacattgtcctgaaaaatggtttctgcaatactcattataaatcctcaacgtaattctgactcaacttcatgtgtgtcagttcagtctgaaaaggatgacttcctactgatcccagatcaacacttcaataagctttaactgttcctgatgacatacaaacttcttttaagtgtatcggcatctcgagtccttcaaaaagcatgttggtaggaggtctggcaatgcaaaatcatctctgaggataaagcatgtgtttgctttgaaggttctctgccactttctttactttttcttcttctctggatgccccttatctaccttgtcctatcttttgtgtgcccttcctaacacacacactcttatacacacgcttgcattcggaaacacacacatattatacccctctgattctaccacagtgactatttcagcggcctctgaatctgagggatgctcttagtgaatatttgaaagtaaagcattgtctgcaactctgggaattataacgatttcctgatccctctaaaactccactttttctcctcagtgttggctgtaatcctttctttgttatgccacaggaaatataagaaatcaaattaaattgattctttgaaatgtttgagggcttattcttttcttaggtattaaagtggcttcattattcattaaatgatactttagaaagtccatatgtattgcttagcattgtgaaatcctaaatatctaaatagctaatttctgtttgaacaaagcattttccccttaggcagaggcatgggtctgcactgttgggtttatttttcaatgtgattcaaaagaataaaagatcttcagagagagctgcaaagtaaattaaaaaactcttcagtaaatcacaaaattaggctatttcttgttggatcaatattgcccttttttaaactgaggtattaggctacaaataatagtacatccacccaggtgtctatagaagcattttaaaaataattgtaagtttgtcttttagttcctttggctcaccatattaactaagcatgcaaagtacattttaaccttaaaggaaagtggcccaacagtctgccaattaagactgtataaattagaaactgacatgcttcagaaatagataagccagtgtctgattctggaagtctccccacttttaatactagattgccagatgttcaatcccatttaccttctacttttgatttagaactaattctataaacactgcttcatgattaaactttctcacacaatgcatgatatatatattgcgtgccctttctttgtttcagtgtttcttttattattattattattattattattattattattattattatactttaagttctagggtacatgtacacaacatgcaggtttgttacgtatgtatacatgtgccatggtggtgtgctgcaaccattaacttgtcatttacattaggtatatcttctaatgctacccctcccccctccccccaccccacaacaggccgcggtgtgtgatgttccccatcctgtgtccaagtgttctcatttttcagttcccacctatgagagagaacatgcactgtatggttttctgtccttgtgatagtttgctcagaatgatggtttccagcttcatccatctccctacaaaggacatgaactcatcctttttacggctgcatagtattccatggtgtatatgtgccacattttcttaaaccagtctatcattgttggacatttgggttgcttccaagtctttgctattgtgaatagtgccacaataaacttacgtgtgcatgtgtctttatagtagcatgatttataatcctttgggtatatgcccagtaatgagatggctgggtcaaatggtatttctagttgtagatcctcgaggaattgccacactgtcttccacaatggttgaactagtttacactcccaccaacagtgtaaaagcattcctatttctccacatcctctccagcacctgttgtttcctgactttttaatgatcgccattctaactggtgtgagatggtatctcattgtggttttgatttgtatttctctgatggccagtgatgatgagcaatttttcatgtgtctgttgactgcataagtgtcttcttttgagaagtgtttgttcatatccttcgcctactttttgacggggttgtttgattttttcttgtaaatttgtttaagttctttgtagattctggatattagccctttgtcagatgggtagattgcaaacattttctcccattctgtaggttgcctgttcactctgatggtagtttcttttgctgtgcagaggttctttagtttaattagatcccatttgtcaattttggcttttgttgccattgcttttggtgttttagacatgaagtccttgcccatgcctatgtcctgaatggtattgcctaggttttcttctaagatttttatggttttaggtctgaaatttaagtctttaatccatcttgaattaatttttgtataaggtgtaaggaagggatccagtttcagctttctgcatatggctagccagttttcccagaaccatttattaaacagggattcctttccccatttcttgtttttgttagatttgtcaaagatcagatggttgtagatgtgtggtattatttctgagggccctgttctgttccattggtctgtatctctcttttggtaccagtacaatgctgttttggttactgtagcattgtagtatagtttgaagtcaggtagtctggtgcctccagctttgttcttttggcttaggattgtcttggcaatgcgggctcttttttgttccatatgaactttaaagtagtttttttccaattctgtgaagaaaatcattggtagcttcatggggatggcattgaatctataaattactttgggcagtatggccattttcatgatattgattcttcctgtccatgaacatggaatgttcttccatttgtttgtgtcctcttttaatttgttgagcagtggtttgtagttctccttgaagaggtccttcacaacccatgtaagttggattcctaggtattttattctctttgaagcaattgtgaatgggagttcactcatgatttggctctctgtttgtctgttattggtgtataggaatgcttgtgatttttgcacattgattttgtatgctgagactttgctgaagttgcttatcagcttaaggagattttgggctgagacagtggggttatctagacatacaatcatgtcatctgcaaacagggacagtttgacttcctcttttcctaagtgaataccctttatctctttctcctgcctgattgccctggccagaacttccaacactatgttgaataggagtggtgagagagggcatccctgtcttgtgccagttttcaaagggaatgcttccagtttttgcccattcagtataatactggctgtgggtttgtcataaatagctattattattttgagatacattccatcaatacctaatttattgagagtttttagcatgaagggttgttgaattttgtcaaaggccttttctgcatctattgagactatcatgtgggttttgtcttgggttctgttcgtatgatggattatgtttattgatttatgtatgttgaaccagcattgcattccagggatgaagcccacttgatcatggtggataagctttttgatgtgctgctggattcggtttgccagtatgttattgaggatttttgcatcaatgttcatcagggatattggtctaaaattctctttttttgttttttctctgccaggctttggtatcaggatgatgctggcctcataaaatgagtaagggaggattccctctttttctactgattggaatagtttcataagtaatggtaccagctcctctttgtacctctgatagaattcagctgtgaatccatctggtcatggactttttttggtcagtaggctcttcattattgcctcaatttcagagcctgctattggtctattcaggaattcaactttttcctggtttagtcttgggagggtgtatgtgtccaggaatttatccatttcttctagattttgtagtttatttgcataaaggtgtttatactattctctgatggtagtttgtatctctacgggatcagtggtgatatcccctttgtcattttttattgttctatttgattcttctctcttttcttctttattagtctgctagctgcctatcaatttcattgatcttttcaaaaaaccagttcctggattcattgatttttgaagggttttttgtgtctctttttccttcagttctgctctgatcttagttatttcttgacttccgctagcttttgaatgtgtttgctcttgcttctctagttcttttaattgtgatattagggtgtcaattttagatctttcctgctttctcttgtgggcatttagtgctataaatttccctctacacactgctttaaatgtgtcccagagatacttgtatgttgtgtctttgttttcactggtttcaaagaacatctttatttctgccttcatttctttatgtacccagtagtcattcaggagcaggttgttcagtttccatgtagttgagcggttttgagtgagtttcttaatcctgagttctagtttgattgcactgtggtctgagagacagtttgttataatttctgttcttttacattttctgaggagtgctttacttccaactatgtggtcagttttggaataagtgcgacatggtgctgagaagaatgtatattctgttgatttggggtggagagttctgtagatgtttattaagtccacttggtgcagagctgagttcaattcctggatatccttcttaactttctgtctcattgatctgtctaatgttgacagtaggatgttaaagtctccgattattattgtgtgggagtctaagtctctttgtaggtctctatggacttgctttttgaatctgggtgctcctgcatatatatttaggatagttagctcttcttgttgaattgatccctttaccattatgtaatggccttttttgtctcttctgatctttgttggtttaaaatctgttttatcagagattaggattgcaatccctgctttttttttgttttccatttgcttggtagatcttcctccatccctttattctgagcctgtgtgtctctgcacgtgagatggatctcctgagtatagcacactgatgggtcttgactctttatccaatttgccagtctgtgttttttaattgtaacatttagcccatatacatttaaggttaatattgttatgggtgaatttgatcctgtcattatgatgttagctggttattttgctccttagttgattcagtttcttcctagcattgatggtctttacaattcggcatgtctttgcagtggctggtaacggttgttcctttccacgtttagtgcttctttcaggagctcttgtaaggcaggcctggtggtgacaaaatctctcagcatttgtttgtctgtaaaggattttatttctctttcacgtatgaagcttagtttggctggatatgaaattctgggttgaaaattcctttctttaagcatgttgagtagtggcccccactctcttctggcttgtagagtttctgccgagagatcagctgttagtctgatgggcttccctttgtgggtaacccaacctttctctctggctgcccttaacattttctccttcttttcaactttggtaaatctgacaattatgtgtcttggagttgctcttcttgaagagtatctttgtggcattttctgtgtttcctgatttcaatgttggcctgccttgctaggttgggtaagttctcctggataatatcctgaagagtgttttccaacttggttccattctccctgtcacttttacgtacaccaatcagacgtagatttggtcttttcacatagtcccatatttcttggaggctttgttcatttctttttactcttttttctctaaacttctcttctcgcttcatttcattcatttgatcttccatcactgataccctttcttccagttgatcaaatcggctactgaagcttgtgcatttgtcacgtagttctcatgccatggttttcagctccatcaggtcatttaaggtcttctctaagctggttattctagtcagccattcgtctaatcttttttcaaggtttttagcttctttgtaacgggttcaaacatcctcctttagctcggagaagtttgttattaccgatcgtctgaagccttcttctctcaacttgtcagtcattctccgttcagctttgttccattgctggcgaggagctacattcctttggaggagaagaggtgttctgatttttagatttttcatcttttctgctctgttttttccccatctttgtggttttatttacctttggtctttgatgatggtgacgtacagatggggttttggtgtagatgccctttctgtttgttagttttccttctaacagtcaggaccctcagctgcaggtctgttagagtttgctggaggtccactccagtccctgtttgcctgggtatcaccagcggagggtgcagaacagtgaatattgcagaacggcaaatgttgctgccttatcgttcttctggaagcctcgtctcagaggggcacccagccagatgaggtgtcagtcggcccctactgggaggtgccttccagttaggcgactcgggggtcagggtcccacttgaggaggcagtctctccgttctcagatctcaaactccgtgctgggagatccactacactcttcaaagctgtcagacagggacctttaagtctgcagaagtttctgctccttttgttcagctatgctctgccgtcagaggtggagtctacagaggcaggcaggcctccttgagctgcggtgggctccacccagttcgagcttcccagctgctttgtttacctactcaagcctcagcaatggtgggcgcccatccccaagccttgctgccgccttgcagttcgatctcagactgctgtgctagcactgagcagggctccatgggcgtgggaccctctgagccaggtgcagaatataatctcctggtgtgccatttgctaagactgttggaaaagtgcagtattagggtgggagtgacccaatattccaggtgctgtctgtcacggcttcccttggctaggaaagggaattccccaaccccttgtgcttcccgggtgaggcgatgcctcaccctgcttcagctcacagtcagtgggctgcatccactgtcctgcacccactgccggacaagccccattgagacgaacctggtacctcagttggaaatgcagaaatcacccatcttctgtgtctctcatggtgggagctgtagactggagctgttcctattcggccatcttggaacctcccccagtgtttctttttgatttcattctttttattgttgcattcattttttcttcacattattattatataaaaatcaactcaacactatttttatctcctcttcttaaattagtggtgaagaaattccagttttgttattagttcaagatgctgattttcctaaccaaatgtaattgaatctgtatgcagaaatatctcaagaagctacctttgctcaaaactatatctgcatcattgttaaatgtaatttcaagtataaaatttagtaatgtaagttcatggcatggtttactcttttctctgtacctgtgatcttacgctgctttccacattgtgtcagcctgtgaactgtctattctgatgtatatgttaggaggctgcaaaagtaattgtgatttttgccattacttttatggcaaaacccacaattacttttgcaccaaacatatatatataattatatattttatattataaattatataatgtataagatattataatattatatattttatattataaattatataatgtataagatattataatatatattttatatatatgcacatgtaatattgctgcactacacaccatcatcaaagtttgttaggtttattgctcatgattctgaacgtcatggaactgggccaggctcagcatatttggtatgtctctcctgatgacagctgccatggttcttctgggagccaagcatcaccacaataaaatggatgtactggctattgtctgggatgcattgattttcctccatatggcctcttactctcttcatatggtctgtcatgattagacagtctagcccaagttctatgtttggtagcttactttcaaaaatgaatacagcagtgcaagaccttggtaagcttaaactaagaactgatataataacacttctgctgaaatctaccggtcaaagcaagtcacagacccagtccagctttaagtagtaggtaaaaataacctaattcttgattggtgcattgatataggtatacaggatgaagaaattgttggtgaccttctttgcagccaatccatcatagtatatatgcatatattaaattgtcgttttctaaatgatttatttttgctggtctgtagaagtgcaattttaaaatattgactttgtatctagtgaccttcctaaatttattaattctaacagttgtcagtagattcttcaggctagatagacaattatatttctttatgtgctgtgaaagaaagcctcttttgtttttaattaattttgattttagttagtcacccttagcctttcaccgtttttctccattgcataattggcatttatcagaagccttctgattctattatctttgtaattagtagtatccctaaattctcaaaaacctgagagattgtacaagcaacagcattttcttctacatgtcatcccaccccacttcaccccagtgaactatggaatttctacacaatgccgtgggctattcagcacttcaccttcaaccagtgaccgttgccagccagctggtaggttgacagattccaaaatcccattttagtgtttgcttctttcgaacattaccagcaccaactgtcttagtttcccaggaaatagactctgagataagaatttggggagtgccctcagcattagcatttatataaggagtaaagaagtctgaatgggcagagagagaagtaaaactgtgatgaagtggcaacaaatttttcagccattccacgggcagctctggagctaggatgtcccttcaagtggtccagatcttcatgtcattgcatcaactagtcactggatgtcaacagccttccaagatggaatgcagccttgagcaaaatatatatctttggctaaggaaaattcctagagtaggatttggccaaggggcttgagttgccaatacttccagcacttgggagaatgactgccttaatcttggagtggtgcattatagaatccactctgctaggattccagctaaaagtatgttagaccttttcattgtttctcgtaagttttgtatttttttctgcattatttattcttttcttctctgtatatcaactagaatattttgtactgctttatgtttcaaatcaccaattccctcttcaattctgtctaatatggaatttaacttattcattgggttcttaattatagttactgcagttttttgcattttagaatttttgtttgattatttttcatagattccatttctctgatgcagttatctctgttgccatcctgactattttaacacatttactttcagtgcgtatctggaaattctaatatttgtatcacttatgagtatgtttctgttgtctcttattctcacggcattttttgtatgcctggtgatattgcatttaattctctaccctaggttgtcatacaaaatatcattaactgggtagctttaacaacaggaatttattcctcaaatccttgaggctgagaagtccaagatcaagaggctggctgattcagtttcctggtgacaggtcccttcttggattgcagaaggctgcctttttgctctgtacttgtgtagtggagagaaagagaaccctggtctcttattctgtgattataaggatactaacctcatctaaacctaattaacttccaaagccccatctccaaataccatcatgttgggggttaaggcttcatttcgaggaggacacaaaccttcatttcatatactggacattgtgtgaaaaactgtagaagctacagagaagattcactctatcttctagcaggcagatggagtagaatcagaatatatccctccaaacaagaacttcatgaggaagaggatgaggtttagaattttcaaagtctagactcagctttgttctggtttccccaaactttgtgttatacgccaagagggacccaactaagggcctgacatgtttatcagggactctccttccttatgggctctcaaatctaatttttgtgtctgtaacaacttaaaggtgccagcagctccagtcagcttttcagctccttgtttgtttaggttcatagccttttaccttgtaaggcttaagaactgcaaaggtctcaaggaaaactatctcaaagagctgggctaactcctgggttcctctcttctctcgtcaggatctcaatccctcaattcgtagctatcttaatagatatacaccctaactttttgtctccctagctatttgacagtgcagaaagctctaccagcttctgttggtggcagcgtctatctgacatcactgtctctacctggtaactgcttaagaaaatagctcatgtcccaaggagaaaaatggacagtatttatgtatgtcttacgtccaatgaatttaccgtccttccgggatctttgtcctaacatcctagcaagctcaaagctctccagtgctttaaaaaaatgcttctttgtctgtgtgtattttaataaagattttctagtagctctaagcaggtgattggtctactacaagctactccatcatagctagaaatgaaaataatgcaactcatattttgattttcacttcacacccccttctttatgatagtataatggctaagaaccaagaattaaatcgtacagaactgggaccttagctgtgtgacctggagcaagctacttaacctctttgtgcccttcgtgtctcagctttctcatctttaaaataaagataataattgtacttatctcacatatttgtgaatagtgaacaaagcgatgcatacaaagctcttagtgtagtaccaatcacacagtacacactcaaaacatgtttacagatattctcaaatatgtgacttaaatacctgtccatagatgtcaaaagctttcattactccttcacattctttactgtttttttgttttttttttcaatactggtgtcacttacagtttttgtttgtgttattgttgtttgtttgtttgttttttattctccattcttttccatcaatctggatcagactttcatttcccatcaatatactatctctgagcatcatttcatcatcagggagaagaaagaattattgagtgcacaccatgtgccaagaatgtgccaggactgctgagacgccagtgtcaaatcctattagctacaataccaaacgagcttttcaataagggtacagctgactgtattgcatgaatattttcttttggttagtatcattttcacctttggccagttcagtgttcattataaaatgatgtgacaaacctctattaaaatagaacattaaatcccaagtggtgtattgctaagccagaggcatggggtgtatttctaagttcagattatcttctgcccagaacaaagaataagaaaacacttttgttgtatttgaaattggcagtaccacaggtgaggcacacaaagacatttcaagcaattcaaatcttaacaactcgttttcagaaatattttatggtttagtcagtcttagtctttctcgtgattcctaagaaatagggagagagaaataatttggaattatatatttaatttttttattattttgacgtgcatatttcctgtttatattgtatgtaacactggtataattttttttttttcacaaagacagtactattacttgctacttagggactttttagaattaaagtgtttttattttagaaataatatttagtgtttgttaaaggcaatatataaaggcagggccattgtttatggctctcgaggttatggatgggacaactctaagtagcatcatcaactgttagacctcataaattgtatatttacaaatatgtaattgaccattaaacttgtcagttttctgatagatggaagtaaagtgtttgcagaagctgtgtatttttctattatggacaaggcatgcacaaccaaatggcagccttatgaaggcataaaatattgaagagatatcacaaaaattataccactgagaaaaaagaccactgttaaggactggtcaaatattttaacaaattatctgcatttatgaaaagatattttttctttacaaatatatagatacataagtgaaatcactgctatttggtgacttgatatactgttttttaataatttaatcgatcatgggcatctttccatgtcataaatattgagctacataattattttggtggttatgttgtacgtcgtcatatacatgcagaggtgagtactttatttgctcagtgtcatcaatggatatttgttgtttccaactttcactaatacaaagaagcttgcattaaacattcagtgcacacacatatttgtataactatctgaactgttttcaaaccaaattgttagacccaaagttattcacatttgtaaaattttgatttgtattccccgattacagtgtaggtattttaaaatataatggcagtagtatagaagtactactttaagaactatcaccaatatgtgctagaacctatcatgataaacaataggggaggcagtaacagctagttgaacacacatagaaatcctttactacctattttcagcaatgaagaaatatgctttatattttaaaagtttactaaatatttgctgttcattagataaagctaatcttgtgaaaactaaaatagtttacacttcagatccactacagaatattagttgatattttgtttgtgtcaattaaaattatagttattttctaaaatattaagctttatagtgattaatctgttgataattttgggtaaactttaacaaggagaaattttataaatattatagtgtctggtagtcattacactatgtgcattttaaaagatcagtttaacttggttacagaattttaaaaatatatatattttttctgtaacctgggagtaactacctttccttaccatcaaaatttagatattacatatgaaagtcttacgtcggtgctggatcaaagataattaaaagtattttgatgttatactttgttcagttgttgataaataaagcaaaatgctttatatatctataaaatatttttcttaaatgcatatgatattaagtgtttaatatgtttacatacaaaagtctaataattacattttgttttccttgcagtcatctttataatgaatttcttgctgttaatgaacacaataatgaaggcaaattgtaattttgccatctgtgttaatgtaggtccagccatgaaaagtccttgacaaattccagtaactaataaactgggttttatatttcttataatatcaaaaacatgaacaaagaaaggatgatatactgcttctgttaaagtttataaacaatatacatattggggcttttcttaaactgtttacttctaagcagaattataggtttcccaaaccttcccaacatcatggacctgattttacattgttaattatttctgaaagagataatattactttcacttatcaagtaactaaaataaaactgttgaagagtcattaatataaccctacagtatttctattaaatatgactagacaaataaatcataagctattttaaaaccagctactcctattttgttgtttagaaatagcttgattaaatctgatagaatttttaattatctgaatatattattctttcttacaatgagactgtcttcattttccaggtatatgtcattatgttacagataaatgatacagactatatttagctttatatatatatatcatgcttgtgtgtgtgtgtgtgtgtgtgtgtgtgtgtgtgtgtataaggggcctatctttagaattcataaaactaagcttacccagttgtacaatagaatactcttgtagcatcttcatatgtgtgttctcattcaatttttgcacaaaatattctgcaaaattaagccctgatgatcatttattgcttatctagaaagtcgtttccttctccactacactctttctgcttattaaaacaaacttgcttatcaactaaaagcccaattcaaataacctttctttctagcacatatccttttgaagttccatgcaaaattaatcatttcttctcttgtactcttaaaccagtctggttcaaatatagtgatattgctactgatcaaattttaggcctgatctcactttcaatgctcaagagcaaagactatgtctaatccatatttgtatagacagtaaatggataaatgaatgagttgctcaggtatcttatgatgtagacattaagaacacttgtagccaatagtatgtatgctatctcatttaaacttcacaacatcttgctgaggcaggtaatagcatggccattttacagataagaaaattgagatacgaaatagctaggtcgctttcaaaagttgcaaggctaataactagaaaatgttggataagtcagtctactgccagtccccatgttaatgaatgtctctcactgaagattaatcttcaaataagagctcttattgtcattaatataaggtgcaagagatatttaaatcctaacatgaccagtgagttatgtcggttttctctagtactaatctccacatggctaactctgggctagattcattttagacataagaaactatgaataaccatcaggatgcctaagcagaaaacccagttggccttctcaagaagtgaatggatccattcagaaatacatcattgagcatttccttcatgcttaacactttgccaggcacccagaggcaatgtgaaagttgttctgttctaaaggatctgaaaatgagatgccatgcaagtcttatgtatgtggattgaagttgaaaagatgctcttacacagatgagaaaggataaacaaaagctgtaggactcagaacatttcatagagaaaacgaatttttagagaatttgagtggagagtagcgaaaacttttcaggtgaaaccaaaatcagatgacaattggaaacaggatctaattggatattttatcaacagaaaagagaaatgaaggatttatttgccttttccagtatgaaatgaaatgatttcacattatatttgattagcataggtatgttcaaagtgctttcacaatattttatttaatcctgacacaaagtcttaaaaattggcaagttgatctcattttatagatgacaaaacttgagttttgaagaggttaaatgactttctaaatgcaattttaaaaaaatagactagcatttcccatgtcactacaaatactgctacttccagataattttatgtgcttttaatcaagttttgttgtgactataattttttaactcaacttccctcaggtttctttcaatttttttaagaccctgagttcaaactaaatatgatggctaattagaaagaatgaactggagttttttagaattggaggcatcaaagcaaaattgtcccctccttagcaaggagaacatgcagctgttccaaatgtttttggatttgcacagacccaaaataagtatgcttgtgatagaacacaaacctctaaggtttttacttgaatctgttgtttgcatgtaaaattagaattgattttaacataatggaaaattattgatgtttgtggaatgaatctatatcaatctgaatttattttacctcagactttaagattaaaactctaattttaccaagcagattaacattccatttaaatttgtatctgtgacagctttccctaaatgccttaaaaataacagtctgcttctgtagcaccaattttatagctgaagcaagtgaaacttaaaaatggctgccttatgtgtccgccaaagaatgggataacagcttcattaaccccgaaattgaagattatgcttggaaggggaagcagtatatccaggtttttgttcattggtttattttgttcactgatcttacttggtatacataagctgttagtagaaacccagattaactatgagtgcagcagacacaatttatattgtgaaagtacttgtattgagggaaaaaaacaaatattttcccagtgaacatctgaaaattgtgaaataataggtcttacaggaaatgagaacaggatttgaaccaacagaagctggtttatggctttattctgctagtcaccatgtgactttgaaaaagtcatcgggccaagtagtgtctgagtattcctgcctatcaaatgggtagaacaacaatagattgaatgaatagtacaaataagtcatggaagacagatattcttaggagaaagcagagcatgttaaagtcctgaggaaaagggagagcacgtccttgagcatattgtggaagtggagaataaggcaaggaataacattagagaggaaaccagaaaccaactaagttagagccttaaaagccacacaaaggaattggacgtgttctgacagcaataacattcaccgagcacgctctgttcacaaggcagtgttatcaatttatatacattatttaattatcataaactccccatgaggaaaccaaggatcagagaggacatgaggctcattaaagagcacagctattaagtgggagagctgggactcaaatcacattctgtcttatttcaaaatcaagacttacccactcataacactgcatggaaagatttcaaacccaaccatgagacgatcagattttcattttagaatgagttctctaatttcagacaagagaaccgatctggggaagaggcctaattgaagacagatgagttgggaagttgattcagccatctagaaatgagaggatggaagctggaagtaggacagaagcaatgccctcaagagatatttagaagacagaatcaactggacttggcaatttattaggtaaaggtgagaagagaaaagcaggagacgagaatgcacccagttgtttgttttttaaaaacatttcctacatctatcctatcctgtaaataaacttagacattactcactgttactcaaaagcactctgctttttttccttctgggacttcaatgatgctctgtcctccctggaaaagaagtgcttgctaccccgtcctacccgactaaccgggacaatgaaatcaatctttcctgcttttaaaggcttttcttgctcttctaaacacttgtatctttcacttccactactgaaatactcatatctctcagtgtctctattaaagaacagattgagaactacttgagtactttttttcaccttaaatttactgggtcaaaaattttgtcctattactaatccctaaagggtaatcttatggctttttgtacaggttaggtattaaatcagtgtctgttgaatttatattcagttgcttataagggaatgaagtgagatccactaatttagcaaacattttaattcttggctcataaatctcattagagagggttttttaaaatttttttattttatttatctattttatttttgagacagggtcttgctctgtcatccaggctggagtgcagtggcgcattcttggctcactgaaacctctgtttctaggggtcaggtaattcttgtgcctcagcctcccaagtagctgggattacagacacatgccaccacacctggctaatttttgtattttcagtagagatggagttttgccttgttagccagtctgctctcaaactcctagcctcgagatctgcccgccttcgtctcccaaagtgctgggattacaggaagagaggtcttttttatgccatctgaaggaactctgtgactcataacccctgtttttctctatctcatttctgtgttttacttcctgcatagcagttattgctatctgagcaagactgactacataattacacaatacttaataaacaagtacgtaattaggtccagttcaaaatgcaatgaaaatgcagtcctctcgttaaaagttataaagagtttcaggaaggcaaaagtaaagcattaagccaagtgtgtggcccttctaaagtcagagccctgtgtgatcacatacgtcatatgcccataatgttggccagcaggtaattatcttttaaattttatgtgtttctatttctttcatgtctctccctctttccattcaactccatagaaaaagggagcatgcctgtcttattctcagtgcctcatgggaaataaaagattgggagatgatagctacctggtaagtatttgttgattaaagaattattttaggtttgagtctcacattctgaaattcttgagggtaaattgtcctgtcaaaactttcttccatgtaatttgatatgatggttctaatcttgcaacacagtgtatctaagagatgatgaagatgggttggtttgtttgtttttaattaaaaaccaacactcaccatgttgaatagagctgattattatccctaggatatatccctggactaaacgtaccaggaagactcaattaccaccacctccttaaggccgtccttccctaaatgtatttgatattctgtagccaataattttaaggatattgctactcattctactcagtacctattttttgatgcaaagaccttaattctccatccttgccaatcttgcctctttcaaaagcattgaatcaacttttatgaaggaaaagaaagaacctgactgaacacagtgagaggttaatttaagctattgtttctgtgacatggtactattccactaagtgtaatatcttcatcagatggaattcaaaactttaagggaaaagaattattgcctttcaggcactcagaataccttttgagatgtatgtgaaaaagataattgaagagtttggattgtcctttgagaagatgtcaggagagagtttgaacccaatcaaacgttgttttaaataataggaggtgaattctcaatagagctatgcaatactcatttctaaaggaaaaagaaaaaaggtgttgcaagggaaaattctactctttccctgaaaattctctcagttttataaatgtggattcattccctaaagtccaaaattggactggtatcagtaattatgtattacatgtaaagggcaaactcactgtgaaatataataccacctgtcatttattaagtgactgtcatgtggcagacagtgtgattactactttaaaaatgttatctaattttatcttaacaatcctcagagacagatatccctctcctgtgctttacaagtaaggaaatcagagcttaaagaaactttatgtattgaccaagttcataaagtttaaaaaggacagaaccaagattgccaccaatgttcagctgataaacaaataggtgatatgggctcatagactttttcaaaacagagagtttatataatttctagtttggttttctttgtttttttggataatgatgaataagcctttaataataaaattctgacagcatagtccattataaggttccatttaattgtatttgtgcaaatcatttcttgcttattactaaccagttaaatgtagaaacatgatttaaaataagaagctgcaggccgggcgcggtggctcacgcctgtaatcccagcactttgggaggccgaggcgggtggatcatgaggtcaggagatcgagaccatcctggctaacaaggtgaaaccccgtctctactaaaaatacaaaaaattagccgggcgcggtggcgggcacctgtagtcccagctactcgggaggctgaggcaggagaatggcgtgaacccgggaagcggagcttgcagtgagccgagattgcgccactgcagtccgcagtccggcctgggcgacagagcgagactccgtctcaaaaaaaaaaaaaaaaaaaaaaaaagaagctgcaagatattttataacttgtttgcccaaaatgactgtcctcatcacaaatagctgcatggaataacaaccctacatcaagatggagtatctgatgcattgtggtataatatgaggtggactgctaagttccactgccaaaactatatccctccattgatctttcctctgaaatatccttagtgagatttattcatctgttttaagacactgtgttcagaagttcttgagagagtacaaaaagtgccccagaaattgctaacatattggttcaccagagcccataatttattagactgtcttatcaaaaatgtgaaattttgtgccaaaagagagctactcttttgggggatggcgcatgagaacagagaattccataaggtactctgagaaaaacaaatacaagtaaaaatatatttaatagagcgaagagaggtgtgtatgaagacaaatttgggatgaaagttggagttggtggagtgagagtctaaaccccttcgcgtagtgactgggatgagatgagggccttgaggagagtggcctgaggctgggaaagtaactgtaggaaatgtgaaagggagattactaaagaagagaacagactgagattataatggccttgggggatgagagtctctatctgtgcccagacctgtatgggctgcatgctgggaaggcaaccacagtggctgcagtgctggcaatgtaaagtcaagtgacaggaagctacatacatagaaaattaggcaacaatttcagtaggcatgggtgtttgagatgcagtgtggtatcatattacacttgtcacttgccacaaataccaaatttacaaaaagcgaatttattatcatttgaaataaggcataattattaaaatataaaagtgggtcatttgtctgtttgtaaaacagaaactgactctaggtaattctggccaaaaaaagaaaagaaaagaaaaaaagtgctatatatgatttgggataaaattgagttttacataaaatttggctgtataatcgcttttttctactctgctggctcagacatctaggcatagcagaaagatcccgtgaatgtggtcataagacatggattcactatgtggccctggcatccttcactgaccttttcctggcctcagtttcttcacttgtaaaatgacagggttggtctaagtgattccacaggtccctcttgcttgcagggtcatagggtcactatgcatttagtatttcatttccctacacagaaaatcttttcaaaaacacacatttattccctagggatcttttttgtgtgtgcatagtgctgaaattctctgtgttgtgaattctttggttaatttaaaacattaagagaaatgctctcagttaacaggcaggcattctcgccatttgcctctggtggtaatggaagttgcctgtttaggtccttttttcaggtgtcagacagcaaatacctcctttcaacttcgcagcatacaacaatttagctctcatttcggaaacgttagcaaaaggctatttccacttcatgtttaatgatttcaatgatgcctagtagtaagtggcattgtattacatccaaccatattttagagtaaaagagtaatttggctgcttttgtttagacagttctggatattgatgatgatcttcataggcactatttccacacaaacccacagaaaatgcttacaattgagaagaaaataacatagtttgctagcttaggatttattttatatttgggtggtaatcttagaaggcacaattttatgagacaaaagtctttgttttcacccttgccttaattatcgtaaaaaaaaaaaaagacacaatgctatgtatcctcagggaatttattatttattgcaaactctaatatattattgggaattgaataggaacacaaactatgtcccaatctggagtttaatatgtaatctattttatgtctattttgatggaaacccaccttgtggttcacttctttttcaggttaatggcatatttatttttctagtccaacacacacacacatacacacacacaaagaggttttgcagctgtggtgggaaaaaaaagcaaacatgtatatttggcctacttttcatttgatgaaggcaggcacgcgcccacacttattctaagcctcaatttaggtcactgaacatcacccagtcagtttatcacagcagcttctgtttgtagcacaaccgtggtcgcagagttctgctgcatgtgtttcttgtttacatgtgtatgcaggaaagcatgttgggaagcccatgacatgtggcaataatagttttaatatacagtagtaaaatgttgtcattattcaactcctagggtaagtgtgtataaataacaaaactaaaatacagtttcaatgaaccagcatcatggttgctttatggtgtctttttctaattctaatccctaaaacttcctgtttcaaagcctcttttccctccaccagcaaaagccacatgcccctcttttcctagcaaggaattcatagtcgggttctggctactctggtttttgcttttcttatatttttaataaggatcacatgtgtggatttcttcccaatggggaatgcttgtgtatttctgtgtggggaaagggagacatggaaaggatccaatgtaagctggacataggaaacaaaaagatgaaatatgaatggcaatgacacaaatcatttttcttttgatgtatatgtctaaaagtattttatttttggtatacatttccattgatttctgagttcaaatcacagaacgaactttcttttaatataatttctgtctgtgatttatagcaaagctgtgtactgaatttcaagcacccattactgaaataccatatggactgaatgcatatttcattgtattgatttgtgccagtaacctctggtcaggaaggctacttcacttatctaagcaactgatgctgtctttaaagacatctagcatttattgaatttgtataaggctgcttagtgaaccttactataattttcattgtgccatattaccttacaaatgtgtttgataaaacatttattaaaaatgtgtttcatattttcttcttgcaggtagtaaaagatggtagtcagacaggccaacatattacacatttcatttattcatatgcttttaaataaaatatttagattcaatgttagaccaaagtttcttatcgttatctgtattgtatatgccgaaaaaatattagaaaccttagacatttttcatctaaaatatgagtttatatatggattaaaatcattgagatactgacatacagcaaatttgaaaatcagctgctcccatggtactctactgggatttgaaagtaaccagtcctgggcttttctacgatttcttgggaagtaaatttttcagcttattgtagttactgattctcccttatggtgggttcctttgcttttgtggcttgtactttttatattgagctcatcttagtgacttgtttttcagtagaaattttaagtgctctcagttctagcagtctcctttaatttgttttttgaatttacttctgtttactcaccagctgtgttactggtcttgaattagtttaattatatttaatttaatactgcatatttgaagtggtaaatgatttccatgtcaggttactggaccatgttactaggagtggcccaagcaaacagttccagatttggagaaactcaaggtaaaataaaatattcatatgcataaaaaattacctaattccaatgtaatacattcaatgatgaagatatattaaagcttgctattggatattgttttagattatatatgcaagaggagtggcaggtgcataaaatattatcatagaatacccctgactttataaaaatattgtaggaacagtatactgagataagctcagcacacatatatttgtctttatattaaaataagaaagcataatatgagaatattactcatctatctttgtcagataagaatattctagaataaagacacatttcagaaaagttatacttcaataattgtgtctaagttttgatgaaagaaagttcagtctcttatattcttgataaatactgatcttttaaaaggccttaatatattttgcaatacattgcatgatataaaaagtctctaacacaccagactaataccaatattgggaaatttatattacttagaaggaaataattaaaaaatagaatgacaggaaaaagaaaatatgattactgagaacgcactttgtgccagacagtatgagggatgttttatgttcattattttatttaatcttcacaattgttatttttgaaagataagaaaaacagcccaaaatctaaaactagtaaatggcagtattgattttcaaacaatgttctgtctgataacccagatccctattctttccttaatataatgcctcttaatgtaatgtcgggttccttaaaatatattttatcacagcatttactaagaagtaagtggaagctgatgaaaattattcttttgctttcctttcttaattgaaatgaatccgctaattgagagtgagagtttcaattttattataatgttttagggctctgaacaaacaagtaatgcaggtatgaatctcaataagggcacatttgtaaacatggcacatacattttagaatcatttatatttgagctgtatgggttgggaaaaaatgcttgtcgtgcttatgattttcttaaatgctttctcataaatggtattttatttgttttagatttctctggttcagttgagtgcagtttccagctgattcaaaagtttaagaagtgatacccaatttgcacatataataatttcctttgctgtcagaatgtttaagaaaacaatgaaaaacaaaaacaaagttgtgagaagcatcagtaatgattcaatcactatactgataaagtaaatttcctgtatttttttctctctactgccaatgttactttcatagcttctgttcatgcatttgcagaatcctgtctcttaaaattaaccagtttagctgtacttctgggtaacttaccccacaggcagattgcctccctgttcttataaggtcaataaaaattaaaagtcttccactttccaagtatttgggttttaaaaaaattactacactataatttttccttatatctaaccaaaattttacaagataattacgtgagaggaaaggaaacaaagttcttttatcataaatatagtaatacaattgcaactagcttttatggaatgattagcgtgtacaaggaactgaaatgagtttatgtgtgttagataatttattccttgcaaaaatcatgtgagggagatactctgattccaaattttacagaggaacaagtaaagaaactgagtcttagcagcgtgaagactacagagggaataaacagtggcactaaaagtgaaatttggctttttgactctatattctaaatcactatggtataacaatttcaaaaaaatagattttgtgttgattgtggaaaatttaggataggacaaaaatttcttcatatcctattattcagaggtatccacttttattttgataaatctggtatactcaatgtagataccctatctgtttatattttcaacaaacttttacatgtatcacaattaaacacgtacaaatatgtttatagaaccattatttataatcatgttaggtagaaacaacctaaatgtcatcaatagtaaattggatgaattcaccattgtatattcatatattagaattctacacagcaatgaaaatgagtaaacaattatcatatatgatgtcatcatggtcgatgctcagaaatggagccaaaaaagccagacaccaaaaacagacatgcttttaggtgatttgtttaaatttcagatatcgataagccaatctacagtattataaatcaggtaatgagggattgaacttaaatggtggtggtaagcctatctaatttatccaaaaacagtattttatgaaataagtactattactattcctatttacttatgagaaaactgaagttcagagagggtaagtaatttactaattttcacaatgctaatggcaaactcctaattcaaatctaatctgttgagctccagagctccagtgctcagcattataatagacaagaatcagaaaaaaatgccttttctacggaagacacattcatctcaaaaaaaaaaagaaagaagaaagagttcatattagatatttttttcaagcctactgttccttaaacatattctttatctccactataaaattgctcattaatattctccttccccacagactctttcctcaagcatccaactttgtcagtctctcttatcccacatcactctttcaatcctgctccctgctctcaaaaacttgctttaatcctcttgcttttgggaatggtattgaaaactcaagaacatatcaaatatatcaaaattctccctcttatcagtttgaaattgtgaagaaagaaagaggctgatctacagtggataaatgagtaaatatcgtaaatgtgagatgtcttgatttcagtgaaaaggtagaagtttgtagaaaagatggagggtgcttttcttaatatttcttgaaggctcacatttttcaaccatgtagtattcttctatctcttactttcttaattctttctgtttatttacttcatggaatagaacttcagcttagtgtttacttcaagcttaatgttctaagccttctaattgagagtgaaagacagagacaaaagaaggcagattttgaaagtccctaagccgaaatcaaagtaatggcctaaacaatgattggcccttaccatctttttaacagcacttttcaggtgataattttaatgtgtttcaaaaacatttgtcttcttaggtatgcaaacattctccttaaaatcctattttagctattcaattttctcagtatattttattcctttaaatagagtgcaaaggtaaattttaacattagcccttcatattccaaaccaaagttatccaaataatacatttttaatgcacagggaaaataatagcaaaattaaatggcaaacttgcaatttttttagcacaaacagattagtaaacatgcagaaaatatgcaaagctctagtgtttacaatgtttaagcaaattacaaattatctcaagaaagagaaaagccaaaggacaaacatcaatacacattccaaggctacataaaaatgatttcagtgttggaaaacattcttagatggaaacaatgatgataatgggggaaaatacattttgttaaactgtctcccccaaggtacaggataaaaattcgattttgcaccaaccacaataatgtcttctagagagcatgctttattcacagctttattttgctttaaaaaagaataatctaacagagcacaaacccgaactataacttagctaaagcacaagtcctgaatttacaattttattaattgaaactgaagtagatttacccaggctaatgttataaagcatgccccagagcagaatgtttcccatgaagtgtgtttctagtgatgtctatctacacagttctatttaatttaggattaaagggattctaatgattttccttattttcacctgatttcttctaccggagttagatggacattgttgctttgcctacaacttctatggtaattggtaaccctcgaggaacctgagaatccatcaccttaatcaaggagccattgcaattttccatgttcagttataacttgcaaaaataggatcaaataaagagaaaaatattaagctgcaactacattgtaaatttgttgtatctgcttttcccaaaatgcatagcagagaaaatcaatatcataattttatttattcctactgaagaaattgtgagttttagattttgaaaggaattgggaggaaatgaaggagagtgtttcctataagaaatgcttagtgtctggaataataaagagctggttaaaattgacaaatcattagggtgccaccgggatgttatcctgaatccagaaatgatggggaaataaacatgattttagggaatctaaaccacaaaccagttgattttgttcactggggcagaaagcacagaatgtggcataaagtagggacttggaaaagactgaattaaaccatcccatctagcacagggccacataattttgttgcaacatgtcttcagttcccactcttaatatcaggacttctcggggctctggcctaaactctctaatgtgctacctatgtactctccaattcccttgacttcatacatgttctctgtgataatgattctcaatgtttatctctagtcctagactctccactgaactataggtttccgcatccaacttcctacttgacacttgtactcatgtatctaatatatgtcccacttaaaatggctaaaatgtgtgttgacgctaatcaacacagctgatacagatacagtaaacgtgtatttttcctattccagtgttgctcatctcagtaaataccactaatatccacttagttactaatattccaaagcagcaataatccttaatatctttttttcactcattactctctaatccattggcaagtcttgttccaccttcaaaatatattccagatctataccaatctctccagttttctccatctccagctacactttagtataaaccactaccagctcttgcctggaaaggttcaaaactgatctcccagtttttgctccttccttggctttcagttttctacagagtagccggaggcatgtttaagacaaaaccataatgtcactcaacttcttaaaaccctccaatgactttgcattgcccttggaatataaacccaaatttcttggcactggcctacttgcactccttaatctggccacctacctctctaaatgtattttttaccactctgttctgcttactagattctagtcacattggccttctttctgttgcttgaatataagtgtacacaagtccttgtgtactaactgttcctttacataaacattctgtcttcttaccttgcatggctggcttgttctgtgttgctcaggcctgcccatccaatctaaatattcctcctttgagctatattacatgttttattttctccatttcactaattatctgaaattatcttattcctttatttgtttagctgtgtatggtctttctcttgcctctccatgccacaataatgtaagtaggaaacatgtccacatggttaccactatatccccaatgcctaaaatagaatacaaaacatattaggtgttaaaaatattcgttttataaacaaacatttaaaatttagtttaattaataaaaaaattaataaattatcttactcattttatcccactgtatttacttactgatttgtttgatattacaccactgtttattcactggatttatcacatggttaaaatattttttacaatgtaagagaacagggagaaatgaaatagagtcattttttatagaagtgcatggaggtgtggagagtgattatgcagtgctttcaaaatctaaggagtgcatcttacttcggatatgatttgcttcctggagagagagagagaaagagagagagaaaatataacaatatttagaaatgtatcacaacttatacatgtgatatcacaattcgtacattattcttttaagattagttctgggttttttgttttggtttttttttttttttttttttgagacagagtattcctctgtcgcctagactggagtatagtggcacaatgtcagcttactgagacctctgcctcctgagtgcaagcaattctcctgcctcagccacccaagtacctgggattacagccttgtgccaccacacccagctaattttttgtatttttagtagagatggggttttaccatgttggccaggctattcttgaatttctaacctcaagtgatccactcgcctttggctgccaaagtgctgggattacaggcaggagacaccgcgcctggcacctcatttttttttggtgtttttttttttttttttttttttctccctattagacaaatgttgaaccatctcaccgtaattttcacataccatatgccctctcactacattatttttcattgcttctctgagcaacattatggataatttcttcagctctgcctgcccattaattcttcctttagttgtgtttaatatattggtttatttactcagtttcaattatttcatttttctgaaaatgggtacccactgaaaattgtctttttttttgatatgtctttcacatacttgctcagacatcttttatttttaataattttaaatactcatttcataatctatgtttggaattgcattatctcaatgttttggtatttctaatcttgatcttgatccttgtactgactttcactcaagatttcctcatgtgttttataactatggatttgagcttgtacttaacaggattttatatttataaatcctaagtgtcctctgttgagaatgtacccttccagagaaatttggtgattaaatgtatgaggtaacaacacaggaagaaattttttgttaaatctccctttaggatttctttgtccttgtgggtggtataaattcaaacctgaaacatttgtgacagatttttaggagagactttttatcacttctcctagagatcccaaggctcttctttaagattgacaaatgttgcagggaacatccaaatatcactgactgcatattaaccatttccacttttttcttcagttttggccactggacatttctgtactatatttttttcaaggatgcattacagcatttgtcatattttattccagtatttcaaatatgttttgcattaagatcgtttactgtcggtttacaatatctgacacaactttttggcaaaaatgaaccaactttcgtttgtatttttatgtttgccctgtaataaacacgaagaactcacaattatgactgcattagtccattctcacactgttataatgaactgcctgagactaggtaacttataaaggagagaggtttaattgactcacagttctgcttggcttgggaggcctcaggaaacttacaataatggcggaaggagaagcaaacatgtccttcttcacatgaaggcagaaagaattgccgagccaagagggaaaaatcccttaataaactaccagatctcgtgagaactcactcactatcaggagaacagcagcatagaggtaaccacccccatgattcaattgcctcctactgggtccctcccaggacacatggggattatgggcactacaattcaagatgcgattccggtgggtacgtagaaaaaccgtatcaatgactggaggaagagttatttgtatttcagggaaaaaaaaaaaataagatataacatttggacttcttgttttacagagaaaggctggtctatatttttggctcaggctgtttaaacaatatatatatagtaaggtcagtcataccaattacccttcatactcagttcctttccccgttaccattcaccttttgccacttcagtccaagtcctggacttagtcctgactgatatgagaaataaggactggagttttggtatgagaaaaaggaaatgccaaaggacagagaaatctgatgtaattagaaaagagggggatttctctgattacttgtgtatatatatctgtatatatgtgtgcgtatgtgtatgtgtgtgtaatagagacagagattattatgtatgcatgtatgtatttcagtgatattactgaaactcataagaatttcattgcaaaaataattttctatgcccagaatgggtacctatttgcatttatttttataattatttctataattggttctacaagtcaatactgaaatagcttgtttattcctaccacctgcctagtacagatatacagagaaggtaataatatatatttaattttttcttcactgtattttccaacaaatcatatgatcacaatattgggacaatatccaacttagtattctgttcctgcattcaaatgccaggattcttttatagaaaatagacaccctttataagaattaaatggtcgaatatggagaagtggatgggtaattctaaaggttatttgaataaatttgcatctgaaaggttctcaggaaacttcttttaagagaaactttctgtaggtgcatatgctatccataaatcaattgatttggtttgactccatttcctcactcttaccagcatcactagagtcaaagcaaaagctccaaaattgtttacagtatcttccttcttctctcaatcaatagttatatatttagtaattatctgttttaactggaaggatttctatattttccagatgccactctcaggagctaatcaaaattctgtagggggtggggagatgtggttggaaatgaatggaaaagataattgaactgaaaaaaaactttttttttggttagataaaggtagcgaattagatccacagttaacaattatacgtcattgaaaatatgttgtagtattagaaggacggattttgattggtcctattatctggtgttttcaatcatgtgaaagaaaatctccttttaaatgtcctcagaacagatactggggacatttaaatattccctgctttatatttctctctggggagagtatcttagttaaattttggttaccatttgagtaaaatagacgactgccattgagtcattatttgtaggaagccatagatctctgctgttccttacccaactatgttacctctggcacggaaggtaacatattgtgcaagtcagcaataaatcaatgggtacttacaactcatatttttctatttactcatctacctgtgccagtccaaaaaaaaaaaaaaaaaactagtaggtaaagttaggtccacactctattttttaaagaaagtcaaaataatatagatgataggtattaataattataacaaaaattcagttcacttttattaatatttccaaaggtacttccatgatttctgattattctatttagaacatgtattagtctgttcacatgctgctaataaaggacatacccaagactgggtaatttagtagaggaaagctgtttactgggtaatttagcaaaggaaagatgtttaattgattcattcacagttccacatggctggggaggcttcagaatcatggcggaaggtgaatgaggagcaaagtcatgtcttgcatggtagcaagcaaaggagcgtgtgcaggggaactcccctttataaaatcatcagatctcatgagacctcttcactatcatgagaaccacatgggaaagacccgccccccatgattcaattacttctcactggatctctaccacaatatgtgggaattatgagagctacaatttaagatgaattttaggtagggtcacagccaagccatatcagaacactttgaaaactttgacctttggaggggaaaatgtccaataataatctagacttaccagcacattttaaattactgagtagcattctactgtaggggtgtctttaaatcacaaatactttagagaaaaattgtaattgtgtgttaggtcatgttcctcctatgatgagaaccagaggggattggaatgaaaagcacaaaatctgagaagctgaacgttgaactatcacattctatgcttaggtacaaagaacctaataaagtcctccctcttaccaaattaagaaaccagtgcttttattttaaatacttatgctaaagtttttacttctgttacttaaaattttattattcagtaataccttctcttgatatgtaatatattgcatgaaacagtaagaaaagttcttaatgaaatagcagaatagtggatttataattattttagacacagaaaaccttaatacgagtaactacacaaaattgtttgccaacattttgaagtctaaagtggttgtgggccctgaagaatagtgaagtatgagacattgtgggtatgtaatacacctgtatgcttcatataggcagagtctgatctagcatagttggctaggagtataaaattagcaacaaggcaatgttattatttcattttccataagaagataagttctcttttctaagatgatgccagtaacttccatcttggtgctggggtgaccacgttcataggccaaagcaaatctatcactgttcctcaaaacactaactttttatacaaaatttaaccctgtggggggaaaaaacatgttttttaaatctaaaaaatataaaaataaaatgtattcccatatgattgaaaaagtcttaaagaatttttctaaaaatcatttatcaataaaggacattcttcaccctcaatttctttatttttttgttaaactaagaagttttgttcatagggtatattactatgactttaacagtcaagttttattccagaaactgcaatggaaattgcacttttcacttaaagaatgattgacaaaatatggaaaatgtgcaccatatgctatctatacactaaataaattgtctcctttagctcaactagaatcttctggacatctcctatttcagaggcatagcaggaagtcttctgggtagggaacaatgaacagggttaaggcataaacaccaatatgggctaaacacacaaaatagaatctgataaatactgtaataaacatataaaatatggtgggaacatctagaaagagaataatttcttctctaggtgtcaagacaacctctattgaagaaatgttaattgagctggccataaggaatggctagaaaaaaatattgaggcagagcaaatgaagtaaaccgaagtatggaaggaaggaagggagaaagagaagcagggagggagggagggaggaagggaaggtgggcttatgattcgagactagtgtacaagggaaaatagtgggagataaacttgaaaggtagcatgagtatgcactggagaattatggaaaagaatcataaacagttagaataggaccaacctactaaagctcctgaatgctatgctaaacactttagtttgttttaggtaggcaacaaagagaatttttgagctcaggaaggtggtgtatatggcactgtcagagctgagaattaggaccagtaattcaagattgtgtttgtgccaggaccaagattgtattaaagagatgactctgtatttttgcctgccttttaaacatatatatcagaagaaaatattggtgcaatacatatatatgccaggtatgcctataaaaaagatttttgaataaacaactaatatcttttttactccttaaatggtggtgatgaaacactttcatctgaaataaataattgaggtcagataacgtatcttcattgcttacttaattttattttgcttctatagatatgtccataacatgtgtttgaagacaatttgaaaggttttggtagtttttatgatcacaatatcaaaatacatttttgttgtttcagatgatggtgcctgtccattaactgaacaactgtggtaagtttattttgctcatcttatgtctgcacggaatacttttctttttgatattctaaaggttttattttacctataaaacctttggttaaaattctttgaatgagtttccttctggcagttcattaggcattttaggatgttttgtttcttcttttcaattaaaagtaagactttagttttcaaccagattttgtcaacagagatgtttattttcacaaatgcttcacttactcaaactttaacaatctctcaatcaactagaaaagtaatatcctgttgttagttactcttttagtagttacaagaaatactttatagtttttagattgatagcagaatacccagtggatactgacacaaaaattattttttgttttctctactatccataccataagagaaagaagaaaaaagaatttacattccttagcttacataattgccttatattgctatgattattcattggaaactaagatgagtggatataacttggaacaatatagttaatctctggagaagttgctacccatttatgtctctcttggaagaataaacacaacatatttgtgtgctttcacagtactggtaaactggtattttcaaggattctctgcacattgccagacttagagaaagaagactctacataaaattgttactcattttacttcttgagagtttaccagtttagagcagattgagagaaagtgttgcattttttgttcttattcaattgcgataaggaaaatgttatgaaagagtgtctttgtatagcatcctcccccttccctcagactagactgcttggtaaaataagaaatggccagagtgggagctggttggcaggaagataacaattttgaaggcgtaaaaaaatttacataggttttgggtaagaaataatagatcaactgtatgggatgctgtatgtggtgtgacttaagaaaaagcaaatgttggaaaaaaatattaaaagccttattgtatattacattggtgcttctcaaaccttaatatgtctatgaataatgtgggctatcttttcaaaacgcagattctgatttagaatctgagctgaagtaaggcccaataatatgcatttctattagttcctaggtggtacaaagctgctggtttaaagaccatgctgtaaatagtaaggtagtatataaataactctgttcctttgacggctccccaagggacttcaatcaagacattaatttttcaaacgtttgatttggttttgacttttagtgctcttgattcagtgttcaaagattatcttaagatttacagcaaaaatgctgttttgttgagtcacatacaaaaagaactgggtcttgactagcttctatgtctgttttccctcttattacctaattattccagggtaaactgtaaaggattgaagaaagtcagtctctttcagtcaagtaatttgtgagtgaacaaaatacaagattttacaaaaatataaatatattattctaatactgcaatctattcaaaggcaatcatatcactttgcaatagtccgattacaaaaagcaacaacaatggttgtgggggtagatagtcctaaccataatacaagtagacgttatcgtcattattatgcttgaaagtacttgagttttgcttgaaaatgtgataaaatgcttttggtttcgtaccacattcctactgacgttgtgaatgctttccagtctatttgttcagctagttcagatctcaagattactgagaaaagggggtagatgccaaagttggcaggtttggttagtaaccatgaataatggggtcaagaggaaattggtgcaaggaaatctgccactggtccactggtacaaggaaatctgaagaatattctgaaacccagagtcttgtaggtgcttgaagaaggccatggaagtagaagtttcaaaatcaattgaagttttctgctaaaactctcctttcttaaaccaggttgcatatcagaatcaactgtgaagtcgaaaaggctagttagacctgggtagtacccaaaccaattaactcagagtctctcaaggtaaatgaagcctaacatctaaactttgatgcttcagctccctggtgattatatcaggaaatggagttgaaaatcccttacattagggcctgaaattttacattttcaacaagttctcaagtgatgtttatgttgctgctttgtggatcacactttgagtagcaaggacctattagaccccatacttttttttttttttgtttcatgttcctgggagggtcagcatcaactgggagtagtcatcttctctctatggatgaggggaggaagggaaaggaagaaaggagagaggagacatccaaatggcacatggtggagacatggtagaatgcacaactccccacaggattgaatttataggtcaatggaaaaacccctgtaccaaaatagcttctctaattaaatcatatggtacctgaacatgcattattaaaattcatttgatttcactgcattccaaagctgactatgcaaacatgatctttggtgcaattgttacaaatatagagcatggaaggaggagtagagtgggcagggatctggattttaataatcatcccagatgattttaatcaaaaatggagcttggaagccattgttttagaccacacaacaccatctctcttgactttctttcaatatgctacatattcccgttctttaaatcaataatgtatatatactattctatgcaccaatagagctcaatataacaagataatgataataacaagagctacatggtgatgactatttgccaggcactgttcagagtttcatatttataaggacaatcctagataatatgtgctattattatcatctttacatataagaaaactggggcacaaaaatattaaattgctaaaatttacgtaactggtaagtgttagaactgagattcaaactcagatattctggctacacaatacatgtcctgtaaacttccaatcagttgtgaattgatccatgtattcaacaaacacttctggaggagcttttatatactaggcaatttttaaggcactaggaatagagcactaaaggcaataaaatatcttcccctatggagatgtccttctagtgagagatgcaagctcttatttttagaacaaccagaattttttaaaaggtctcagcattaatgacacgaagacacagaattcaaatatagccattccatttgctttctgaatgattttgtcaaatctctttacctgtttagtaatctgattaaatgatgtaaagggacatgtaaataacttatttttattacatcatattttaggataataaaagttttgtgtgtatgtatggtttaaaaaattaaagttttgtgtgtatgtatggtttaaaaatgtcttaatgaaaaaggttgattttctccgtggcagtagacactaagggcatcatgaaagcactagctatcaggaaagtattggtggcaatgttgcggagttcgtgttggcatgggtgctaatagttatgatatttgtgataatggtgatgttgactgaaatgatgaaattgatggtaattactaccacttattaagcacttactatagctcaggccttgtgctaaattatttatattcagtatttaatccattccgcagccttgtggaaataacagtgtattttagagctcaagaatctgaggattagaaagcttaaactactcaccaagtcacatagctcagcaaataatggaggctgaatttaacccaactatatcaattatctgttgctatggaagaaaccaccctaaatctcagtgccttaaaataaaaatttgttattcctcatgatgctgagagtggattgactatgcagttattccactccaataagtgtcaatagggatctcatgcaactatattcagctaagagattaactggaggtctcagttcttttccatgtggcccctctttctatatggtgagtcaccttccaatggctgtccatatatcctttccatatagcagactagcatggtttttcgcatagcatgcagctcagctccaaggagttttgcaaaggagaatccccattgcaagtgcctctcctggtatcaagcttgctaatgtcccattggtcaaaataagttatatgaacaaacccagagttaatgagaaagatgacaagtatacgcatacctggaggcatggttcagtctatcacaccagatgttgttgcagggctttcttctcagttcagctaaaaccaggttcttgtcacatggccaggaaagattaggttcgtggacacatagaagggtgagaataacaatttattgggtaaaaaaggaaaaagagaaaaactttcagctgagcaagagggaagccgattaaccagctcccgccccatcacacaggaacttaagagaccaggctcctcccctctgcaaatgacaggaatttccatggctccaccccattctcccagtgtgcaggttggtcagaggttctccaggaagccctttttgcttggctgtctcaatgtggctgactctaattactgtaatatagtttcattactatatattccctccctgaggagattgaaagtgaagactggaagaaaacagactacaaaatattgttgaagagacatcatagacaaatttgacctgggcttattccaataacagtgggtcatctatgtagccaagaagaaatgcattatagaaaattcagtgttacgtaaaagcaaggttcaaagttcgaaaattcagagactttgaaaggatctctttatagcctgattatcaaattaccctagagtcacagcaaaggtagcaaaactgaaaatttacaagctagaattctactcttgacctaacataggatcccattcttgcaaggacacatctgcaggcaggtagacaacagaaggaccgtggtaattttgtatctactgatatgagacaattttatctcagttgaatcctcaagaccaaacccaaatatgcagaaaagatcttgatttgaatgattaaaaagctaagacttctgctgttaccaatgacctatctgtaatgtacagaagtctcattttgaggttgtgaataactttgcattgtaagcaggtttatgacccaatgggcctgtcaggatgacttaactacaaaacaaacatcccacttactaagagctttacactgcggtcatcaatgtgcccagattactgtatgtagcacactgctctcgctgagggccaaggggagtctcagttgtccagcaagaccataatgaaataacgagttttgcctcactgcttttccggctatttcttttttcaggaactctacagagaatatttgtctctaggactataaatttggtactttccaccacctctaaattttctctgttgcttaagagtagtaaggatcaacaccctactctcatcatttacagactaacaatgtggaaaattgagtgaactcaatatgattaccactcaagggttctctctgtgaaccaaagtcttctttaaattttgagatacattccaaataagaaggcagaaaggaacaaacggtgtgtagaagaaactttttgctttttcttaacacagaatagaaatacagtggcatttccctctattatgactagaggcagggcccacctcccatgtttttccagggagtttggttttactacttaataaaaactgaaaacatattactataaatggaagagaaataatgccctaatatatcaagtagagatttctaagttgcaccaacaaaataatttggtgcatatacaaatgaggactcacatgtacagaattcagattttgtgtatgcaaaacagataattgtacaatcaaagaagtgccttgattaaaatcattgtatatgcaaattcatcacttgctagagtagttatattttggcacatgcatacataattagtgatttctaatttaaggtaatgtcatgatagaaatagtcttacctagtggcattcatgttttacccattagtcaaatcaagtcttatattttttattcttttattttgataatcacattagtcatttaaaaaatgaaatgtctccttgtttatcaatatcatttaaaaatcagagtagtttatagcctctagttttgaaaactggctacacaaattattccttggaaaatactgatatgtcaaatgttgactcactttcaatttgggggcttattttaaatgataaagcagtaaatgtgtaacatagaatatccctgatcataaaccctccattcatttcatatttttattcatatttgacatttctgaaaattaaatagatttaaaagtcaattagtgcacttaatgcagtctcttatgcttaaagcaaagctcaacttaataatgcatctcacaataaaaactatcttatcaagatatcttgataaacaccatcttgcaatcaacaccatcttcttagaaatccaatcttgttatcaatgacaacaaacacttgcctgtgattactatttgccaggtcactacccctcacaaccagcatgtaagatggatttactgaatttcacagatgaggaaacaaacacagattactaatgtattaataactctttcaaagtcacacagcaactgcttgaccaagtgaggaaattcagaacttgataagactgtgcctgctgtcctccttaaaagcaacactaagtctgcttcagttgatcatgtaaagcatctgtgactgtactaaaagttgtaatgagatctacttgtccaagagttatctccttgatctcttacctcttttacctgtcctaaggcaataataacaataataacacatttttaaatttttaaaattattttcttcttttctcttactctcttatcttttattgtttctatgaatactttaggacattagatagctgttcagagggcctggagaactgcaagacagaatctaccattgactgatagagtggacgagtatttcatggagcccaggaatttgttttcccatttctcttaataagtatattaaaagtaaaaatctaagtacttctgtattctaattcacataatctttgctcaaaactctccaatggatccttaatcttactcagaatgaaagccaagtccttacaatggccttcaaagttgcccatcacctaacctcctgtctgacatggtttcccacctccatcttcctctttcacttgcttaagataatccggcttccccgctgtcccaggaatccccaaccaatgtcaggctggaggactttggcctctgctctctgtacctggagtgctttctcacataacagcatgtgacttcccctagcaaccttgaagtctctgctgaaatgtcaccctaccgcaatgcttttctcccacctctgtctcttcttatcccacttaatgctcttaatctattttccattgcctccagagcacttacctaccttgcctttgataaatctatttatttgtccagcctttaatactagaatctatagaaactagggaagccataagaaaggattgactttgtttagaatatcccctcctgtatccccaggctctggcacagagtgaatgttcaataactatttgttgcacaaatggacagtcaaattatagaaataaacaagtaaatgaatattctaggactctattcaaggattccctacttagctgttgctagaatgactgtctgttaggtacagtatcaaatggttttctttacagcataatacacatgaatatatattcaaggcttctcaatggttggtatatctcattttatgaggcaagtaaaaaaggtgaaacttaaagttattgcaattagagataaattactggaacataattaatgtttttttattattattattattttgagatggagttggaatggcccaagctggagtgcaatggcacgatctcagctcaccacaacctctgcctcccgggttcaagcaattctcctacctcagcctcccgagtagctgggattacaggcatgtgccaccacgcccggctaattttgtatttttagtagagatgggatttcaccatgttggtcaggctggtctcaagctcccaatctcaggtgatccacctgcctcggcctcccaaggtggtggaattacaggcgtgagccactgcgcccagctgcgttttactatttttgagaacataataaaagcaatcattaagcagtatgctgctagatatattacccctattttacatgttttacatatattatcaaatttaatcctcaccacaaccttataatggaggcactattattatatcaatttcataaatgagaaaaatgaggcacagaaaaagtttagttacttgcccaaagtcagagacaatcccatagactcctattacaaactgaaatatatgcatatatattttttctcccacactgatttattgttcagcaccaactctccctaatgatcctgattaaaatgcccactgtgaaagatttttttttcaggagactggcaatattattgcattcccttatactcattatctcagaaagcctgttttattatttattctttctgagtgtttgagaaattatcttggagaaattaacaaaatgcattagtatacatatgctacttactttccttagactaatacctataattactggaataaaatatttttatttaatttttttatggcagatttcagctcgtatatttaaaactttcctggtacaatctgtttttttagtcatgtttcttcataaacttgtatatgagaacaagcctgtgattgaatgaagccttagaatcattcaccattgctttctcttcagtacctgactgttgcttaaaactaaggtaaccatacatcttagtttacttggacagtcctagttcatgtctcttctcccagtgcaattattagcatgctatgcatttagatatattgatacattagtgctgggaagggaagagagtggtccctttaaatgatacagaagaggggaagggaagtgctgagtagaggagtgtgtggtccctggctaaagctccatccccacagacctagttgaggacaggcacttctgcctttgtgcccaaatgttgcattttcaaagaccaccctggcctgccacaacccccatcctgggcctataaaaacccaagaccctagcaaggtaaggacagaagttgctggacagcaagaggaacatgtcaatggaagaagacacaagcggctggtcatggggaaaaccagtttcccttctggctcccccatctgctgagagctacttctactcaataaaaccttgcactaatttcccaagcccacgtgtgatccaattcttccagtacagcaaggcaagaaactccgggatacagaaatccctctgtccttgtgataaggaaggggggtctaattaagctggttaacacaggccacctataggtgggaaactaaaagagcaccctgtaacacatgcccactggggcttcagctgtaaacattcatttttaccataatgaaaatgaaatgaaaaacattcatttttaccacagacattgccatagggtcggagccccacagcctgcccatctgtatgctcccctagaggattgagcagtggggagctgaagaagtgagccatgcccccatcccataggccctgagagggggacaaaggaacccttcctgtttcaatgtgacaaataatagcatgtactatcactttcagaagtgcctctgaagtgtccataatggacaataattttctgctcacttaatttaaagaagatatgtgatatttctagaaagtattaataaaagcagaggagggaatttttttcagccaagaatcctatattcagtgaaaccacccttcaaaaataaggttgaaataaaaacattttctctttaaaaagaaaaaagtctgtactctaggtataaaaggggaaacgaataaatgtcctcaataactttattttaatttcaaaagaaataacttaattaaaatctaaagaaaaaaaataacattcaccaaaatgagacactctagccctaaactgtgcttccacttgcttaatagaaattctctcaacaaatctgaaaaaccaacttgtattattaaaatagtctttgccaggaaggataaaacatttatttctctgggtctttactagatttcacataaacacacactgaaaacattagagatgccctagctgaagtactgtgttccatttactgttgcagaaaattcattccaatgtaagcctttgtaaatgtaggtctttggccattctggctaagacaaaggaaagaacaaataatcaaccttagcacctgcactcacatcaaagtccctctgagcgttaaataagttatgttatttctcatctgagctgttaggacacaaattcttggaattctcattctgtagattttgcataaagggttgtttcatttctccctttagataagggaaaatgcctctgtgttggggctcaggagcctgagatggaccttcagttcccttttatttcataaaataccagagtacatccaaatgtccatgaagcctcagacctataaactataacctactccttgcctttattatctttttttccccatccagagggttaatttaacaatgaacacagaaatattaatcataatatttgtgtgattttatgtacatgtgaaggttttaatttttagaaaattaggaaatattttaatttttcctcatattttgctatttaaaatgcattttgctacaactctctcacctcctcctctacaaatatatataataaccattgttataaaatgcatattagtcttcaaaatgattgacttggaagacttaatcattaccaagagtctcaccactgccctgttgaagcttccagaaaggctaatgcaaccaccattcgttttaccgggatctaccctcactcttcattctcttatttgctggagtcttctctactaaaatatgttgcttgacataccagaggcatttgaagttgttttctcagtgccgtacctcattggttcaatgtgaggcattttagcaggtcagcaaccctaggtgatgaatccccatgtggttcatgagtctgtagactcatgcctgccaggggctcacatacttcattccagtcacataggattaagggaaatctagaagatgcatgtcattggaaacatatattggacgctgtcattgtaactaagcctacagactaggactcaggtaatacaatttcacctaagcttggggtaaacaaatagttgcctctttttgtagtaggaagtctaaaattttcccttaggtaagtattttcatataagatgcaggccatactgggcttctgaaatctcccaacacagctattccagaagcaaatagatacacatacaaaggaggctcctggtgagtgttcatacttgttttatgatacagcatattttaaaagaacataagactggagtcatagttaggcttaaatgacacctctaacatttaccttctatgtatctttggactgttcactttaattacaagattatttcttcaaatggaaagcggaatttaaaagtgacattcaccccaaagttatgtcgactaaatgagttaatgtatattaaatacatagaaaagtacatggtttaatgggtgttcccttacccagcatactgagaatgatcattcttcttgcctgtattcactttcactaaggtttgtccagtctgggcatccacacaagcatgcacatagccatgccacagagtagctagaaggtttatggatgaaatacttgctcactgaaaggactggtaactttatttcacacactttcctgaaaatatatatgaaaggattggtttcctgtgattactgacccaggttaggcttaaagcaaaagtagaatctgtaagcattttgagatccttgtgaaagattgtctagtacttcgctttcctctcatttatctcactttcctcttgtttattttactctctgggaccacgttttgaagactgttgatcatacggaagaaaaatagtctatatcctggaggaaaactgtggcaaataaatgtttgactaaaatttctggctgtcttcatagtgcttgaaagtccaaatgaatataggtgaaaatgccaaattactttaaaggctttcagacaagtggatacttggtaaatgaagacagaacatgtgggttcattattctttttttctgttgatattatgtctacatcctggcattatgttggaagacctgtgtttgttcaacctatgaaagagcttcagtcaggaaataaatttcctattgcccaaatagcacctgatagaaaaaatataaatacttcaaagtttgaaacactgtttagaaaaaatgatatattgaacatatatatgctcaatcaattatgagagatactatgaacaactttttaaagtgtttgagagtttcagaatgcataattgtttcagaggcactttcttttctaatgtctcattccataagggtgttttctgcaacagtcaccaaatagaaatatcactaaaaatctgaaaacaaatagtgaagcatgaaaaaagcagcaatgagaaaattcatcataatagaaagtctgtataataatatttagtgatcaaggagctcattttattagtattggcaaacaaccaacaactacaagttacaagaaacattaacaaccagggtaagaaagcaatcagtttttaaatgtcaaggaatctccttatttattttttaggagttggcttaattagaaaagttgttacaagtgccaagaccatgaaaggaacatattttacaagttaaataaaaatgtagtgaatacttactgcaagagctcaaaaactcgacctcaacataccaggtgattagtgttagattcatacaaaaatgatgtttctacattgaactatctcttggatagggttgttgacccaccagaaaaaaaaaaaaaaaaaaaaaaaaaaaaaaaaaaaaaaaaagcctagtcttctgctcaaatatcatcttcaacataaaaccttttatacctgacgtaaactgcacacaaaattttacaatacacaacatggtacaccgaaaatccaaagaagcctagatttattcatcatcttctatacctactagttcactgattttatgtaagtaacacactgagatatatgtttgtttgtaaaatataaattatgtatctataagcaaaaaaaaaagtatgtgaaaagtttttaatgtcccttcattgtttgaattcaatataattagtaatagaatgtggttgttggcaaactgtatctcgtatataggtttatgcttattagactttttgtgtgtgcacagggccttgtgtttagttctggtcaatatactgagcagggttagatatcacttctggaacaagcattgaattactgttgcaaaaacacacagaatgctttgttctttctggaacaatgattatcaggattcaaggtagctactcttctattagacttgatccctgagtccccattgtgagctgaacgtccttgctgagggactctggaattttagcgtaagggagaaataaatattaacttgagatttgggcctgtttgctactgcagcaggacttaccctacacttaccaataaatataattaaggtaccgcataaaagcttatgataacttttcataaaaataaatgtaagcatagatataaaaagtgacaatatatgaatcacaattttttcttagccaaatcatttaactttaataatgtattgcttaaagcattaagacatttccaaacatggcattgcctcaatcaaataatatactcaggatgatgaagagcaagttggtgatattttctggcctccttattctagaattaataagttcagttagtactttgtaaatcacattatacaaattctcttaaggatataacatggtgaacttgtatgtccatagtatgctttctgccatctgtttacttattttgtactcagaaataaaattttaaatatttattaaatgtttaatatgtttaaagcaggtattggttcattggatagtatgagaaaaaataggacaattttcttgtctttagggagtatatagtctagttggagaataactctggaaatgatatgaaagttatataatagcacaaaacctgaaaagtgccaaatcacaaaagaaaaatggtaggatttcataaaaagttattttgatctaaaaatataattcccaaatttaagaaatatagaaacacagtctggtggtgacatggcagggaattttacctaagataatgtccttcagattcacccatgttgttgcaaatgacaagattttcttcttttataaggcaacataatattctattatataaatatacaacattttcatttatccatttatctattggtgggcatttaggttggttgtttttgtgtcttggctattgtgaatcgttctgcaatgaacatgggaggtagatatctctgaaattctcatttcaattctttgaatgtatatccagaagtaggattaccaaatcatatgataagttttatttttgatattttaaggaaactgcataatgtttttcataatagctgtactgttttacattcccacctacaatgtgcaagagtcccaatttctctgtcccctcatggacacttattctctctctctctttctcaataaaaccatcctaacagatgtgaagtgatatctcatttttcattttgattttgcatcttttaatatgccttgtggttgtttgaatgttgtctttggggaaatgtctattcaagccctttgcccagtttctatttgggttatttgtgtttttgctatttagttgtaggagattcttacatattttggatattagccctttatcatatatatggtttgcaaacattttctcccattcgtagatgacctttttaattttgttgattatttctttgctgtgcataagctttgttgcctctgcttttgttatcatatccaaaatgtcattgccaaaaccaatgtcaagaagtttttcccctaaaactatcagaactaatgtatgaatttagcaaagttgtaatatataaaatcaacatataaaaattacttgtgtttctataaactaagaatgaatcattcaaaaagaaaattaagaaaaaaaatcccatttacaatagcacaaaaaagagtaaaatacttaggaataaacttaaacaaggaaatgaaaaactcatatactgaaaactacagagcattgatggtagaaatgtaaagagacacaaataaatggaaagatgtcctgagttcatggattggagaatttggtgtttttaaaatgtgcatactacctatagtgatctatacattcaatgttatccacattaaaaccccaatgatttttttttttttacagaaatagtcaaaacaatactaaatttcacatggaaccacaaaagattcaaaatagccaaagcaatcttggggaaaaaaagacataagctggagatcccacttcttgatttcaaaatacataacaaagctatagtgcaaactcgtattgcaaactttatggtagccactaaaaaacaaacaaaaaaaaacaaaaacaaaaaacaaaaaacaaaacaacaaaaaaaaacaaacactttttacaagtgtagctgtctgagcgtggtggcccacacctgtaatctcagcactttgggaggccgaggtgggtaggttgctgagcccaggagaccagcctgggaaacatggtgaaaccctgtctctacaaaaatacaaaaattagccgggtatggtggtgcatgcatatagtcctagctacacaggaggccatagtgagaagattacttgagcccaagaggtcaagactgcagtgagctgtgattatgccactgcactccagccgggtgacaaagtaagaccctgtcaaaaaaaaaataaaaaaaaaaagcataactgatgtactaagaaaagagagaaaattgaatcgtataaatgtacaattaaaactactcaaggcagtaaaagagtgaaggacacaaatgagaacaaagaacttggacaagaaatagaaaaaaatagtaacaaatttaatagtattaaaacaactatatcaataatgactttgaagaacaatggtctaagtgcacaaattaaaagacagagattgtcagagtagatcaaaatataagacccaactatatgttgtctatagggaagccacatttatataaaaatcatttatcgattaaaaataaatgagtgaagaaaaatatgccatactaacactaagcaaaagaaatacgaatagctattattagtttcagacaaagcagatttcaaagcaaataaatgtatcaggaataaagaagagcattacataatgataaaaaggtcaattctccaagaagacgtaacaattattaacatatatacacctaaaaatagagtgttaaactattaatacaagaggcagaaactgatagaattataaggagaaatggaagaatccacaatcatagagattttgacagtcctgtatcagaaatagtcagacacgtcaggtagaaaaacggcaagtacatagtgttgttgacaacgctatccatcaattggatataattggcatctatagacacttcatccaacaatggcaaaaaaaattcttctcaaactcacatggaacatttactaagatagaccacattctaagctgtgaaacacacgtgaacaaactttttaaaaatagaagttaagaaatgtctgctttcatatcacaaatcaaactataaatcaataacagaaagataactggaaaattctaaaatatgaggagatccatgatgggcttatttcacattgcatgcctgtatcaaaacatctcatgtaccccataagtatatatacctactgtgtacccacaaaaattaaaattaaaaacaaatatataaataataaattgcattcttctaaataacacacaggtcaaagaagaaatctcaagacaattttaaatatattttgaaataaatgaaatgaaaacacaacttatcaaaatgtgtgggatgcagtgaaagtagtgtctagagagatgtctagcatgattaaaactctcagtaaaactagggatatagggagagttcttcagtttgataaagaatctctacaaataacctacagctaacttcaaacttaatggtaagacactcaaaggttttcaactaagaaaggattccctatctcgctacacctttaaacaccacatttgaagtcctagttaatgtaacaagacgaaattaaaatatatagaagggaaaagaaaaaaatgaaaatatctttgttgcaaataagatgattttctatgcaaaaatacaaaagaatcaaaaaactcctagaactaataagcaactaaaacaagattccatatacaaggttaagatacaaaaggtaattgctttcctatataccaacaatgaacaagtggaatttgaaaataaaaacaaaataacacttacattagcacacttcagaaataaacagtaggtagaaatctaacaaaaaataaatgatctatatgaggaaaactacaaaactataacaaaagaagtcaaaggaaaaccaaatttatggaaatatatttcatgtccatggataggaagatataatatcaagatgtcagttcttcccaacttcatctgtagattcaatgcaatcccaatcaaaatttcagaaggttaatttatggatactgacgaaatgattctaaagttatataaagagaaataatatccagaatggcaaacagaatgttgaaggagaagaacaaagttggaggactgatattacctgacttgaacacttaatacaaagctacagtaatcgagactgcatggtattggacgaagaataggaaagtagatcaattttatggaatagagagcccagaaatagacccacataaatacaattaaatggtttttgacggtggagaaaaggcaatacaatggagtaaagataatcctttcaacaaatgggagagggacattgaacattcacaggcaaatatatatatatatataaaatatatcaaatatatatcatatatatatatatctcaacatagacctatgcccttcacaaaaatttttaactcaaatggatcatagacataaatgcaaaactataaaactcagagaaaataaaacgggagtaattctagatgacaaaatatagcaatgactttttaattataacaccaaagactcagaacatgaaagaaataattgataagctgggcttcattaaaataaaaaaacttctgattttcaaatacaatgtcaagagaatgagaagataagccacagaatggaaaaagaaaatatttacaaaggatacatctgataaggagcggttatccaaaatatataagaaacttaaaaatcaacaataggaaaaaattaaaaagtgggtgaaagattttaagggatacatcagcaaagaagatatacagatggcaattaagcatatgaaaaggtgattcacagtatatgtcattagagaaatgtgaattcaaacaacgatatacaactacacacctattagaatgtaaaaatcccagaacactgacaaaaccaaatgctagctaggatatgggacaagaggaattctgcttcattactagtagacatataaaatggtagagctacttaggaagaaagcttgcagtttcttacaaaactacacatactcttaccatatgatgcaacaatctccatagtatttatgcaaatgagttgaaaacatgttcaaagaaaacctgcacacagatgtttataacagcattattcataattgccaaaatttggaagcaatcaagttgtctttcactaggtgaatggataaactgtggtatatccagacaatggaatactcactgctaaaaagaaatgatctgtcaagctatgaaaagacaaggagaaacttaaatgtgtattcgtaagtgaaaaaaaggccatctgaaaaagatatatactgtattatcaactatatgattttctggaaaagccaaaattatggagatatttaacgatcagtggttgccaggggttgcagtgtggattaggtggggcatagaggattttggggtggtgaaactactctgtaatatacatccataaagtgtataacaccaagagcgaaccctaatgtgaactgtggtctttggataacgatgttttaatggaggttcattatcggtaacaaatatatcagtctggtgagaaatactgatgatgggagaggttgtgcatatgtgggagagggagtatatgtgaaatctctgtactttcctctcaatgttgctgtaaacctaaaactactctttaaaaaaaaatagtcttaagaaacaacaacaaaacaaaaatcttctagaagaggtgctttcttcttgagagttaaaatattattttaagaagtatgcctaataggtatgaccctgccgtgtctcaactgtggtacttctctcacttcctgtagctacttttaccaccccctgagcccccaccacccaccttgtttcatctgtgccaacatttttccgcttaactgggccactgttaagctgtttgtagtcaatgtctgaagggatttttcatagtcatccatccattccagaagctttagttttatgtaaagctgggggttggattatggctctgctggccatgtggccttaaacaaatatccaaataaagcctctgtttctctgataataggatcaataataatgccaaacttacagagttgtatatatggatgagatgatgtatataaaggacttagcacatactaagttctcaacaaattaatattattatttttctatgatcctcacttgctgacaaatattaatgttttaatttaagatgcttgatgaaaattgttgataatcacaggaaaacatcttatttgtggcattctataccaggaagaattagcacaagacgtattttttgttcatggaggactactgttttgttccttatatagttatagtaatttcaatgtctatactaaatgcacaaagatactgtattcatatatatctatgtatggacatgtatttgcatacatgattagtttatgcataaaaaccttataactggatgtttttatatgttttattttaaaattgttttaactccttttgaaattaaaaaaaaatatatgttgccatagccaacatcaattctccagccaaattcttcctttagcttgatgatgctttttaaaaatttccacattccctgcagacaagagacttaaaattttcagtttttatattgagtgctccctagaatatagatctgagatttggtctcctagcccaaattttttggaattttcttagtgtctattaagatgggattactgagaaagttactgaatactaaaggatatatattttccacattatgttttatgtataacttggtgtttcattggatcccgcctttcttttttcatcctgagactgtgaacaaaatgttatactgctttataataagagacccgaggggttctatttcagtcttacagtcctattaaaagcttttgaacatgactctattaatgtttttttccttttaagactggattcattttcaagacatagactgtttcatttcatatcttaaagctcttcagtgtttaggaaatgtttcactttattaaatgtcaatttctgtaggatatcagtaattaaatacctatcaccaaatttcttttaagtgaagttaatgggcttgggctcaaaggtgaaatttaattcctagtcctaaacactatgtaggtcaatacatttcatgaaataattgcatgcatgttgtaatttaaaggataatttgactgatggaggaaggtttggtttttagtaatcactgattaagttgtctatagccaaagtcaaattttataggagggtgaaactgaggcagctcaaacctgagcaaacagtcttgcattagtggtcatccaggcatttgtttgccatagagaaaacaattttacctatcctatacatatagattatagtagaaaaatgattttgaatgaagacttttttcaagcccatacactcaacacaaattattcaatggtttttaacactgaaatacgtaacataatcaaaaggaatcatggtatagtagaatgttaagatctactaaataataatgatgagcaagttctcattttcttgcgctttatattatgaaaatgtcttaacactaccttctttacaaggagaatggcctttaaatcctgacagacattttattttatttttactgtggtaaaatatgtgtaacatgcaagttaccattttaccgatttttaagtgtgccattcagtggcattaagtattttaacactgtgcaaccatcatcattatccattcctggactttttcatcatcgcaaactgacttttcatatccattaaacaataactcctcctccctgccattgataaccatcatcctactttatgtctctatgaattcagctattccagatacctcatgtgagtggagtcataccatatttattctttgttttctgacttatttcacatagcaaaatattttgaaggtttacctatgttatagcatatatcatattttcattcttttttgttttttgtttgtttgttttttgagacggagtcttgccctgttgcccaggctagagtgcagtggcgcaatcttggctcactgcagcctccgcctcccaggttcaagtgattcttctgcctcagcctcccgagtagctgggattacaggcacatgccaccatgcctggctaatttttatatttttagtagagatggggtttcaccatgttggtcaggctggttttgaactcctgacctcatgatctgccagacttggcctcccaaagttctgtgattatagcatgagccactgcgcccagccattttcattcttttttaaggcagaatcatattttgttggatacctgcacaacatttcattcacttattcattggtggattatccacatttggctactgtgaataatgctgctgtgaacattggtataacagacattgtctttcagtatgatgtagaaaatttatgatattaacaaaaatgtttctttcaagttttgtttgaaacacatgtgccaacacacacacgcacatacacatacacacacagagtttggttatagacctatgtttaatctgttctattttgtaaaaaaaagttctagtaattgagagcatgactgaatctctatgatatttttgctcatgatatccaattctttaaaaagtcttttatatcaagccaaattcaaatttctttgtcccttctgttattgttattgataagcaggtaggatattaataacaataatttctttcatgattggtcttaagaccatgagagcatttaggagacttgaaagatgaaaatggtgatgtttcagaccttgcccaatgtaagacaaagatggccctggggcactctcaggctggtgccttgttctttgtatatgcattgttttacaagagcttaggtaaacttggcaatactctgaacagtcagagtttgtccatttgttacaacgtattgagggttttaacctgggagaaataaatgtaaactgtcttacattaaggccttctaagacttaattcagtggaagcatttcgtcattatttccctttactttaccttactttattaccctcattcagcttcatcctattaaactactttctggaatatgcttttactttatgttatagttaaaactgcttttattttctcaaatgttgctcctttcaattttcccagaaataagtaattatcttcttcttttgaaattctatagcaccttaaatataattttgttttgactttaatgttcctgttttaaaaatttaattatagaaattacatataactatattccttataaaaagttttaaatagaactaatatagattaaaaagtaacagtttatttattttacctcctattcctgtcccccttggcagctatctagaattttgcagtctatcattttatatatatgatggaatactttacataaaatctgtctttttcgtcacttaatatttctggaatatttttaggttaatatttagatgcacatttttatggttgcgtacaattccataatatggatgtaccatttttcttaatttatttccatctagtagatgtgttaattgtaataaatgataagctcattaaaatgcctgtattatgaaagctaccgtaagccaaattaaaagacacattaagagaaaatatttgcattatatataattgataaaatataatgtccataatatataaaaaattaacaaatacatgaaaataatgcaagtattccaatataaaatgtaaaagagcactgggctgggctgaaaaaagtccccagagatttccaagtcctaaaccatggcacctgtgaatttcaccctgcatagtcaaatctttgcaaaagcaattaaagatttccagatgaagacattatcctgataggctctaatgtaatcacaaatttctttataagagagaaggaaatggagatttcattagagaagagcagaaggcaatgtgctggcagaatcagagattggagtgaggtgaccataagtcaaggaatgctgacagtcaccaaaagttagatgagacaagaaattaattctccctgggagactccagaaagaaccagtcctgaataccctttgagtttagccccataagactcatttcagaattctggcctctagaattgtaatttctattgctttaagccactaattatgtagtatgcgatttgttacagcagcactaagaaactaatacaaatactaataacaagcatttctacaaggtttctaggtgttaggtactcttctttgcatataaattatagaaagtcacttaaattgacttatttctctcaccaaatttagcaggattctgaggcactgggagtttaagtagcttgtccacgattacacacctaaaaagaggtagaacaggtatttgaactgagaaagtccaggtcttcagtccatgtctttaacctttgtactatacagcctctgtgaaaactattagttccaaaaatacaatttgatggctaaggaacataaactgtcagattgagcatggcatcagagatagtggcaattaaagatacataacattgagtgtttgcagagatgtagaagaagaaagtcttcatattttgtgagactctaaactggtattttttgtggggtaatattaaaaggtttctcaaaatggagagtgtgcattactctttgaccaagtgattccacttgaaaagatatccagccaaactaagcttcataagtgaaggagaaataaaatactttacaaacaagcaaatgctgagagattttgtcaccaccaggcctgcccaaaaagagctcctgaaggaagcactaaacatggaaaggaacaaccagtaccagccactgcgaaaacatgccaaattgtaaagaccatcaaggctaggaagaaactgcatcaactaacgagtaaataaccagctaacattgtaatgacaggatcaaattcacacataacaatattaaccttaaacgtaaatgggctaaatcctccaattaaaagacacagactggcaaatgggataaagagtcaagacccatcagtgtgctgtattcaggaaacccatctcatgtgcagagacacacgtaggctcaaaataaagggatggaggaagatctaccaagcaaatggaaaacaaaaaaagacaggggttgcaatcctagtctctgataaaacagactttaaaccaacaaagatcaaaagagacaaagaaggccattacataattgtaaagggatcaattcaacaagaagagctaactaccctaaatatatatgcacccaatacaggagcacccagatacataaagcaagtcctttgtgacctacacagagacttagactcccacacaataataatgggagactttaacaccccactgtcaacattagacagatcaacgagacagaaagttaacaaggatacccaggaattgaactcagctctgcaccaagcggacctaatagacatctacagaactctccaccccaaatcaacagaatatacattcttttcagcaccacactgcacttattccaaaattgatcacatagttggaagcaaagcaatcctcagcaaatgtaaaagaacagaaattataacaaactgtctctcagaccacagtgcaatcaaactagaactcaggattaagaaactcactcaaaactgctcaactacatggaaactgaacaacctgctcctgaaagactactgggtacataacgaaatgaagacagaaataaagatgttctttgaaacaaacgagaacaaagacacaacataccagaatctctgggacacattcaaagcagtgtgtagagggaaatttatagcactaaatgcccacaagagaaagcaggaaagatctaaaattgacaccctaacatcgcaattaaaagaactagagaagcaagagcaaagacattcaaaagctagcagaaggcaagaaataactaagatcagagcagaactgaaggagatagagacacaaaaaacccttcaaaaaatcaatgaatccaggagctggttttttgaaaagatcaacaaaactgatagaccactagcaagactaataaagaagaaaagagagaagaatcaaatagacgcaataaaaaatgataaaggggatattaccaccgatcccacagaaatacaaactaccatcagagaatactataaacacctctacgcacataaactagaaaatctagaagaaatggataaattcctcgacacatacaacctcccaacgctaaaccaggaagaagttgaatctctgaatagaccaataacaggctctgaaattgaggcaataattaataccttaccaaccaaaaaaagtccaggaccagatggattcacagccgaattctaccagaggtacaggaggagctggtaccattccttctgaaactattacaattaatggaaaaagagggaatcctccctaactcattttatgaagccagcatcatcctgataccaaaggctggcagagaaaaaaacaaaaaaagagaattttagaccaatatccttaatgaatattgatgcaaaaatcctcaataaaattctggcaaaacgaatccagcagcacatcaaaaaacttatccaccatgatcaagtgggcttcatccctgggatgcaaggctggttcaacatatgcaaatcaataaatgtaatccagcatataaacagaaccaaagacaaaaaccacatgattatctcaatagatgcagaaaaggcctttgacaaaattcaacaacacttcatgctaaaaactctcaataaattaggtattgatgggacgtatctcaaaataataagagctatctatgacaaacccaccgccaatatcatactgaatggacaaaaactggaagcattccctttgaaaactggcacaagacagggatgccctctctcaccactcctattcaacatagtgttggaagttctggccagggcaatcaggcaggagaaggaaataaagggtattcaattaggaaaagaggaagtcaaattgtccctgtttgcagatgacatgattgtatatctagaaaaccccatcatctcagctcaaaatctccttaagcagataagcaacttcagcaaagtctcagcatacaaaatcaatgtgcaaaaatcacaagccttcttatacaccaataacagacaaatagagagccaaatcatgagtgaactcccattcacagttgcttcaaagagaataaaatacctaggaatccaacttacaagggatgtgaaggacctcttcaaggagaactacaaaccactgctcagggaaataaaagaggacacaaacaaatggaagaacattccatgctcatgggtaggaggaatcaatatcgtgaaaatggccatactgcccaaagtaatttatagattcaatgccatccccatcaagctaccaatgactttcttcacagaattggaaaaaactactttaaagttcatatggaacgaaaaaagagcccgcatcgccaagtcaatcctaagccaaaagaacaaagctggaggcatcacgctacctgacttcaaactatactacaaggctacagtaacgaaaacatcgtggtaatggtaccaaaacagagatatagatcaatggaacagaacagagccctcagaaataatgccgcgtatctacaactatctgatctttgacaaacctgacaaaaacaagcaatggggaaaggattccctatttaataaatggttctgggaaaactggctagccatatgtagaaagctgaaactggatcccttccttacaccttatacaaaaattaattcaagatggattaaagacttatgtgttagacctaaaaccataaaaatcctagaagaaaacctaggcaataccattcaggacataggcatgggcaaggacttcatgtctaaaacaccaaaagcaatggcaacaaaagccaaaattgacaaatgggatctaattaaactaaagagcttctgcacagcaaaagaaactatcatcagagtgaacaggcaacctacagaatgggagaaaatgtttgcaatctacccatctgacaaaaggctaatatccagaatctacaatgaactccaacaaatttacaagaaaaaaagcaaacaaccccaccaaaaagtgggcaaaggatatgaacagacacttctcaaaagaagacatttatgcagccaaaaaacacatgaaaaaatgctcatcatctctggccatcagagaaatgcaaatcaaaaccgcaatgagataccatctcacaccagttagaatggtgatcattaaaaagtcaggaaacaacaggtgctggagaggatgtggagaaataggaacacttttacactgttggtgggactgtaaactagttcaaccattgtggaagacttggaaccaactcaaatgtccaacaatgatagactagattaagaaaatgtggcacatgtacaccatggaatactatgcagccataaaaaaggatgagttcatgtcctttgtagggacatggatgaagctggaaaccatcattctcagcaaactatcgcaaggacaagaaaccaaacaccgcatgttctcactcatagatgggaattgaacaatgagaaaacatggacacaggaaggggaacatcctacactggggactgttgtggggtgtggggagtggggagggataacattaggagatatacctaatgctaaatgacgacacgagttaatgggtgcagcacaccaacatggcacatgtgtacacatgtaacctgcacgttgtgcacatgtactctaaaacttaaagtataataataataaaatttaaaaaaagatatccattgcagcatttgtttgtaataccctaaaaataggaatatttttcctaccctaggttcatatttattattcagtgtcattacctttaactgaattagtccaccaaaatgatttcaagagttccccctaagagtgggacatttaagaataatctttgggactttttcaaactgtcatctttattgcctcaacctagcctctctctgactttaatattctttgctagggacatcagtccccaacactcattgtaagaatcactgctacagtaaatggctcagcctaaaggaaatatgttacatctctcagagtgttgtagtagatgaaaggatgcaaatgtagattcctaacaaggaatgaatggactaacacttattatcttacctgtcttttcctatgcccgatttatgctagtatatttcattcacatgtgagctcatataaacctcataaaatcctgtgaggctcaagtcataatttctatggtaaagttgaaggagataaggcccaataatgttaagtgaatttactagggtcacttggttaataagtggaagaagtaggatataaatgcaggtctaacgttttaccccatgggccttgatcagtttttgacatacttaaaatcaaatttgggccgaattatgtaaataaaatgtacacactgaaatgggatccatattgagtagtttatggccctaaataaagatgaataatatgttttcagaagtttaatcatgccagactgagctgtccttacgtcaacatatacgatgtcacccagttgttcctcatatgacctattgggcactcatgtgtgctagtagctctcccttatgacagggtttggaagagacagaaaatagacctctattatcttattctaggaacagaatacataaaaagactgtgagattgtacaaatgtcaccttttcttattacagcaatttggtgcttctcagattgctttgcaaattcgagttagcatataatatgtgagcctgtgatagcctctccacacccaggaaattggagctatttttttgtccgaacacgtctctggcagttttgatggaaacagctcccatttgtatagcctaaaaatttaacttctggcaatctactgttttttttaatgccaaacttccaatgatagttactcattctaatatatacaaaaattagacttcagttgaacagtacagatcctgtacctggaaaaacatccaaagttgttatcaaatttatgtatttcatttgtaactttacttacaattgggagagagtttatttcactaaatacaatataattgtaggccaaaatgtcaatgtggtgaaagaagactttcttctcttgtcccttatgaatattttacatttttcaaaatatgtatatttttccttttatttactgtaaaatactaaaatctgatgtccttgaaatgatacttttacctgtattcttgttttccttccagttaacttctagtgaattccacctcccccactgtaatctatatagatttctagttctcccttgtagaaactttaaaaaacatttcatcagaatataaattttagcataaatatgtataaatataaataaccccacgtaacactgattatattagctttcttcatttataaatcaaaaactcattttctgtgggacaaagggtttttattttttaaacttttcttaaaatttatcatttttcaatgtattacaatatcctgagatttgtttcattttactaccaaatttcgcaggacattttgtaatttttttcatttttatttccaaaaccagttatacatagtgaagagataaattcaggaaatacacaaaagtagaaaaaaaaagtcagtatctctttacccaaagatcagttgaccttttttttaccttaatgtatttagctctattcatttttattacatgtatgtttactaataatgaggaccttattttgtcttttttgtaacctcttttttactcggaagaatttttccatattcttaatgattcgttattttaaattgcatatttcatttactaaaatcagtgtcaaataagaaatgtaactggtatgatgatggatgatatgtttctatttcctgtaattttccttactaatggccattttataaaatttctgtctgattaaacagaaccagcctattcatttcagtttaggagctagtgctttctcaaaccctatagagcagaagtttttaaaatgctgaatttcagtaatctcacttggcattataaattaagctttccctttcttttgctttctcttcaataaaatttacctccaggaaatgaaaatcatttgctgtccacaggtgacctactctcaatgattcaagaatagataggtcagtgctgtttatttataaagctttcaaaatcaatacttttcaaaggagaaaataaaacgtctcgtaaatcctcaccaaaaagaatccctgcttaaaaaaattacaacactcaggtgtaagccatatatatagtcggttatgcaacctaataaatctaaattcttttttagttttatttgttaataaaattggtcagttggtaattatttcacaggagttccttccatatatgatctggtgttcattagataggtagggtatttgaattctcatgcaatagacttattcctaggaatttttgtagcctcagaactttgataacttcaatggcagaattttactcagaatatctttgtaaagatttataatattatagtttaatatctgcaaagatccatgctatatttacatcaaaataatattttcttgtaactatgttcagttaccacaattctaatgaatgaattaatttatttatattcatcattttaagaatgctgtataatataactagagtttagatattctaagggttatagatttggagatgaggcctttagttgtgaaaaatgtctgtttgagagacccatagagagactgggttatgctgtaggtcgacagcacacaaggaaggaggcaaaacctttggctgatcttttcttgacctgtctatttaagcccatttaatagtctataatctttgctttgaaaaaacatagacatttattaaaagcttttgattataatgtattttaaaccagtatgaacagctgtccatttagttgtattggccatactcccctgcaataaatggaattttatagaactacctcagataaaggtagaaagcaggccaacatcctcagcagaaaagcacaattagggaattcatgagttaaacaactgtttatattttcaatattctgttaaaaattgtaaaatagaggtgaatgaataaagacattatttcttcagtgcataaaaataatctttagtctctattaaggctaataccaactatatgtgaaagattatatgtttgcatttacacacttaaaacactaccttttaaatctcactgctggatatgaggcttagtcaatatctctggtcatataatagagacacatgatcttaagctaagtggcaacttccctgtaacatagaacaattttaaaaagctgtgatccaatattttgtatttgtcctctctgctgatagtatttaacctctgtctgagccccagcacatattactcagtgttctccagcacagggtatgacggtgacatgtttccagtttctcaggtaagatgggagtcatccttgactctcacagtcatatccagttcatcagagaatcctgtgagatgtacaatctcaatgtacctagaacttaaccttatcctacacccttctctgctgctgctccagtctaagccaccattaggttttgcctggattattgaaagggccttctacctaatctgtttttattccatccacactcaacactgctcacagcacaaactgaaccttccgaaatgaagtcaggtcacatcactcctcacctcaaaaccctctgcttcatatctcactaagaataaagccacaattcttatagcagcctaaaggtctttatataaatgggacctttccttgctcgtttttccttcctcactgttggttttcctttctccctccattgcctccataactttcctctttctttctgctccagctataatcctcactgtgcctctgccactcaagaccgtttctcagcctaggacttttctttctgcatagaatgctcttccctcgtatatgtgcagggatagctgcctcataccattcaacaatttgctcaaatatcaccttctaatatggccttcccaacaactttctttaaaattgcaactgtccatgtctcaaaatacattcccttctccaacactcaccaatatctgacatactttctctttgccatatgtgtcttactccctccattagaatgtaagcacttcgggggaaaattctcttcacaattttgtttactactgtaatccagggtatagaacagtgcctgtatatgaattctgagtgaatacttctacacagactttatgtgcatataaaactgtgttaggcagctaattccacaacagagaaaaacgatcagtctatcaatttagactcaatatttctattcccaaagctaatttcatgttgatttaagagaggcaataggccttgatctgaagatcggcacatgaaaatattggtaaacaatactgataatgtaaatatgtaaagtattatagaagttatgtaaaatgttttctaaagtggtattagccttcaactaataccataaaatgccgtgtgtcagacagtgtggggatataatgaattacaaaggatgaacacttttttataatttcattaataagatggaaaaatgcttaaaactataatgcaaagtaaataattaagtatcaacaccaaaaaagttatttactgtcgctggaccttagttccctcagttgtcaaatgtatttgatgaaaaaaatatatcgatggtttctaagtttttgcttgtggagattctacaggctcacaaagctctcttagagaatctagagtggtcacctgtaggaaaggctgctgaatatttgagcttcaggccccacacactgcctatgtgccaagaccacttccacttagctagaaaaaccctgcatctatgagctttacctattgtactaacacctaagattttgtttgaacagagagccaatctcagtcccctaaaagctgaaactacaccaatgttctagcaatttatgatcgacataatggtttttcctaacctttaaaaataaaatgctacaactcatagcaaaatatagttaatttctaagtaaaatagagatagaaatgtttgagaatccatttgtttcagatctcctagtatgagattttgttcttcaggtataagggatatgatgccagcttgtatatgaggatttctaaatctgggtccattacaactatctagaatgttaagacttgttatgattctgagaggcattttagatgccttttggggtgttgatcagtaattgctcttgtggccttatcattccctattttgaatgacaaaaacaagaaacaaccaaaaaaagatatgtcatatccagttctaatgtgaccacaagtacagttaaaaaaaaaaaaaaaaaaagcacaaaatagtactgatttcctgataattattcttcctttgttagcacagttccagaactctcaaggaaaagggtaataaactgggagattaatagtatttaataaactggagctgcctcctgttaattagataactccttaaacatttgataaaaggatttacaagaatctacgttccaccactgaccactctttacaccaataagaaaggttttcttacacttaattattctatctattcttttcttttaaaagtgaattctccatagaaatgtatagctgatttatgctatcactttcaaaaggcaataggttaagcctgctaactatcaacacatttgctattctatcaaggaaatcctagttaatagacttcaaaagtattatagattttaaagaaacaatggatagttattctattggcaggctgtgagcacgtattggccccttgagagtcaactaaaaattgttcttaggggtaagtgaatttcaagaacagagagtatgcccttttttattcatctgggacagatatatcttttagaaatgaagttatacaagacacattagttgatgtttttctgacaatgttgacaatgaagtaccacaagggaccccattcttgctctcatacatttcatccttgaactgtatcatccttgaattgtagatatcacactgtgttgtagtttttagttggttgatattttaaaatgttgtttttttcccttaacaaagtatgaggcaaaaccttacgtatgtttcctaggatcccaatacttatttgtgttttatatgcctatatatttatttataataaagggagaatctgctactatttctcaaaaagtcataaatacggaagcttttgaggaaatactatagaaatactgtatgaatgtataatatatacttacttcccaaccacatatttgccatcccttgcgatgccctccctgtgttactgacttgtgatataaaagaggaatggttttccaagtgggaattaacaatattatagaagtttaattccactcgatctttttttaagtcaacatttgaacaagtgccatgttttccactaaactctctctgattggactcaagaatgactaacgttggctcttccaaaaggagtttatgaattattatggtaaatatccaacatatatgagaaaaaccccaggaggctagggggtttctatccttgtttattcctgtatgcccatttctagaagttttctcattcatggtaggccctgataaatagttgtataatatttaattgaatagtagttactatcaaaaagctaccaagggagaaatctaatcttccatgtggacatgagaaagatagtatgcttaatcttgagactgaaagatcaagaccacactagagtgactgtagtttataataatatattgtgttttcaaaatagctagaggagaataattcaaatctttctagcatgaagaaaagatacatatttaaagtgatggatatcccaattacactgatttgatctttataaattatcacatgtaccaaaaacatgtacctctgttatgtatcaataaaaaaaaagatcaacagtagaattgaatctggcagtaaagagccatggtgcattttaaaaaacactatgaacaaggtaatcaggtataaaattgaggaatgccaggaaaggctaaaatataggacactaagataatactaatctagaaataaattcaaagcagctttaaatattatgataaggaattattgaatattaataagcagcaatatgacatgactgaattgatatttttgaaagatatccccggtggtaatgatctcaaatgaattgaagggagaaaagcctgggcattttcaactgtaaggattatatgcgaaaagaatggttataagcatttaagttcctattacaattgagttgtaagcctttgacctatagggtcccccaaattacctgcacttctaatgacaaaaactaaaatggatttaaacatgacatgattagctgtattcttcctggaaattatccctttatatgcaatatattgagaacctcaggactgaaaatatttggccatgtattcaaatattaaccaagtcatctctatttggcactgcagttctttctttttacatcgttttagtagaatttaaggtaatttctgtgtacacatctggcttcagtgctttgccttaagctatatttccctgtcaccaagtgaaagatatttctgaataacagtactcttgacttatcaaatccacttcctcacataatacacttggaaatctttttcaatgaatgtatctattattaaaaactgtaaagctatctatcatcaagcaggaatttaccattatttatagaaaatataatacaatgaaaataacttataattgctaaataacattttacctttacatattaattttgataccatgactagattgttatttttgctactaaataactttatttctttatacttaattcacatcttgtatttttctcattatcagctttacttctagataatttcccaatttacctatttcagagatgtaaataaatatgcattcacactcccatagaccttgtcacaaacttagcctaatcaaatctttcaatatttattttcaggaaaaagagtttagtataaatttgcttaaaacatccccttaggaaatgggattttacttgcctaagtctaaggtaaaagcttccatagattcagatttctttttcctattatttgcttctgttaaattgaggtaaggactgccctatttttattgtttctctcttatggctttgccaatcatctttttttttttcccatctattatacaactgtcagtctacaggaaatagtctttttcagctgtccaatgctcaaaatgaaaaatatcaaacaactgtcagatttttagaatcacttccattaaaaggaaatttaaaatctaaacacattgtacttaccacaaatattaaatttgaaaacatcatttttgttatgaaatctgacttctgccatgaaaacacatgggatttttagtttgtaaaatgaactgtaaccagatcactgaagcatccttactagagactatctgcaaaaaacatataaaaatgttttcttaagttataattatgttgtgttgaaatggaattctttctacattttctctaatctgtagtagctgtgaaagtaagtgtctctgaatcttctttcacttttttgaggaagcccagcatattgcctccacgcagcaggcactccgtacacctgctgaataaaaatgattgaatagatgcatgaaaatcaaacgaagtcagatgtcaataaagtcattatcagcatcaaatggaatttaattgggaaagtcatctgaagaaaatcagcttagaaccaagttcaaatgaggtatatgagttccacagaaagtagacagggctcaggatttcataccacatctccatgtgagtaatgactaggtttagttggtttcaagttcagtttaattgggaggggtaataattattgaatcccagccatgctgcagaattgttctttaggtaagtctttgtcaatttagctatgtgtttgcaaacactgtttttatgaagatcaggacagagatgaaaagagagagattgttagaaatcttcacaacctcttatcaggggacatttttatagaaattgaatgtgaagtcatgcataccattaaatcaatttctttgtagtccccgaagtgtcctttcctattccttagaaaaatcataaatagcttcagctaataaaaatagcccaaagccacatttagactaatgcagcttaaatgagattttaaccttagacctctctttttaaaaagcttaccttctaattggatagtgcattttatagaaaactgaaggatataatgttgattaggttcatacaatgaaggaaaagttgccaccctaaggtcaacatctgttgactctgaaaatgacaaccagtattcacagtttgagataatggctgtctatgatgggatcattagctgttctgcttcataatttccagaaaattcataataaatgcaagtgcagcaaaatctgaaggagacagtttttatcctgaaattgtttttagaagccctgcccaaacagcttgtaggttaatagaggtgcaacagtaaggttggatgcaatcaactttgattgtgggcttctcagagttggttcgtctcgccttgagtttcctatacaagaatgcgattaagaaacaagcagcttaatgacgttaatgattgttattcagaatgtaaaggtgttggattaatcacaaagactgaatctgattcaggcgcaggcccttctcaacatgtactttttagttctaccattctctctgggtttttggagtgacttctgagatatagaatagctaagcttatagataagttggttttctggagcatgggagccaatcagttcttttatgactattggcatagttagcaagtacatactcaggattgcaacttaattgattctctgtaaaggcaaaaatatgacattcattttaattctgagctttttattatttaaaatcagcttttccaaattcttcctggatgaacaaggctaaaatgtttccaggaatatttattaaagtattatagatatacatagcaagatacctggtatattcttttctgatttcattatagtaagcaattatatttttaaagcaccaaaaagaatacatgctgcttaaaatcaaataatttcattacctggaaaagtaataagcaaatagcataatataaataattttggtctatatttttaaatagacaacaggcaatataacctaaataagaaaaaattgcctatataatatgtttttccaaatgttacaagtacctttgaacagcaatgcaaagaataggagaatatgctgtttcaaaaaggtcttcaaacaaaagattttccagtagttgtggtcagaaatgtgatttaatttcttgcttgtaaaatagcaacaaaaaaaatcttatagaaaaatctcatatttttctgtatagcctgttcacaggaagaattctgttcagctgaactccagagaaatagtttctctctttggaaagtgcaaattctaaagcattacagaatagaaatgtaaaaggaaatagagaacagagaaatggttgtggtaggtaaagatgttacctgggaaaaaaaaggaaagacataaagactcaagtccaatcaataaatatatttataatgcctttataatgtcaaatatattccaattgcttgagacagggtcaacctaaaatagtctgcactattgccctcttaactgtgtcattttttttttttattttaaaaactattgagcagcacatcctctgatttaataattttattgtggtaccttatagccaaaagacctatatttaatcactttgcttctttccctcattcacttgctacctcacactgctctctgattcttatatggtcttttaaaatcattagccacatttcaggtcttctgaaagctgcaaagggaccttatatatgatttcccaggcatagtgactaacgccattcaaagttctcaccaagctttcctcatttcagacctaatgattacatacaagatcatcctccatgtgacaaaaggtcatgagaagtccacaaacctttaggaataaaaattggtaaaatgaattaaattttatctggctttaaattcaaaggtccatgagtagaagcaggaatttacatttcaacagaagaagaatatttgacatccccaaagtcctaactgaaagagacacttagtgcacatcatcctttattccagacacccataaattctcacagtatttatgaaaccagattgtgctggtgtctaaatcagctgtttgctgggaatccgttaaaataagagacttcttaattccaaagctctctaatgtatatttagaacagaattaggcataagagaattaaagtctactgacggattgataaatgaagagaaggaatgagagaaggcagaaggtgcatattatatttgagacccaaatcccccttggatgctttatacccggttgcttgaccttattttacagatgtatttccctctaattttctgtttgttaactataattctgctgcctcactggtagcaagttgccagctttatatcttatctcttatacaaagcagaaattcagggaatgtttttgtattgaatttattagaatggaccttggagatcatcaacagaatgtatttctttttcataatgaaaatcaaacctagagggagtattgtctttgcaaatgtagaaaaactagtcagtggtacttgaaactcaaacatgggtcttctgactcttgaactatgtttcttcaagatgcagcttctgataaacataattaaccttcttgtatattcctacttctccccatcactactttttccaacacaattctttcttcaaacgtgattgaaatggagaaaatgacatcttaaaagctggccttatttagtaaaatctattgcaaatggtggcaaacactcatatgattcataatgaatatgctctgatgattttaaatgtgtgtttgcatttcacttggtttgtttattatacaatagactgtgatgggtcatgaaaaaaataagtccagtgctgttatacaacaagaataatctgcattagatgtccctcaaccgccaagccaaagacctcattctagcagctctcctctctcttctacatcaatttttcctttctactaggttgtttctataaccacacaaacttgctgttatttctccaagattaaaaaaacatacacaaaattgtcttgtccccatttcctctgccagattcactctccctattccttggttctttttcttttgcagaaaaaatttcctgaaattaatgtctatactcctttttctgtgattcttctttatacctcttctcttaaaactgctatagttaggcttttactccatcattccactaaaacttgtcaatgtcaccaatcccctcaatattgctaaatccaatgctctagtctctggacccattttgtttaatcttactggtagcatttgacacagtttatcactccttcctctttaatcatttttctattggcgtctgtgatactacacactttggcttttcttctgtttcactggtttctcttttcatgtttcctttactcatttttcaccatccttctgacctattaacattgaaatgctccaggtttcagtcattagtacccttctattttataccttgattctctcccttgtgtttttactcaatcccatggctttcaaacaccttctgtatacctgtgacttccaatttacatctccaggccctgtctttctcatgaaatccagacttacatatccaacttcctgcttgacttatccacttgaatatctagaaaacatataaaatgaaacttgtccaaaaactaagtccctgacttttctcatcttctccatctcaaatgatagcaactccttgtgttcagtcacttataccaaaaacctaaaaatggtttttaacccactctttatcttattcatgacattccaatatataaaaaatgctatgaagatctatcttcaacacattttcataattaagcccattctttcacctccgctcctaaaactggtccaaaccatagtcatctgtagcctaaatttcagcaatagcctcttgatggatctccatgcttctaccattgtaccattataattcattctcatcttttacagttgataatatataattatttgtccagctttttcgaggtataattggtatataaaaaccagaaaataaaggacccaaaaaccttttgaagatgatagataactttattacctggattgtggtgatagtaacacaagtgtataccacactcaccaaattgtatacaactcattcttaataaagctgcaagagtggtctttctaaaacttaagtcatacttgttaccatcctccaccaacttcatccatactctacaatggcacctaattatctggtacctttccctttattttcttttttgtccacactccactactgtcacattttcctcctttgctattcattgaaaatgccaggcatggactatccttaggcctcttgcactagttgttacctcaccctccattatttttcctccagatatcttcatgcacaactccatcacttcttgcatgtgtttgctcaaatctcagtttctcaatgagaagcacccatggtaccccacttcatgctatcttacttacctaatcccttgctgatacttcaaatccttcttaccctgatacctttactatcattccatagcactttttacctcctaatgcattagataatttacttattggctatagttgtgtattatctatcgctctccaatagcatgtaagttctacaggggaaggaaactttgtttcattcactgatgaattcccagctaggagagagcctaccacaaaaaaaaatgtaggtttttaaaattcatttgaaaagttattgaattgtaaagccaatattttcatattacaagaccttattaatatatgatctctgtaggtatgataaaatatacatttaagatattgaaagaagtataaaagctgcaaaagtgtataaaatcttcctttgaactgagatgtattttagtaagaaaattttattttgttgtggtagaaagaattctaaaatagcccccaggattcatatacccatacatgtccctgtacaaatcccaggacttgtaaatatgatggaacagtcattatcatgattaggttatattatatgggacagttaactttaagaaagaggaaccatcatgggtaaaactggcctataaatagctcttgcacttcctaaaagtgagttgaagtgtggggggattcaccaaaatggggattcctcaatgtggcttcatagaagaaggaggccatgtggggacaaggagctcagagcagcctctaggagctaagagtgacccctagccaaaatcgagaaagaaagagtgaccgcagtcattccatcacaaagaagttaatttttttcaataacctgaaagaacttggaagcttcctcagagcttctagatgactcacagcccagccaacaccttgatttcagccttgtgatagctgaggaagagagacccatcagacccgagcttttgaaattctgaactaataaaagggtgttgttttaagctgccaactttgtggtaatctaccaggcagcaatagaaaactaatatattccttgttttcttttttgtttttatttctctgttttacctttaaactataaaatacttgatgctcatgcttaactcaacctagaaaactttcagaagcaggatttttttttttaaaggcatgaaaacaaggccaatatatacgtaagacaaggtcctatgtaaagtgaatagaaaaaagaaattaaggcaaaattaaatgaccgcatttttccagatcactcaagattgcaatatatagaagtggactcccagccccagcccttctaataattactctgagacatatgcaaagtatttaacctaaactggctttatttctttgttcattaaatgggtgaattttactagattaactctaagatttattcctgttataaaattctgtagttcaatagttctgttgctctaaagtcacctatgattctatgttcatttaaaaatacaacatttttatacattttaatattgacttctgcactgaaaatgttactttaagagtttggtaacagacattaaaatattttggcactttggtaacctgaatcaagatactctaaatatatcaacatgaaataggtagtaaagttttaggatttcaaggacagtcttttgaccgagcctgaacttctctagtgaacattgaatagcattgttttggccaccagagggctcccacatgatttctccctgcattaaaattttgaagaattaattcaaattttatcattgaaaataagaacaataaagatacaacaacaccaagcagtacaagtaatgaggagtgttttctcttttgtatccattagagttattataaatttagcgttttctataaaaacactgagtgaacactcaaaccataagcaaaaagaaccacgtcctaccttttttatgcatgactttttctcaattcctttcctacatatttaagaagagaatcttcttccagacatttaaaattattacaactctgagagaagtcaagatagttctgagactatggtactgtaatgtgaactatgtagacataattcatagttatcattaattcgtcatgcttacacgtttctacattcatatttggtaaattattctgagtttgctttttcttctctgagtgtgttaggaatctactgagatttacaaataaaacttaaccagctattttgtgtgaaggcaacagagtgaagagtttgtctctggactaactccagaagccaaagaatgcaaaatgttatgaaaacaaatgaggcagattttgttgtaatttccaggagaaaaaataaatttgccttagatattaaatattgattattgggaaaacataacagatatatatatacatatacacacatatatatatatacacacacacacatatatacacacacacacacacacacacacacatatatatatatatatatggttttttggcagtattgtttgtgtttacgagctatcaacctaaatttccagcaatacaaagctggacagataaattattttatagttatgctacgatgtactatacaattgttaaaaagtgaaggtgctcttcatgtgcacatagggaatggttccaaagatatgtgggggacaaaaatcaagctgataaaaaatgcaagggccaggtgcagaggctgggattcctgtaatcccagcactttgggaagtcaaggcaggaggattccttggggctaagagtttgggaccagcctgaacaatatagtattcttttatttgcatatcagaatgaagatagagttaaaatatgaatcatatgattctcatggaggaagctcttactgtgttccagactaatcatgtaatcctcatatagtccatcaaggtggatattcatgttatctccaatggacggatacagaaatggaggcacagagagtttaaacaatgagtccaaaatgactagtccaaattatgaacccagctgaccaaatccatagcctacgctcctgacccttataatctttggcacagacatacactagagaatatgttttaagacaatatgtcacaaatcctttttaactgaaaagagaagataagtatttcagtcttctttattcctcagctaacatgtgtatctttccaaggcttcttggtttgctgtactgactcagtaacatgttctgtgtcagggtgtctaggctttatttggcctccctgattaataaagccctccacctaggaaggttcacgtgaacacctgaaaggaagttcagatagtgtgtcctttgcgttttgtagaactaaaatacatctaatgcatagaattatttgttctcattcccaagtactttctgcttttcctgctctccttctagacaagctcaataaatggtgactaatcccttcagattctatagtgcattcccagtgcaggccatacccaggaattcaggtgccagttattctgtgttctgattacctttgtttcctctttttatgttctctttcctacaagatgtattttagaaatttcagtttccttctgtaatcttgcagaagtgaaatgaggcaaaactcaaatctgtacatttggtttcttgttaacagcccttctaagaaaagctcggtggtgggaatattgagggaattgagtaagggatgcctggaaatcaccagcaagtgttcatgtaaccctattccccaagccaaaggtaattgagacttgacttcagggtaccagtggttctgtgaactttcacagaaattctttagcaatctaaaatgaaacagacaaacgaacaaaaacttgcccaaagcactgtaattgaaagatcatcagagttcatttttgatgacaactggacactctcagaaaaagaggatcttaaaatattgagactggctgacctcgttatctgagggaatattttccttttactactttaacatgacatgaatgttatttaagttaataatgtctgtttaatttatattgtactatagtgttttgtttgaagttccttttcaaatttgatattttcaatttcatatttaaaataaaagagtagtaatcagagtgaagggccacacagattcctttctggtccatctgaggagaatgaaccgtagaaaatatagaggatactacatcaccaaagatatttatgaccaatgtatacaaaaattaaaattttacagtgatgaccatgacaccttatctggcagaagaaaacagattgttgacacaaaaggggatgcaaataatttaaaattcttccctttgcttgaatcccagctaattacacaaaggatttagagactcttacagaggagttgatacagtacaaaagggtatggcaaactattgagaaaatcagaataaatgtccatttgtccaaaaataaagccaggaataacatttgtatgcagaaatccatatcacatacctctgcacctataagagttaggctgcttatttgcttctgagctttctaattgtataaaggtcagaatgccttagaatccagtctaagagttattatttctatatgacaaaaattaactgcttgttcaggagaggaacatttttttatgatactaaggctgaaaaaagatgtttctcacagattatcctaaggaagacttgggtgttctacatcagcaaaggatttctgaccactctggagcatagctcctggggtcctttccgttcctacctcttcaagcatttgcataactgaaagcagctttcagaaaaaggagtttcaaggaccaaggttacatctatgctgatactggatagcctacatttcaggatacccctctactctgaaagttaaatatagacagtgcttccttttaagtttttgtgtgatcatgaaatggctttttacaatggactagggttctggataagttctgcagaagtgctagtatatgagaaatgcagattctgtccccataggtgatgagacatatttacaattatttatagcacaaaaaaaaaacatgtgatgggtgccacttaagtggtataaacaaggtgatatagaaattaggaaagagaaagattattatcactggaggtgatgagtgtgagaaaattaaggaaagtaaaattgaataaagccataaaacaatcattctcaaactttagtatacaaaaaaaaaaaaacttagagaaatgaaaaaaatccaattttcagtctcaaccatcagacagttgaatttgttacattttgagtgggattccaaagtctaaaatgtaaacattaggtggcacttctatatcactttacctgtggcagcaatcttcttgggaggcaaaaggatttgtcttaaagcttgcttgcagtgtttctgtattagacagacaaaatatcagtttatggtccctgtgcaagatgggggttggaggtgtggtgactgatagtctgatactgctttcccaaagtagtggtagactggtagataagctagcccttggcatgtcttagtgttctatgctaaaaagtttcttgccattctatgttaaggagctcagaatttaacacctagcaagagatttattaagtgaaatatgtaagcagagaagtgatatgatcagatttacgtcgagtgaattattttttcttaaacatatttccatccccactgacctactgatttttcataatggatctcctcttcacaatggcactatgatacccgcccgccactgtaatagtaattggctacaaaatacagaaaataaatctgataatagatgtatatacatagataccaataacctcagacactacttcctattaaaataggtttagtctcctgaattaattaaaatacaggaagagaaaaatctccactgacaattggaagaagagaagcagcacacagattgttgtagtacagagggaccttattaagagagcaccctaattaggacaagtggaggtcttcagagctgttataatccgtgtgaatctccatagcacaaatgttcaagagaagccacataaagcaccaaataatgtcagagattaagttatatgagagtaggtgaagatgccatttattcaagaaaatgctggaatctggacttactagacattgtacttgggtacaaactcttaccccaactcctgtccccaacgtcccattacacagtgtgtctgaagggaagaaaacatgtgcttttcccacttcagatgatgattaaaggggtgattttcacccacagtatttgttcacccacccagcatacttgcccactctttcaatcaccaagtcctttattcttaacattactgttttacttaagagataacgtcaaaggaattgagcattgtgactggataatggtctcctactgcaagataaatgcgtaggcatttattgaaaataaatgttggaggaaagccaagacatttgtttttaaagtagaaaactattttctagtcacaactttcagtgccagagacattatagctatctaaccaaaggattttttaagtaaattgagatcacccaaagagagcaacagaatacctaatttgttctcacctatataaaaaggtaacattcttgcttcttttctaaagataccaaatcaaattcaaatatgctatttttcttttggtgggaacattgaaagaatgcattagcaacctattcaatcaactctctagcttgattgtgcacacttggattttgcttttttaaacaaagtagatgaatatgcatactaaaacagaagtctaaaatttggtgacatactctctgattttttttggtcactttataggcagtaatggctactgatgtcactatgatgtgtctgaaaaggacataagcaatgacataggacgcttttaatggcagtggtaatgagctgtgtgccacagtagtgatgatttgaattcttccagtcattgcttagtgcctttacagagtgaagcactattgagtgaatttcaacaaacactgcttacactttgcttcagtgttgaaattcataagaataccattataacctgaatagttattagtggaatgtagatgtaccatgaatcaaaatctcacccttttccccattatctgctgctatatatttaacttatagccatattcttctagcaatatagtgtaactgcatggatattgccttgtttttcccttgccactctgtgtaatagctaaagaataatgaaaatttataagtgaaacagaaacacccactctgcatcacctgtatatagtaagggccacttagcaaatggttttaccctgagggataaaaaggaaaataaaaacataacaatgtaacattgaagggaacagaaattgttattcttcattttgaccattgtgttaaaagaacataatctgtaggataaacacttatatgtatgcatgcatatagatatatagatatatatatatatttatatatatacacatagagagagtcctctgaagtatagaaagtataagacttctagataaataactgcatcaataatatatgcaacagagttcatgtgtaaaataaaatctaatcatcttttcaaacattttgaagaggcttatgtttgtttcaaacagagcctcactctgttacccaggctgcagtgcattgtagtaagaccacagcttacggcagcctcaacctcccaggctcaagtgatgctcctgcattggcttcccaaagtgttaaggttacaagcgtgcgccaacacacctgccccaggggctgtgttaagattaaggaattggccaggcacaatggctcacacctgtaatcccagcactttagaaggccgaggtgggcggatcaccagagatcaggagtttgagaccagcctggccaacatggtgaaaccctatctccactgaaaatacaagaattagctaggcttggtgtcaggcgcctgtaatcccagctacttgagaggctgaggcaggagaatatcttgaacccaggaggtggaggttgcagtgagctgagatagagccattgcactccagcctgggcaacaagagcaaaactctgtctaaaaaagaaaaaaaaaattaaggcactttatgtatttaatagaatagtacaaataaaaacatacaaaggcacaattcaaaaacatagagttatagagtgctttatatacatccgtatgtttaagaacaactagagttacatacttagactggacatttgtaagtggctttaaataaatcttccatcttttcaaatttttggaaataagcatcactcataaataagtacttacaatcgtaatatagagttgtttaattgcattagtggttttgtaattattatggtaataactttgtacatttttaacacatttctctcagttaatttttggttactttttcttaaatttttctcaagatcaaattatgttacgtgtgagtcacatgaatattgaccctcccatatttctaattgattgtaaacttgtgtttgctgtacagttttctttctcaaatatctggaagaatcttttttctatgataaatgtcattgtaaacaccttgttagtagatcactagactcctttaggcatctcaggagaatatggctaggaagatatattctgcacttaatattttattaaggaatttgtcttctatttatgctctggggtgtgagagacttccacagcactacgtgagggagcttccagaacacggcccctattctatactcttaaagagcagatcttttttcgtgttgtactttcacctgaaatcttctaaaaagagttccactgttaacaaaataatgaacagattcatgaataaagaagtacattgaaatatcaaagagccactatttagagaaataatagaaatactttcataatgcttttatgtaccaggcactttatgtttgttaatctaatcatcacaataacctaatgtttgttaatctaatcattgtaataaccttctgaagttgatatcattattgttcccattttatagaggaaaaaatggaggaaccgaatgtttgagtaatccaagaccatactactggaagccattatgatcaggatttgcatctagataatatgccttcagaattcatgattattttagcctcaatgctaatctagccatatgggatgaccttgggggagttataagcattaatgcaaattctgtaacagagtcatagattctaagaaagcactttaaaaaaatatactacatcatgaaaatattcaagtaaaaaaaatattttatttagagtaagtgattttggaagtcaaaatcatagcccagggtccattcctagtgtgtaacttcccagccataacctgtacttgagcctctgccttcatgcctcctctgcccatgtctcatactgatcaaaaaaacctactttaacaaaaacctactgctgtaacctctgaagagagacttgcagaagatgagggctgccctaatggattagataatacatttttactgaaatatatgtttaatatttaaaattttaagaaataatatatctctaagtgcaagtaattatcagtaaggaagaatattcatatgaaagaatgtgtgaatatggtactttgtcctaaaattagcatttgtaaaatctcactttcagagtcagaaaatctcaagagactttcttgatgaaccactttcctgtctggaaaatcagtaattgcttgtaggctgttgtttaacttcccaacttcaaatatatgacttctagggcattattttgtcccttatcaatttttccccaccaattttcatgttctataattagtaacaaagtaacattttttcagaaactcctctggctttctaattaattcctgaaaagagttcttattgatagaataattatatacatttattggccccacaggtacatctcattttttttcttaactaccatgtttcaagtagaacttttctcattagaagttttttaaataaattataaaactttttcaaaataaaaaatattaaatatattcaggtaacttgccttttggattgtatctaccatctaaaatgttttaacttaaagtttttaaaagttaaaagtaagttaattttcagaatacagaaacattgtggtgcagaccttctagatatcttttatctgcatttgtgaattttagtcatgaatacaggctgaacacaagtatcacaaatgcatatatatatactttattcattaaaaagatgagttagctttctttttttttaatttttacttttattttactttaagttctgggatacatgtgctgaacatgtagttttgtcacataagcatacatgtgccatcgtggtttgctgcacctatcaacctgtcagctaggttttaagccccgcatgcattaggtatttgtcctaatgctctatctcccctttccccccaaacccccgacaggcctcagtgtgtgatgccccctccctgtgtccatgtgttctcactgtgcaactcccacttatgggtgagaacatgtggtgtttgggtttctgttcttgtgttagtttgttgaggatgatggtttccagcttcatccatggccctgcaagggacttgaacaaaaagatgagttaactttcttagtgtaagttgtcatgtctgatgccaatgtaacaaaataatctttggagttaatgtatttgtgtaattgagagatgtgcattttcagtatacttggctatctagaagataaacatatatagcacctaagatacatattattaatgtgtgcaagctcagttaggaagaaaaataagtgaaaagtttaatttccaaaagaaagttggagtgcttccccaggaaaatttagataacctgtttcttctcattggtattggaccctaaagaatttcacccaggatataacatttagttgaaactgggaagaaaagagaaacatcctccccactttcatttcattgctatttttaaaaagaatatatttgtttcacttcatttcactgtggaaatagacctgaagtcctcaaaaaaaaaaagggttccctcctgtttgtgattttcgaatgaaacatttttcatagcactgcttgtttgatataatgttttatctgattttgttgacactggaaaaaatagtttctccaatgctaccttcaaactttgatatttgcagttgcttaagtcattaggttgtgtaattcaaacctcatttggagaaaagtcagagatatacaaaagaaggcgtttatgtagccaacaaacatatgaaaaaaagctcatcatcactggtcattagagaaatgcaaatcaaaaccacagtgagataccactcacaccagttagaatggtgatcattagaaagtcaggaaacaacagatgctagaggggatgtggagaaataggaacacttttacactgttgggtgtgtaaattagttaaccattgaggaagacagttgggattcttcaaggatctagacccagaaataccatttgacccagcaatcccattactgggtatatacccaaaggattacaaatcatgtgactataaagacacaagcacaagtatgtttattgcagcactacacaatagcaaagccttggaaccaacccaaatgcctatcagtgatagactggatgaagaaaatgtggcacatatacatcatggaatactatgcagctataaaaaaggatgagttcatgtcctttgcagggacatggatgaagctggaaactattattctcagcaaactaacacaggaacagaaaaccaaacaccacatgttctcactcataagtgggagttgaacaatgagaacacatggaaacagggaagggaacatcacatacagggaggagaacatcacacactggggcctgttggcggggtagggggctaggggagggatagcattagaagaaatgcctaatgtagatgacgggttgatgggtgcagcaaaccaccatggcacgtgtatacctatttatcaaacctgcatgttctgcacatgtatcccagaacttaaagtataataataaaaaaaaaaaaagtcagagatatacaatttgtgagactgccttggaagatactcaggtaaccacattttgttcaacagcaattttacatcaagattactaggaagtggttttcacaggactcagtatccccaaaaaggctgtactttctttaagcaacagctctacttttcccttccatacacatgtagccaatcatgtttcttcatttctttgaccatattagaaagcatatagccaaatatgtattaatctcgtcacctataatacattttatttactaacattactcctgttagtattttttctctacttttccttttaaccctgtatcatcatcttaaacaaaaaatagtatacaaatttattttccccatcttctccacctctttttaaaattcaagtaaagtggcataaaatagtcagggacccagggaaatactacatgaaaatatgttataataaactacatgtgggagttctataaagcatgacagtattgcttgaatatcacttgaccacaacatctgtcaatcttttcattattaagaaggatattgtccaatattcctgtcatttctatgctactgaaaaacttttctcttaaaatcttggctgggtgtggtggctcacacctgtaatcccagcactttgggaggccaagacgggtggatcacttgaggtcaggagtttgagatcatcctgaccaatatggcaaaatcctgtctctactaaaaatataaaaaataactgggcatggtggcacatgcctgtaatcccagctactggagaggctgaggcaggagaatcacttgaacccaggaggtggaagttgctgtgagtcgagattgcgacactgaactccagcctgggtgacaagagtgaggccctgtcttggaaaataaaaataataataataataaataaaatcttgaagtgtttgagaattctttcagtctacatatatcattattttccttatgcaaatgcaaacaggtatcctttaatacagaaaggggtataagaagtgatcattccagccctcaggttccaaattagaagattagtctaaggtcaagtaaagcataaacactattatccaagatctaaactcaagatacaaaaccaggatgtcaattcaagtgggtcagccaagcagtaagtggaagtccaaaatcctagtattggcagatgtccatctattaccagcaggacaagtgccaggaaaccaggctactaatgtctgtgtctgagcatgggcactgaatagtaatgcagtcagtgggaagtggggttcacaaaggaggagatggggtactaacagacacctgcgccctggggggataatgagttcacgttggagcaacaactgaatggagagtttctaacaaaggatttctttcagagcccatctgcctaaagtaacattcatctcagggccctgagtcaggctgagcctacagatggaggttaaatagagcagctgaaaggaagaaaggctggtggggccaggaaaaacaccagaaacaccatttttgcattaagtggccacaatctacaactgcattatatattttgtgatatatatatatatatacacataaatatttactacaattttatttttcctttcttgatttgaaaaacaattagcaaaacatttaatgtatttccttaaaaacatatttacaactaccttttataaggaaagcttttgtatacataccacattcaatattgaagagaatgaaacttgtattgttagaagaggtctgtgtatttaggttcaaaaactgctgttactatcactgttttcttcactagtagtttattctaatgattagctgggtaaaatgaattatatgccttcttcaggaatgtaacagctcatgaaaaatcatttatttgtcaatgaaatttatttttaagtgaatcctttcttgttacttcgcatagctaccattgacttgtgtttattctggtggtattaattcctataagtaaggaaatataattgttttccaacagcatgtccaacagctttccagctggggccaactctattcaattcatagctctttagttctaacagatattgaattccgtactctgtattaactcacagtgtgatcacgcacccaccaagtctgtagcagtaattaatatattgcatggggatagatcccattaactgaacaactttggataatggatttcaggttaactactacttgtagcattcggtgtcattcctacatttgaactaatttttggtaatattttatccataatgtataataagcataattaaaaggttaaaaagagatttaaatagtcacaaaataacataaccctcttctaaagcaaatcttcagtgttctgagaaaagaaattggttacttcatattatagtcttggatttcattccatatcttatatgcacatagtatcatggactttctgatgcaacatctgtttttctgtcttaaacgggaggcatttatccacatattgattatgggctgttaattttcctccatttcagccagtcatccccatcagtcagtatcactttactgtctttagcggtttctagagtgccttacctcaaattaaatctgttatttttcactctttcctagagtgccatttatctatctctcttactgagactttgtattgctaatgtcttctcacagtcactcctatcttgaaataaatttacatacagcctacccaattaaagtatgtttgctgctgaatgataaaaggcttccaaaatagattagcatgtaaaaaagagtcttcatatttatgattatatatattggtataaattgacctaaaaccaatggtgttattatatccactgtatttcactttgctactaaaagcttccatgatgttccattgctatagtctcaaagtagtgagcatctttcattctgaagcaatcatttagggtaataagcaatgttcttaggttttttgagaaacaactgtacaattacttacgtaagcaaatattcagtagctattctaagtgtttcttggtaattaagttgatgtaaataattgaataaaattgctaacctgtcaatgcatacatttaatttattcagtaaatatgtgttatgtaacaactgtgagttaggactataccaggcacttattgcaggttatagaaatagatcagacccagtgatattcgtcaacttaactccagctcaaatcatggaaaagcatgtgttcaaagaagaaagtctggagtgcagtggcgagatctcggctcactgcaagctcctcctctcaggttcacaccattctcctgcctcagcctcccgagtagctgggactacaggcacccaccaccatgcctggctaattttttttttttttttaatttttagtagagatggggtttcaccatgttagccaggatggtctcgatctcctgacctcgtgatccacctgcctcggcctcccaaagtgctgggattacgggcatgagccaccgcgcctagcctctcacctagctttttacatgcttcctctattaacatgaaaaattcttttcagttgattttcagctataggtcattgtgttgttcatgcctatggagaagccctcccaatggcactggcaactgacaagattaaagtgtattttccatttatagctcaacagaggatatgaccatttgtcgttagattcttcagcacaatatgtcatccttaaagtagcaggaatcttgcgatttttctcatgtaacatttttggccactctttgatagaaagttttgggagttgaataatgagaacacatggacacagggaggggaatatcacacaccagggcctgtcgaggggtgagggggtaggggagagatggcattaggagaaatacctaatgtagatgatgggttgatggttgcagcaagccaccatggcatgtgtatacctatgtaacaaacctgcacgttctgcacatgtgtcccaaaactttaaagtataatagaaaagaaattggaaaaaaggaagttttgaaaacaaatattgataatgagaaggctttagattttaaaaattttgaataaatgctgaagagcttggaaagttaattttataccaatagtttagctgggaatttttaggtaatataacttttctgtatctttctaccagtttctgtgaaaaagaatatcttataaaatataaaaacattagatttaaaaaattaaaatgttttttaactaaaaaaacctaaagcctttcttgttttgtaaaattctaaaatagtttcgttcagtattcaggcattaatatgcaaatcaactcgttgtttaaaatatgcctttcagatacctattttcatcttgctgcaatctgaattagacatgtgccagaggtaccacatattcttaagaatggaattcctaacatggaatagactattaagcctacattctgttaaaccttgtcttctaaatatgatacagcaagaatttgaacataagaataattctttgcactagcactgagcattgctctagaggctgtgatgaacaataaataaacacgaaattagcagcttttccataatgactatttgtcattgtatggggatatttttcagatgtaattttttatttgaatggagcaatttgtacatgaaacaaaaaagtcttctgaataaatacataggttgttgttttgatcaaagttatctcctcttaatgcatgtgttttttagacaggaaaagaatgtatgaagaaagtaaaattccgcaattttataattttatggttgcattttattacatcataacaacctctgtttatttagtacctgctggggtagaagcacaaagtgtgaggtaatttgtacctatgatagagaaacttataatgtagttagcaagataactcataatatagttatcaagagaacaatttaaatgaaaagggtcattgtccagcaagccttttgccgttgaggaaagccaactggctgcccagaaatctcccccagagagtggcatcttcttggcaaagtcatcacaggacaagtcttggccttcaaatttgcaggttcacgtatgcgatttgtcaggttgtccatcacttaaaggtagattcatattaagcaaattctcagagactagaatttaaaccaacattttcatttattaatttaaagtgagaaacataactctaagtaaaatcatcccctggctatatgggaagaaaattgtaactgggagtgttcttggcatgcataaaatcagaacaagaagagttagatgatttgaatggctcttgttaatgatctattaaagtcttctttttgaagatagaagtacaacagagcaccccctacctgcaggagaggacacactgccaacacctgcctctcagattttccctttaccctgctttcattgctgactacaattttggatacattgtttctttagttatagtgattggacataatgttgcattttgtcagttaatggtggcatcacttatttctgtcccaatctctgatttacttcatagtttctttctcagaaagcattcctctttccctgtttccaaggttgggaaagaaatgttgggaaagtacagcccattgaccccctaggtcagcctccactctgttatgtgtagaaaatttttgacaatgtattttgcttttaaaaatttttaaattgtccctatataggtcttcccttaaagaactattagtttatataaagatatgtgtaaaaaatatacagctgttatatatattctgtcaaatgaacagcataataatagctgtcgaagttcacaacagggagccatcactgaaaaatgtcttactcatataaactatcacaaagatgagacttaaagtcaaataatttaataatcataatttatgacaattattaaagtataaatttcaagggcgttttaaaagtgagcttactttaaaagttgacaggcacatataaggtaaagcagttatataatatatctcatagatatttatcatttaaaaaatattagcatatttctgcctggatcaaatgtggttttgtatacaaagcatgattatcctcatcccagaacacatattacctgccaacccatatagagaataatttgcttaatatgggttgaaataatgaactttatcatttagggatatgggaagggcatggaaattggtcctggagtaaagaactatgtagccagcctgtccaccatcatcacctggttggacatcaagatcactgtgcgacgtcaggccatatgctccttgaaaagtttatgattcagtttctatttaggaacccaaaagttgatagcacaacattcttccctgagttccaactcacatgggcaaaggattctgccttgagaatgtgtatcattcttttatctgtatgaccaacatctctacattctttccagagataacatcagagctaaacatgtgtaactctctctggaggaagatacatgaggaagtagctttagaaagatacatcaaagagcctatctttgtttctcttatgaggcggttacaaagcttatatctttgcatttctccgtaataatgaaaataaaagattatgtgtgtgtcgtatctttaacctgtgatggaaatatatgtaatattctttttaacatctttttttgagtttgtgcattttttcctgaaattccaatttcttagatttctttctttcttttttgaaagttattttatccaagtttatgatctctcctattattggaaatgaatattatgttatcatactcccttgttagtgtgtatttgaacatgttacatttcattagatgctgagttgtgttttttgttgcaaaagttgaaagtccaaattgctttgaagtttagacatctacgtttttctagtttctgggtcctcatttgtaaaagagaggattgaatgaatttttctccaaggtataattcatttctatgcttcttgggccaaaagtgaatgagaaaggaataaaaaagtaaagaaagaaacaatgaatatgtgattgatgtgtgtaacatttggtcaaaatagcatattattgtattttaacactgttaaattcataagtcctttatattgattatttaatttaaaataaataccagctttaaaagactgttccaaggaagaacaattcaaacagacttagtaaggtaatgtcttaatatacaagtgaaaagatgggtttgtgtctactgtacactacccgttaaaaacacgtagtgagaaataatttctatgacaataaaggtaaaaattttaatgataagttcaaaaattgccttcaatcttgttcttcactctaaatctagtgttctcatattaacattcagagtttatccttcaccaaaagagtctaattatggaagaatgatcagattggtgatgagtaattcaactggggatgaaattctacaggtaatgtaatatgaactgcaatcaggaatgacaatgactttttaaggctttttcaaaatgcttatttcagttgaaaatagcaaagctaacacggaatatcaggcaaaaaccaaattttcagttgatgtaattttgtcagttggagaatattaatattagtctgagctgcagttaactacaagatgagcatatattaagagtatagagacaggtgaagtctttgcttttgaaacaggtgcattttattcattttgtaagctgaaacataagatcacatttccaattactctaccttcataaggttttttttaaaaattactattaacttattttgaattatatgctcatattggtaagcatctaatgttgatttcttacctagtactactatttacttgtcttaatggtaccttggaagatctttattttctctgcacttctgaacaaagcaacatggttgggatgaggatgatgatgatgatgatcatgataataatagacactaatatgtattaaatgctttctgtgtaccaggcaatgtggtcagtgatttgaataatctctgatatctaccaatgaaaaaggtaacatgattagatccattttatagatggagttaacacaggcacagagagataaggagacatatccaaaccccacaagagaaagtggcagacccatttatttctcgtaactgatttcttcctgatcttcccaccagaccatcaaatattttattctgtcacttctgaacttgacagatggaaaagttagggaaactattatgaaatccccactagataaatcaactaggtgattaacagactatttcacattaaactagaacttttagaatactgacctgatgcttgcttcacatttgtacacatacccttggaagatcactttcacctagacataaatacttctcagttccatcaatcctctttttgttttttggctaattttatatgagccatcttaattgtaggttcctgaagtacagcaacaactgagatcatgtctgttttattgttaagcaactatgatagaattatcattttggagtgagacttaagtaaatttttaaaattgatgacgagatctatgtttttatttctgataaaacttaatatgaagtatacattacgggcatatacacttaggcattttctttcaacattgataaaattaagcattttctttgtgccaggcattattaaatgtacagactagcttagtcatagttcctccccctcacatagattctaatctggtggaacgcacgacattgaggatcgaagagactatgaaatattctattccatcaatattttcttctctttagcattaggtgttccagtgtttaagtaatatatactattggcaaatatatctgaatttcctaataattttacttagaggaattattttccaaccacatctacaaattagtgttttcctttagctaattttaaattttgacctcatatgaatgtattataaattattggttaatattggagttggaaatatctatcaactgtcaggaaaccaagtggcacgttcaagattacatggtatgttagtcatacagctggaataagtttcagatcttctttacatttccagaccagtgcttttcttttatattaattctgcgttaagtcccacctttcatcatgtggccacttgtgattgcattgcagactttatatatatatatatatatataatatactatataatatatatgttttatatatatttatatatcattgtttccaagtagcccatatagagagcccaatgctctctatgtagcttttattctcccctaaacaatccatactctctctgtctttactccatcctctcccctcctcatgtgcctgtttgcattctttgctccatggactttacagacatatgccccctaaagtgccttctttctgcctttctgttactctgcagccacatttcaagcccttattctatgtcacctacaaagccttttcttattatttcagccccactgatcttgctcttctgattatctatgtattctatattatctctctcaaatgtgataatcttgccttcccaggtatatttgaagtatctctgcagccagaaatgtggtctttgtactctttatgtccctcccgaacagctcaaacatttaataaatgcttgaagtgctctgtgttccaccgattcagtgtcttatccatgctttttggatacaaaaatatctaacaatcactttagatcacttttgcttccttaacactaactaacataagagaataacacagcgtaagagttctttttatgattaatgttagcattctttctggaaatatagcacatgtatccacttgatgaaagtatcaggaattgaatttccacatgtaatttattttacttacagcagtttgcgtttaatttgacaactctttcattacaactaccaaaaaaaaaaccctcctctgtacaaatgtattttcatatttccatctcagtataagcacagctgtgaaccaattacttcaaagttcaagagctggttgtttctatccttagcatcactagaaaatgttgaacaacgtaatcctggggagagactcccaagctcagtatagaggtttttttttttttttcttacttctattttcttaattttgttttcatctccaacataaatgaaacagattatctttcctcgactatcgcatttactttctatatttggtacagtgtgataataggtatctgttttgcatcctaatttaaatatattgtgtggttatttttttagttattgatagcaactagacaaaatggaatatactatgaggtatgtagatcatctagttatctgagggataaatattttttcaagctatctgcattgtgagtgtatatatgtgaatataaaaatatgcatgattcacctgctgtttctggaaatgattattttctgactctctctctctccacctgctaaattggctttcaccatctcagaggaaagcaagcacataaatgactgattcaaatatatatttgagatatccacattcttacaatttggtatttttagcatgaaatcattttctgtgtattgctctctgtcattgtctttagtgatcctcctcacctctacatgtgaacagactagctgtccatgcagactccgcagagagggaacaaatatgtaattagcatagccttttattcctcccattgatagagaaaaagaggtggggggatgttcttcaagcaacaactctaggtcacattaattttccccaaacttcccctccagtttccccagaatttgctatgttgggcatatcaacatgaactaattagtatgcatgtctaacatgatggatgatctcccaagccccaaaacagccccaattgtgcatgcccttcttctgctatgtcactgcacctatttatttgagatgatttgattcagtgattgacagtaagtgtgaaagaggtgggaggcaggaaacaagaagagacttctattctgtaaatgttacctgcgtgtattagatagccgttgttattggtacactctgagaatcttagcaagacggtattctctggctttcaatttgtaaaacataccccttttataggtcagagatcatccataacgatctactctcctgagagctgttatactgcctgttcctgacaatacttccttttaagggaaatctttattcctacaaaacttgtgctctcctcctccagtttcaattgataggattagatgcgcagataatccaatgtctctctatgcatagtcctgccagtgatctaccacctatgaattatcccgagaaagaatgagccaggcaatcatactactatttaaggaatttaaaacattttaaaaacttagtaaattggaaatgggggtggaaaaagacaaggtacatcaggaaagcctgagagatagtagcaaacctaacccatttgcaagctaaagttataaaagaggggaaactaagtgaaagctggttttggagagaagagaacagaacgcatgttaagcattatcacatggcaatccgagacatgaatagaatagctagtccttgaaactgtctcatacattactgtatttcagcccaactgcaggtcttcatgtttgcttagactcttatctgagcaagtttgcccaggattttttattccatgcaaccaaatgaccagatttactctgttcattaacatttatttagctcctagtataggaaaagctttctgttaattgctgcaaagatatcatttcaaaaaaaaaaaaagctcttcttttccccaaaaatgctcctgtatgacatttttaataaatcaatattactagaaatatcccatgtctctttcttcctagaaaaaaagtgaattagtacttttcaatatttatattatagataatttcacttattcccctaagcaaaaattcaatgacttttttctctctacaaatcaatattatatatgagtttgttccatttaagggtattgattatcctaggacaaaattaactctttgtcaaaatttaataaaaatgaatcaatatgtgttattaatagcatcatcatacatttatacaattaaagattaaagatgtactgaacagacttttaataatattacttattgtatttactatatgactattagttttcacattaaatacaagtttttttcttaatgtggccatacattaaaattgctcgatgggaagtcataatttcaattatatgtatagaatataaatcccaaaggttactgtacttgacttaattgaagataaccttattttaaaaagtctgcggcaggtggagagaatatgtatatgtatttcttcttatacagcttcaatcagaggttcttaaaatttaacttttttttaaaggaaagtcatttgagaatagaaggcagacattaagccagtggtgtgggaaaagacaacaggaaaactgttctatgtaaggaatgaacatgtattttgggtgtcaggaaatcaaggaagataaggagaaaagagaagcagggggtcagatggcatggcagggtctggagtttgagacaaaagatagccagtgataacatgacaccatggctaaagggcattatgtttctctacgtaaacccaatccgccatcctaaatttttagtcaagcctgtttagtctacaaatgttctttgtgagaactggtggggaaatcaaggaaaagccaccttctcttacccatgacagggattagcagctagaagtgactgagaaggtagggccctaggaatttctcagtgagggaattggcttatgtagaacatgaatgattgtgttcaaaaattgtatttaaatcttaacagctaatggaaccttactgaaaacccatttgcattaatgcaagtttagttttcaatatgaagtagtatctgaagatgaaactaacagctgtgaagaaccaaacctctaaatcataatggtaaactggatgttcatctagtttgttgtaacaattatgtgatccatgtaattcttctatattctctctagctccctccttgggacattctctaacagaagatagaaggtttttctgtaaagcaggctatggggttaggatgagaggagctgtttaattattcttggcttttgtatatccagacagagaatagcaataattgtaattgtattaaacttactttaattaaaaaccaacttcatcattcaaaatgctttttaagaacattatctagtgtctactgttatctcacagtaaagggcatggaatctgtgttctttaagcattaataaagttgaagaaaactcatctcttagttatgaaaagatgaaatggggtcatatagactgtaatctctgaataaatctttttctcttgcaaataaagactttggtttttttgtgtttttgttttttgttttgttttgttttgttttgcatgaacttacaaacaataaaagtaagtagccagccatattatcctgtttctgtgatgtcaaactgggatgactctcgttgtcattaccaagttttgctgagatacattactgcacaattggaggtggttttgggaagaggatagctgaattttcccagagtcactgttcattattttctgacagatgttctcaaagaacaaaaagataaagaaagaaaaaaagtgttctcctcatagtgtcaatttttacgcaatcttcaagtttcactccttatcactttaaccaaggtgatcaaaaatgctaggcgcggtggctcactcctgtaatccctttactttgggaggccaaagcaagtgagtaacttgaggtcaggagttcaagaccagcctggccaacatagtgaaaccctgtctccacttaaaaaaaaaagaaatagctggatgtggtggtaggcacctgtaatcccagtgactggggaggctgagatgcaagaatctcttgaacccaggaggcacaggttgcagtgagccaagatcatgccgtgcgctccagcctgggcgacagagcaagactctatctcaaaaaaaaaaaaaaaaaaaaaaaaaaaaaaaaaaaaagcaagaacaacaacaaaagaaaatgtgatcaaaaagaaaatttgaccatgttttgctcataatttctgtgagatttcaatataaacacatatgctaaattgacagatttaaagttaccagccaggttgaagcatctgaacataaagcagaaattgagtttaaagaaatataataagatggaatggaaatattttcttttcactttaaaattcattaagctgtctccactttaaagatcctgatatgaaacaacaataacaaaagatgtctaaaagtgaatcatgtaagtgacataccacatactacatgtaagaatgaatgtagtatgtatggtcctacatgccactatttggcagtgtctcttcttccttaaaactttaccattctccctgtttactattagctccggtaaatagaatattaaatataagtgttaaaaactcaacttttttgctaacttttaaatttttgatttgtcatgttggattcaaatctacttaatctaaattcacagagtttagagtaattttaaatggaatcatcaatagcactcttttgactcaacagacaacacaaaaactatgtacatcaagcttgtccagtccatggcccgtgggctgtatgggcccaggacggctttgaatgctgcccaaaacaaatttgtaaactttcttaaaatattatgaatttttttgtgattttttttttttttttagctcatcaactatcgttagtgttagtgtattttatgtgtggcccaaaacaattcttcttccaacgtggcccagggaagccaaaagattggacacccgtgatgtacatgctatcatacattttatgctgaagatggacttaattgaaacatagtaccgtgtattatccagtgaaaaaatagaagtattcttgagctctatccttgaattacaacaatataggaaagtcttattattgttattatttcccacattctcattttgtaccttgtcctagaataaacctcttgcaatagaaacaaaatttcagtgaatacaagatgttattactatctgtcatggatatggctgtttaaaagtgcttctttttatactatgtgctttgctacttatattttcatgtacttcttgcaaatttctctgaaaacatttgtagatttatcatttagtgtcttgggttgtgccacaaacgtaaattttttaagaaaaaaatggaaaaaaattactggaacaaaggtcaaataactgtttccatttcggttgttttagacactatgggaagcatatttaatactttgattgcttatcaagaaaaacagactagaacagggaatattccaaaagaagtagcagaattgaaggaatctgctagaggcagatttaatttacattcttgttgtttacatatgggatttcttttttaatctttttgcttctactcaatataaatgagtctgtgattactgtttaataatttaccaagaatttcagtagatggagtattttctgcccaggaatctatatatgattgttcttgctaaactacagaacagctgcatgttttaaaatcaattgacctctttagtaaacacagagtgagttctttttactttgtccctttagctttgtggcttattttcaaagccatacactgctcccaacctaatagtgactaggacactgttacttggtgacaggctttgatacataggtaattagcttctgggacaagagaagtgggctgctcatgtctactaactcctctacaccagaaggctcagatagctttaaaagtttttataaggtgaaatagtttcttctagtaaatcatgaaaaaataccttttttttcccctctatcttgtgggatgcctgcatatttctgtttgagattcttctaccttcaatccctgacatttattttctagtttatttcaggattcatttgtctttatcttacttgctcatttaaaaaaaaaaatcttcaatgctctcatgcttgtcatttttatttaaacattgttttatggtaatttatattcttttcatttttctttttttattttcagaagatcaagggttcgaatatttgttttctaattataattattacccctcacttactagctttgcaatcatagaaaaatcagccaatgtctctgaatctctgttttctaattgataaaacgagcataaaggtagagttatatgcacagcaacttttatttcaaatatttcataattctttgttaattgtttcattcaaacccttcttgaaaaaaatttctctcaatccataggtaatttcagaattatacattcttattctctattatccacatgaattatcatttcctcctattgtcatcaaagagatatttgagtgaaagatcacagtatccaaagctaaaagatacggcttcctggatgggctcctgtctttcccttcattaagtcacactttctctgtgccttattttcctcaaccctcatagttatatcagagttattgtggagttcacttaagagaatacatatggaatcctgcggcacatcaaaaagcttatccaccaagatcgagttggcttcatccctgggatgcaaggctggttcaacatacacacatcaataaacacagtccatcgcataaacagaaccgaagacaaaaaacacatgattatctcaatagaagcagaaaaggcctttgacaaagttcaacagcccttcatgctaaaaactctcaataaactaagtattgatggaacatatctcaaaataataagagttatttatgacaagcccacagccagtattatactgaatgggcaaaaactggaagcattccctttgaaaactggcacaagacagggatgccctctctcaccactcctattcaacatagtgttggaagttctggccagggcaatcaggcaggagaaagagataaagggtattcacttaggaaaagaggaagtcaaattgtccttgtttgcagatgacatgattgtatatctagaaaaccccattgtctcagcccaaaatctccttcggctgataggcaacttcagcaaagtctcaggatacaaaatcaatgtgcaaaaataacaagcattcctatacaccaacaacagacaaacagagagccaaataatgagtgacctctcattcacaatggctacaaagggaataaaattcttaggaatccaacttgcaagggatatgaaggacctcttcaaggagaactacaaaccactgctcaatgaaataaaaaaggatacaaacaaatggaagaacattccatgctcatggataggaagaatcaatatcgtgaaaatggccatactgcccaaggtaatttatacattcaatgccatccccatcaagctaccaaggactttcttcacagaattggagaaaactactttaaagttcatatggaaccaaaaaagagaccacattgccaagacaatcctaagccaaaagaacaaagctggaggcatcacgctacctgacttcaaactatactacaaggctacagtaaccaaaacagcgtggtacttgtaccaaaacagagatatagatcaatggaacagaacagagggctcagaagtaataccacacatctacaaccatctgatctttaacaaacctgacaaaaacaagaaatggggaaaggattccctatttaatgaatggtgctgggaaaactggctagccatacgtagaaagctgaaactggatcccttccttacaccttatacaaaaactatttcaacatggattaaagacttacatgttagacctaaaaccataaaaaccctagaggaaaacctaggcaataccattcaggacataggcatgggcaaggacttcatgactgaaacaccaaaagcaatggcaacaaaagccaaaatagacaaatgggatcgaattaaactaaagagcttctgcacagcaaaagaaactaccatcagagtgaacaggcaacctacagaatgggagaaaacttttgcaatctacctatctgtcaaagggctaatatccagaatctacaaataacttaaacagatttacaagaaaaaaatcaaacaaccccatcaaaaagtgggcaaaggatatgaacagacacttctcaaaagaagacatttatgcagccaacagacacatgaaaaaatgctcatcatcactggtcatcagagaaatgcacatcaaaaccacactgagataccatctcacaccagttagaatggcaatcattaaaaagtcaagaaacaacaggtgctggagaggttgtggagaaacaggaatgcttttacactgttggtgggaatgtaaactagttcaaccactgcggaagacagtgtggcgattcctcaaggatctggaactagaaataccatttgacccagccatcccattactgcgtgtatacccaaaggattgtaaatcatgctgctataaagacacatgcacacgtatgtttattgcaacactattcacaatagcaaagacttggaaccaacccaaatgtccatcaatgatagactggattaagaaaatgtggcacatatactacatggaatactatgcagccataaaaaaggatgagctcatgtcctttgtagggacatggatgaagctggaaaccatcattctgagcaaactgtcacaaggacagaaaaccaaacactccatgttctcattcatagctgggcattgaacaatgagaacacttggacacagcagggaacatcacacaccagggcctgttgtggggtgcggggatggggtagggatagcattaggagaaatacctaatgtaaatgacgagttaatgggtgcagcaaaccaacatggcacatgtatacatatgtaacaaacctgcacattgtgcacatgtaccctagaacttaaagtataataaaaataaacaagagagagaatgcatatggaactgcctaagagaaatcagatgatctcatggtctctattatgagtggaagtaaagaagccaatttgtttgagataagatagtatgatggttctcgaattggtatcagatactcattcaatagtggttaacaatgttagaaaaattcttagaaaatagactattaaaaatggaagcactgaatgtggagttagacgacctggtcgacatcagattatattgattagcattggcatattacttaacttctctaagcctccattttctcaaccttaaggttaggataattgtacttctacctaactctcatggttggttcaagaataaaattagatgataagtaaaaaagatttgattaaaccaactcagtgaactttgtaagcattattatcgatttaacaaatcatatgaagtcttgtctttgtcttttttaaaataaaaccaatgattttttctcatcgtgataaaatacagagtaatgatttggatggtataattaggaaaatcttattcaaatcttgctctataatacaatagcaccttcacaaatacatcattctgatatattctggccatagtaaagtgccctagggtattcaaaataccctaatgttgcaaaaaaaattgtaaacagtaacttaaaaatttgagtgattccttcagactagcactagtaatttattttcttggaaggtttatatattatttttaaaaacctaacagaatagacatttttaaaaatcatttaactcaagtaaatgtgcatacagaaatactgtggaatatgtcaaggtgcaaatcttggttttagctaggtctccacactttctaaatgactcactcttacatgcttacatgccagtatagtagtacctgttcaaattttcacctcaacaaaagtacagattactagatgtcatagacccttgaagtctctacaaaacggttgaaaccacaagtgctaaattccctcataccaaggatctagagtgttcctgtagcattgcactgatttactcatttaataaaacagggcagtgatccaagtcatgtggccgagatcctgacatgcatatgttactcctagacatttgctgctgtataaatgtgctggatgcgtaagataataccaaaatggtctattacataaacctaggtatatgagaagtagcatggtatagtgacatatttaaggtgtacactgaaatcaaactccacatcttgccactagctacgtgacttggaaatgtgttatttaaactctctggactttagcgttcttttttgtacaataatgaatatactcttctcacaggaaaattgtgaattatgtatgacaatatacataaaacatgtatataatccttggtctatagcaaatgcccagtaatcagtagcttttatcgttccaaagtttagtagaatacgaagacaattaattttactggtgaaagtcataggactctactggtttggaatgtttaaaaacatctttaagctacaatactttaagaccattttgttgatttaactcaaaagcatgtccattttccaggtcatggttttgcctgtacacttagagccttgtgtaattaaaataactgcttaactattcaggccttgagaaatcagaacttctagtgatttgctaattatttatggcaaatacttttaagactgtaatacttaccagagtgccttgccaataaacattagatggcagattaatgtatattttaatgagagcgataaagtacctcaatcaaaatcaagttaattaggtctattaccataaagttagtaaaatagatggcatatatttagctcttgctgtgtgctaaccaccttacatgaattatctcatttaatcctctcaacaaccatatgacatagaccctgctacaactcccattctacaaatgtagaaatcaagatagagaaaataaataactttgctaatgttacatcgctactaaatactggaaagttagatgtaaatgaaaatggtcaatctctgaagctaaatattttaattactataacttcttagaatgtgttttatggaaaaatcagatatgcatacatggcattttaacaaaaacagagtccttttttttttctcagtggagttttgctcttgttgcccaggctggggtgcaatggtgtgatctcggctcacagcaacttttgcctcccaggttcaagccattctcttgcctcagcctccctagtagctgggattacaggcatgcaccaccacgcccggctgattttgcatttctggtagagatggggtttcaccatattggtcaggctggtcgtgaactcccgacctcaggtgatccacccgcctcggcctcccaaagtgttgggattacaggcatgagccactgcacccagcccagagtcctcctttaatgaattctgagctttggagataacttttaaatgtctttagggcccaaatagtatatgtaccacatacatcagaatcatgagaaaaatcaaaatacagcttgaattttgtatctttatttcatacgtagattttacaagaagatacctaatgcagtgatgttaatttgtgtctcagtgttggactcacaaattatcattaaatcattttcactgatgctgtaatcattggcttctatttcttgaacattcactgacccatattgtttattaacaggtattgaaggcaagcaggcaaggtctgttcactttctgttcttgaaggagcctatttaggtaatttagaggacaaattcttatctggcacatttctggcttttggacaaaatacaaattctcaatcaaattaaaatatgagtagttgaagagaaatttgagccctcccattactcctcccaaatatgtagaggtatcataaaagtagaaaacttagaagccaaataatgtgttatcccatggaaatgtctactggattgaactacaaggatgaataataaactaagaggagtttagacttgtatggttttgctgtcttatgactcattggtcactagaaaggtctactcaatccaggcagtgtgagatcaggaggatagtagacgaaggatgggaagggtagttttcctcagagagtcggtgtaaaggactggtgtgtactacagatgtaagtgaagtgtgaacagagaccaggaggactccccaatcatttataacaatatttagttttctctcctgctttcttccttactttattttaataattagataatatatttctaaaatgaggattttcaggaataggcttaactttttgtgtataagtttcatgcccagtatatggggttctcaccaaacatagcttttaaataagaaccaaatacccaatctcaccaccttcttctccgtattgtctatgggtgatgatatgtgagggaaaaaaaaagtaggtcttccaaagtgtcctttttattaaaacatgggaaaaataagaacaaaaggaagaaataaaatatggtgcctctaaatctagaataaataaaacatttttgacattacaaaaaggaattcttatatacctaaatttgagttgatttttattctgtttcaaataaaacattattattcatttaaaacaaaaatgaggtactttttcagaagttttcaaacattagtgatgaacttcttagctaatatatctttaggaagtttcctttttggaatcaatgatataattgaagtgaaaatgccactactatttcactttactattgttaaaaaaggactttatgtaaccatgcagttacttaattcaaattgtatgggaataaaatttgttatagagactggctaaattaaattgtaaattattcaaaaatacttaaatcagaccagctgtttgttatgaggttccttggtttttcttattttaattatcactactcctagaaaattttaaagaaacttttgatgactataggctaaagtgccttctttttggaatttttgagtacttaactcagacttctgaactacgtaagagctacctctaagaagaggtgtttagattctactatacacttggtaaagtatgaagagtagaagacatatggggaaatgagcctatgtattttaatttaactctttggtagaatttacaaagccgattgtataacatttaaattaccagaatttctgctagtctgaaactaacaaatgctgtgtcactttggcacaaaatgttctccacatctgtgtgttttcatcttttatttttatctttggccaactaaagattgtttgagtttaattttcttattacataacaagaagaatggcagtgttaaaatagcagtcctagcagattaacattcaacccctcacttgatttatggagaaaccaggctgaaatctcaggcactcccaaacactggaatttagcaagtaatacaagcaaagcaaaagcacaattgcaatctgagtatattaaagaaaggaagaaaggcagcattcattcattctgttttcaagggtgagtcattcaccccgtgccactgctgaagtgaaacatttttattgatttgcagattaagaatctatttaaaaagtgataaatcaatccttttcgtcaagcctattgcagcctgttcaggaacttgaaagcaatcactgctgtttgaggaaagcttacttaacttgtgtttcttataatgatagaggaaactatagttcataatgaaggcactgtatattgcacatcttgatgaaaagtcagaagattgagctggcataaatcaatgcatgaatctagaagcctgcaggtgggatgaagagcagagagtttatccactttgattatcattgcatttgaacgtcaacaaggagctcacctccactgtgaacttcagtacacatattactgctgtccataatattatattatgataaaagtagattagattaaaagtagacaactgtctggatgttgtctgtgttgtattaaaaaacataggctataattagaaattgagatacttttatcaaatcctgaaatttgagtctgtgtttataaagggaaaaagtgattatactttaaattctttgaaatcgtttgcagaaaaaattaaaatctagtgttttctaggatagatctaaagtatttggatgctagtagtattacattttgtaatactttggtttctttgcacaaactggagcttggaggtgagaagaagaaacaaaaataccattacttcaaactatgatcatttcttggaattttagaatctcattttatagtcttctttatttgactttaaaaaatatcagtcaattcagatattacaaagaagttcactactttcctgactcttaactagcacattggaaagtggtttcatatttatgtattttaattgtggcaaacttgtttttaacaagtattgagggaaaatactttttggtgttttttttttttttggttttttgtttgtttttgtttgtttgtttgttttgttttttgtttctttttttgatggagttttcactcttgttgcccaggctggagtgcaatggcacgatctcggcttactgcaacctccgcatccctggttcaaatgattcttctgcctcagcttcccaagtagctgggattacaggcatgcaccaccacatcaggctaattttgtatttttagtagagacacggtttctccatgttgatcaggctggtcttgaactccagacctcaagtgatccgcctgtcttggccttccaaagtgctgggattacaggcgtgagccaccgcacccggctggaaaaatacctattttaatgtttgtttttcttcctgatagattgttattatgaaaatgcacataatctatcaggatgaaaaaaattattaatatcatgaattttgatcaggtccattttatatctgtggtgatccatggctttgtgcttcaggtaaataagtttttactttattgcatagaaaaattattaaaggatttaggaacatggaataacaatcaaaactgaaatttttttcaaaatataacatcagcatcaatgtggagtataagctctagagagtcaggactgggagtaggaagaccagatagaagactaattagtgcaggccatagacgcaatagcaatgacttatgaggcacaagcagatgtgacgtttaggaggtggggtagacagaacttcatccctaattgtggaaaggagttaaaagaaagcctagggcacttgcattcacccacatagaaaattgagaaggaaaagcaaagttttaaggaagaataataagtttgttttagaaatattgagtttgacatgcttgtgaaacttccaagggaaaagagatatttagcaggtggttgaatgaatgggattttagcttaagctagtggactagaagctgttagtaaatagtaataggttgaagcataagcatgagtaatgccattcttggaaagcctgtagtgtgagcagaggacaaaacctgaaacataaccaatttttaaggagtaagtgaatgagaaatcttatgtactttcagagaaatgaaccagtagaaagtaaaacattgaaaatattgtgatagaaaataaacattgaaacaagcttctagatcagtatatgcgaataaaaaagaccagagaacacttgagacactttccttgaaggagagaagggccatgttttgtcaacattgtagagaaagaaatgagggcagattcctatataagtgactttgtaactttagagacagagagtttgttcctgatgatctcaatattctcagtgaagagacaagagtttttgccaaatcacagatcattcactgaagactcataaaagaattaccacgtagtcccaggggaaattatttaccatacgatgacaataatttgggaaatgcatctgattgtgttattttaatatttcatgtatcgttattttatgtggataccagtaatgctgggcatcattccatgcatccaattttgctcacttaatttcatgctacaattcttggaagaaaagtggcatagttgattgggctattttgctcttaacctactcttcccctacaaaagcccattggaagattcatgatagggtaaaaactggtcttgtgtgtacatgccacaaagagttatttggttaatcatgtccaacattttttatttgggtcaagcaatgtcttgtttgacttatctatagattaccctaataaaagtcttgtttttaatttgaggataagtttctttcagaagctctatgtgtactataaatgatttttctaatagcagagttttaaagtattctaacctgaaaaatgtgtctgcaattcaatcagttcatatttaggaaactgtttgcttgtcagatattgtatttctctgtggtagaaacagtgagtataagagagacggtaggggagagagagaggaggagagggagacataggggtggagaatcatgctttatttgtgtagcaatctcatggactgaatatctcatagaataacgtactttatagtggtataagatgaaagatgaagggtgttttcaagcaagcacatcctaattgactgtcaatatgtagagttttctttaggattctatggacaggcatgtgcactaaacataaagctttatgatataaattgcatactggtatactttattttgtttatgtggacatctaaaagattcacatgggcacagatatatgtcaattaattaaaaatgtattgagaaaattcgcaagaaaagctttccgtagctgaggttctttgtgtaactttttagcatctcacatgtagcaaaaaaaaaaaaaaaaaaaaaaaagttgtctgctactataatacagaaaattatatgaagcaacaagaaaaacataaggatttaaccccagattcaacttgtttctagtcacagagatttttttttcttcctttgttttttagacggttatgtactggcaaggaatattctacagtagcaaatgtgtttatgattattatgagatgaaagttaatatataaagcatgatccataagtcaataaatcagtatatttagggaatcaaaaattcagtggcccccaaaaaagtgaatttcatcagactaggttttcactcagccctatttcaaaactatatttggaattaatgtgtggtatatagaaaaacatagactttggaattggatgggcaggctcttaaaattccttttctacaatttttaaaaacctaattatcctagataagtgtttaacttactggcatatagtaatatctactttgtagcaatattgtcaataataagttgtatatacatacacacatacagaaaatcacagtgatatggtagcattcaataagttgtaactccccttttaatttagctgtatatcaaatacgagaaaatacttcagataaggatataaaaagttttgggagttatatattacaacacaataagcttggtgaaattcagcttctttatcttttgctgctgaaaaagagctacaaagaagaagaaaggggaaatatgttcactgtaaaataatgtggtaaaagatcaatgaaaattctaaatgacaactttagttggccttagttaaaatgttgatgtaaaaataaataaaatctaggtgagttgtattataaatatttggtgatgagattgtataagaagctggaatgagcagaaaggcaagatcaggatgctgagattgacaaagtaaattactgtaataaatgtgatggatatctggagaaacaaagaagacaatgacgaggaaaaaaaggtcctttgtgcctatggtatttcatcagcttatttcaaacatatataaaaataaataaaacagagtaaatagctctagagatattttagattcgttttgttaaattagagaatgaaaataaaaaccattcatttcgacactggctcagagtttatggacaaattgttcacacgttgtatttcaatcccattgcatttatattctttcactttaattgaacaggcatttattaccttcctaccataagcaaaacactatactaggcactggagacatgagggaaaaacaggaagccttttacatttatcacatgttaagctgctactctatattcatttgataacattttgtcaagccaggccatgtgccatgaaatcataaactaccaaaaactgcaacaacaacaaaaaatcacctgcattctttgatgggacatttactactaatttatgtccatttaaattccacccatgtgtttgacaccacagaactgaattttttatatactacctcattacatgagtgatgtaagaacagaacttgtttcttcaactcattcagtattctaatgaactcagaatacaaattttgttccgttaaaaataatggaatcttactatcctacagccatttaaatgcttcagaatagagcagtcctctttttattccaggaggcgtatacaataaatctcattatgaaaattaccatattcagactatcttaataatgcacatgccaatatctccaccaccttcaaacaaacaaataatggtgaaaattatgctagtactgacaataggcaggaaatgttgagaaataaacaattttcctcttatttgttagagtaaaacagcttctttgctcatttaactagctaaatgacagctagattttgaacattaaaatatactgagcacatggaaagaatccacagacaaaggaatcttgtttccacatgtgcatgcttgtgtgcctgaatatgtaaagaaatcaacacgtgaaactaaattggaataaattttgtatgaggattaaagagatatagaaatcttcctaaagtgccataagcaccattccaattgattagctgaagaaccattgttattctttgcctgtggactgaggcattggtttgaataaatttttatcagaagccctttcggagatataatgtaaacaccttctctgcctgaccttccaacagcaaaacactcttcctaattactatacctaataggcatccacccctcctccccttaagagagatggactgcattgtgcattgagcagctagatttggattccactctaacactggtataagaagaagtaaacagaggctagatttcatcattagatgattcctaccaggatctctcaaccttttgctgggtgaactctgaggtcaagtttcttgttctgtatctgacacttatttacgctaattctttatttccaggtgaactcaagacaatagataattatctgtttttcaggtacaattgtaccacaaactaataaagttttcttctgaacttactctcctctaactcttaactggtccaacagagagatcatctatacatatttcaacacatttatattaaataatcttgttgctctcctctcaaatacagttaagtcctcatttaacatcatcagtaacttaccggaaactgcaacttatgacacacagcaaaaccaggtttatcataggctaattgagatagagttaggttcctacgctatatttttggtcacaaaaacatcaccgaacttcaaaataaagaccccaaatgcatcaaatattaaacattgaaataaatgtgagctatatatacacttaagaaagattaataaaaatgagataattatttacctaattttgtgtcaatccatgagtaatggtagccatagtggtggtggattaaatcaaggaatacatgtttgcaaagcaaaacttgtgaggatgtcctgcgactaacacgtagttcaaaaataaacaatcacaagtatggcaggcttgctgagtgcttttgtgctgcattgtttattgttatgcatttgtatgattgtcagatactttatgaattatttgacaataatttgtgttcattcattcattcatttattttctaacatgcctattccagtttaggtagaggttggccagagcctatcttggcagctcagggcacaacacaggaacccacctgggacaaaatgacatcccatcacagggtgtactcacacccacattcactcactgtgactatttagacacaccaattcacctaacatgcacatctttgggatgtaggcggaaaccagagtatccagagaaaacccacgcagacatggggaaagctgaaaactccacacagacagtagccccatgccagaaatacatttttttctcttctacattaaaagaagatgatgttgaacaaaatgatgttattcaaagacatgctgtacaatgtagaagtcagtctctgtgttgactaaacaacttttaaaatcccctgtaatatagaattttcttaatcttatgcgttgaatttacatggttttggaattagactcaagttgcaatcccagatgcttcaatattctacctctattatttaatctttctgaacttcagttcctgcaatttttaaacgggtggagtaaagctgatacttcacatctcagttagctatttttaggatcaaatgaaatattttgatttgctgaaatcaagcttaatgtttatgatctgtgaggcactaactaaatgtgagggattttaaaatttttaatttgaaaacacattgaagatactacatttacacttcctttgttgagaataaacaggactagcaaattaaaactgcagtgtatattgctacatttagcataatttataatggatcttaaaacctattattgacactggtataaaaagttaatgtgcaagattaggaatattgtttactgattataatttaatgaattgctttaaacattctatttttatctacctaggatacagtcaatgaaaacaattgcttgcaaagtacaggtcaattggtttcagtgatttttcaaacagaggagagtgattctgtattctatttaaaacaatggtagagctacaagccttaaatttctataatgataacattgtagattaaggaacgatttggttgtcagagaggagtttttaatctcatttttatagctaattatggggtaggtttagaaaatcacatgcaagaaagcatccttctaaattctccttaagcaaaatgataataacctttacttattttctctgcaacaggggttttggggagaatcctgttaatgtaattcaggattattagaccttcaaaacttagaaaataaaaagacattggagcagtagccttgtgtctgaagttttagggggatgattttgttttatttgtttgacatttatcagtgttttcttttgtttagttgttaatatgctggtagctgtacataatattcagacctctcctgagagtcaatacatcttttattatatgacaacataatataatgattttgtgtttgacatgggtgcctgctcaacaacttcctggttttgtaacctcttatgtaatcttgctgaacttttagtttttctttggaactaagaatgaaaacagctaattcattgtgttgttctgagataatttcatgaaagcaactaaacaaacaataaattctagtaattgctggcgtttgccttttcctattttgccctgtacaaacttggactcagagaagggtttgaattgcagtactcatattaatttgctaaggttgctgaattatgcactctcctaagagcactcactttcatatttaagatgggcctcccaccgagaatgttatttatttatttatttatttatttatttatttatttatttatctgagacacagctttgctcttgttgcccaggctggagtgcaatggcgcgatcttggctcaccacaacctctgcctcctgggttcaagagattctactgcctcagcctcccgagtagctggaattacaggcatttgccaccatgcccggctaatttttgtatttttagtagagacggcatttctccgtgttggtcaggcttgtctcgaacttccaacctcaggtgatcggcctgcttccgcctcccaaagtgctgggattacaggcgcgagccaccacacctggcccagaatgtgagattatctgtgaaaatgctttacatatagtaggcattcaataacggctcattaaatacatttcaaattaaagtatttctttctgccttttcagctaaagacatgattgtcacatcaggtttgttgatttcttttaaagaaatacaacagaggatcagttaccttcagcacctttcacttgtagatagtacaggccagtgaagagagaatgggtaaggagcaagagagaagaaaccccaagcagggccacatgctactagtctgcagattggtgacaaggcaggtgtggaaatgagataaaagtctcagcactgcaaggtgtgtgtcttccatcatgctgccttgaaacctgcccccactatggcacatgctaatatgcttcttcattaaatccccaaatgctttctctgtcctcctactttcctctccaagccacacttcacaaacatcagcagatccaaaacagtaacgacctatgtgaccttgctgccttagtatacacagtctggaaaaaaatgagatctgcagggactcctctgtgaaagtttcttttcagaataatattttattttcccattcaatttgtagaattctggggtagttgagaaagttttcagataagcttccaaaccctacaacatgattttaaacttaatcctatgtaagggaaaaaaaaatcttcacaccattataaggaggaaatccatgatccacctcaagcagacagagtcctatttaaattactccatattaaaactgagctgacttaagaatagagccactattccaagattggagtaaaaagaataagtttggaaattctaattttaacaaatacgatagtgaaattcttactacctaagatgctgtggcagtatggatgagagactacattagcagaataacgttgtaccattcttttcaaatattctctgcaaaaattttacaggatagcatagacaagatggagagccacagattatactgtgtatggtgggttagtattcttttagagtctctctttgatgtgctaggagagttttctttaaatctgtagcctcaaagaaatgcatcctggctgtatgagaccaataaagtggaaatatttgcgctgaggacaccaaaattataaacattagaatatgtattttaatgcaggcacatgaacgtatgagataaggtaaagtagacaattctagcagctgaaatagttttggcatcattgctagcacataatgttggcttgtgacattctcctgaaagattacattctttgttttttttgttgttggtttgtttgcaatgtttccattcatttactgactgttcatctataccttttaggaaactggagtatttgtgctgagtttgagataggggagagcaaagaaaaattaaaaaaaaaaacaaaaacatacagttcaggcaggaacagggcaccaaatcattctagggctacatcttagacaacatgaacttcatgataaaataatatcttttttgaaggaggaaagattttcaaataaattcttggttttttatttttatttgtacattgcagaaaggctgagaagaaaaataaatgcctaaaacaaatcagctaaatgatttgttttaatatatcactcatataattgctattaatgagatttaaatattacctgatatttctggaaaatgtgctagtatataaatctcaccacaatagtttgaagactctgctttaaataacatgtaatgatattttgggtctctaatgcttattaaccagcatgcttcacagtgtttgaaaattttgtagtttaaataaattcatgtgataaaaattcaacattaaaatatttcatctgtagaatacattatgttttaaattgtatcaaaatatccattttaataactctttccaaaaataagtgcctaattatatatgtattttaatcaggtgccggtaaatagaagataaagctactttcaatccattttgggattctttccattgataaggctaagatagtaaatagcaaccctagatagcaaataccagtctttaataggttggctctattccagatgagagcagatgaagaatcacaaaaagtgaatctcagtacaaagttcatcttatgcttctctttccaatgatttattctcaagaaatgatgcttcaataagtaacatgatattaaatgatgctgagacgattagtattttggccatccaaagaccattatagtatatgtttaacatgttgtagcaatattcttgcaattctcatatctgtaatctggactgcctgtaagtatacaaacacgtgttccgtttaaaatgtgtttctaggatttgtgtcatgaaatcatgaatgatctgaaaatgaatatgagttctgtgtcattagttggtgatattacttgatcacaatctgaggattaggtaggtatttgcccaaaatcacgcattaaaaagagcctaacacaaattagatcacacatggtaagagtgaaatttacttcaaaatgccacagttatacattctctttttcatcaatttgttcacaggctataagctcaaatattaagctgagtaactagctaaagtaaacctagagagttcataaacccagttagatgacatttgaatagaattttgcaggatagcttgtctgctattacacagcgtggggagggttatcccaagcataaggggagaacataggcaaagtcgctgtggaggcaaacagaatgtgctcccaggttttaatctggtggttcagtagaactagaacagacacgaagtgcaatgaggttttgggaagatgatactggtcaattaacaaatgatagatcataaatttttctgtgtgttaagctaaggattttgaattttaatctgaaagttatgcagagttactgaaggattttcagcaaggtttaacttgaccggatttgtaattcagaatgatcactttggcaccagtatagagaattgtctaggagagaccactggggtagtcaagaaataatgggattctacctaaagcaacagtagttagaatggaaaaaaggcaaagacatgagattagtgatataacagcacagccactgattggatgttagggatgagagatagctaaagaagactttcaggtttctatcttagcaatcgtacccttaagcttatgagtaaagatggtgcaggaaaagacataggaatggaggtaagctaaaatttaggcttggatgaggctgtggaattttaaaacagaataaaggaaggtttcttcactttctaagcttgaaagaaagcattgctggtacgtgcctagcctccaagagagaaactgaaccaaatttatatagtgtgagctactcaagtggaaatgtttgatcttacaagtgataaatgaagccgtttttctctccatccaaacaattttcagctaactgccatgtgtttgcaatcatagctggtttcccgagtttagcttccataaagcttttggttaacttttaaaaattagattacaaagcttacttgaaatgtctcaggcacatcaattctatattgacaggctggttaattcacatgtaattgctgaacaaatgttaacaatttgaatcttacttcaccagcactttttgtttctttgagaatgtctttagaatttgtcaaataagatttgtctcttcctagacttcagtttcttaagcattaatctctgcttttgagatattcaaatgtacatgccaaacaccattactcttgctttagctgagaaaatcttgctaacgatttggattataatagtaaaatggaatacttctttaaaatttactctcaatgctaacaaagttagaaatttggctccccaaaaatgagagtgtttctatttatatgaagaaaattcatgaccaagaatgcattcaatagcattccattttctttcataaataatggctgcatgaccctaaaaatgtgtgccttcattttctcaagtatattcagaggatattattgatgattttaaagaaaagatggattttttttttttttttttttttttttgagacggagtctcactctgtcgcccagacgggagtgcagtggtgtgatctcggttcactgcaacctctgcctcctgggttcaagagattctcctgcctaagcctcccaagtagctgggactacaggtgtgaccacaccccacccagctagttttttatttttagtagagacgggatttcactatgttagccaggctggtcccaaactcctgacctcaggtgatccacccacctaggcctcccaaagtgctgagattacaggtgtgagccactgcgcccagccgagaaaacatgtcattttaaagtgcaaatatgtacatgtggttaaatcttcactggaaaatcagcccttaaatattcaagagtttctgccagatagcttaataatgtcaaacatgtttttactcatagaatttccacttggccaaaggcaactgccaaggttttggtagggttcttatcttcatatttcctgggctctgttctactgatgttctcttattgtactctgtactggtgttatgactggtatttagtgtcttatgattgctgtaagaaaataccacaaactggatggcttaaaacaacagaaatttattatttcacattctgaaggctaaaagatcaaaatcaaggtttcagcagggctgtgttccctatgaaagagctaggaaaaaaattcttcctgcctctcttggtggcctcaggagtttcttgtcttgcagctgcctcactttaatctctgattggcacatggcctcttctaattgtcacatgacaaccacatggccttttccccatgtcttttttgtgtctctacatctatctttctctctctcatttatcttataaaaacactaatcactggatttagagcacatcctaattcaatatgacctcattttaagtttattacatctccaatgactccatttccaaatgacactgtgttctgaggttctaggtggacatattcttttaaaggtgattggtgagacagaagagagaggcgctattgaatccaatatatggcatggcatttatcaatctgatttgaggtagagttaagcaagggtgtgctttttcttccacactaaactgaatctctgcagcatagataggttaccttaataacatctgtattccaattaagaccttatacagtgcctcacactaaatagagcccaaataaatgtttatttgattgaattttactgtcttctgtttaaacatggcacacttaacacatcttattgctgctttctctggaaaacctaccaagattactgttaaagaacaaaaaaagtaaatatctacaatgacagaatagaaaatgaaactgcagctaggtaagagttacgaagacaattttggaaaatggaatgtctgaaatatgtgtactgtattagtgagacaaaagaagctgaaatgtgcagaaagaggaggtaaagatgagaagcaagttgattttccaccaatttccagaaaggctcaggaattgaagggactagggactctaacaggtgggcgtgaagtattgaccgaaaactaagggaactagtggacaaatctgtttaaagcacagttcggcaactagattacagactcccatcctgtgcagccaagtgactaacccaccaccgattccaaagcaataaaaattctcccctatcctttcatggagagattattgagaagggccttggatgcaaggacaccaagaacgttggagggtggagattaaacagaaacctgtgaatgaacaataagactgtcagctctttttcctttccattaggccagcagccaggcttattctccaaggtaagaaaatatacatataaaatctagagattatatagtattatatatattatatatttctagggaaatatataatctagagaaactgaatcctctagagaaaataagatactaatatttggagctttccaacagaaattagtttgctactttattatcataaaatgaatcctgcccaccaataagacctgcccatgtacacagagcatctaaaatgctccaagttccacatccttaaatccaaatgagttgtcaaaaatcaacagatacttaaggaaagtctaaaataggaaaagcagagaataaaagttgcaaatgcacaaagattaaaaaagaactctaaggaaacatccaaatgggaatgtcttcacctcctttaagtctttgctcaaatgtcatgttctttgaaagattatcatgatcactttactcaaaattacaaacttatttttcacctatgactccccattcatctcatcctagtcttcttttctttttcccataacaatcatcctctattatactatatgtcaccaattatgatctaatttataaaatctattgttgagggaacttctttttagattctaagctcaatcatgggcctagaacagtgcctggaaaatgggagatattaataaccattttggaatgaattaattgcttcaattttagaacatgaaggtaaaaattagtagcaatagctaaaagagttggaaagggttccctccttgagcccagttggagagtagaaagaagtaggaacaaatgttactgctagaagccccgtaatgcaatctgtctttttaactgtttataagtattccttaaagggaaattaaatcattacatcagaaaaatattgaattttatgtttaggagataatctacaaacaagggcaatgtggttgccagtgtttgtttgtttgccttattgtaaacagcattctcactttttatctgagaccatgaaagtgattactgtatcttggttcactttaggattccctcaagtaccatgtgctgaggaaatgtggatgtgcacttccaaatttccacttttgtgttttcattaaaatctcaataccaatccacatgttgactgttcccatttttcttgaatctaattgtagatgataggcttattcaaaacatttagtaaaatccacataaccacatcacagcaggctttcatcattttgtaagatagctttttacaatagtgaataacgtattgagttactgaaaagttattgttattacggcataactttgtcccaagaattatttgttgtaaaagtgagaaacatagaaaatacacatgtaacatgcatgtaatctacttgaataattgtattttactactgtcaactgtagtcaaatttgtcatattccccatatgtgatttttaaaatttcatgtcttttatgaaaccaattgtgtattttgggatatttgagaatgacaaaccaaaccaatttattaacatcattatcattagtagtatttattgatgtataaaaataggataatggggaactggactgaaggcaaagaaagtctgtttgcattgcgaatatgttgtagtttggcttcattcagtttatttccaaattatctccctcattgatttggggggtaatttttgtgctaatgcctttgcaaattagatttaaaaaatagaaaagaaaaggtcttctcttatgaagccaatgaatatttactgacaagcagtatagtaggacatgcccttgaatagcatagaatctaaagagaggagcagatgtgtaaactaaaaataccaattcagtgaagcaagttcagcaaaaatgtctgtgcagggtgctagagatttgcagaagagttacatcacactgctatgagaaactacgggtggttttaaaggaaaatggtaatatcagagctaagtaaaggagcatacataggagttaactagttaaaaaaataatgaggaactgctatgaggaattatggatggcttcaaaggaaaaaggtaatatcagagctgagtaaagaagcatacatacgagttaaccaattaaaaaaataatgaaagtcagtgggagaatgtttaaggcaaaggacagaacaccaggaaagacaaaaaaaaaaaaaaaagaaaaaaaaaactacaaaacatgatgtggtcaatattagtggaacaaaaaatgaaaagtgggagagtggggaaggcggaacatggaaatataagcaggaatcaagttacatgggccttatctgcaacctaaaatgcataaactttgtcctgtacatctcatccactttcacacgtggttttgcatatgcagctggagaagggtaaaaataaaataattattatcaaagagagctgcctatcaataacaattgtgtgtatgacatggtagagggatgcaatagaagagacatatttcttctaagctaactttcctaacttgccaaaaggacatagaagataattcctgtcagatagggccagaaggaaatgccataacatattttcgggaaaaaaagcaatttaaaaaaagaagaaattatcagcaattgtgatgaaagctttttatctcaacttgatgacttctgaaaccaattgcattgctcttagtaaccatatagataacccttgacatttataacttatgtatgagcaatatgaaagagccatgatattttataatttatcaatttgctaaagatgtgttttgaattacagccacggcaggctgatcagtaacttgactttaaatagtgaatgaaccaacatagcaaatcaacaaacaaatgcgtatcttaaactcagcttctgctctcattatagtttccttctagatgttgtctggacatttgtgaaatcgacctgttattcacaaaagtatgaatttgggaaattctagggacatatctcttatgaatgcatagagtttttaggacccattacagcaattcctttctttgaaatgaccattatacctataattagtgcaatcaatacaattttatagccagatgaaagttctgtccatagtaatccctatttctcaatgcaataaacaattgagacaaatcagattagtgttccatcaaaagtcggcttcagtaaaagcaatattcaagggataaagtaaaatgatgaactcgagattcaaaaatgacaaattatgtaaatacagaacaacacaggtaaatgtgaattagtagcttgatgcagtaccacaaaatttcccaaggtaacgaaatgtatccccactgttatgcttctcactgtttaaagtaagtactcagtctagttctgtgccaccatctttatgatggtcgttgttagaatagaactgctggtatgttgtctcactatcctaatgctacaggtaaactaccttattattgtttgagatggaacacatttcagttggcacagtctctggctaaaaatagcatgaaatctgttttgacagctcttgattatgttgcctaaattcaatgcatcctcaaaaattatatcttatttagtttgagaaaaaactttaacatagttctaatcatatatgtaaaattagtcatctgaggagattaaagattgtacctagttattatgaataataaaaggttaattaatcacaagaatcttaaattatatgaaagacttctgtgtttattgagtgcctgctttgtgccagatactgaataaggctccattgagacatagatgaacaatattaacatagtgctggtgctttggtgagttcacactctagtgggaaaagtgtattatccaagcactcacaaaacaggtagataattgcacattataattaagtgatataaataacaatatgcgtaaaagattaaagcaagtacccctaattttcaatgagcagagttactgtattagtcattatggattgatataacaaaataccataaattgtatggcttataaacagcagaaatttatttttcacagttctaaaaattgaaagtctgagatcagggcacagcatgatgaggtactggtgacagccttctacctatccaacggctgacttctcattgtatcctcatacagcagaagacagaggtgagagagctctctgatgtcccttttataaggacactaatcccattcattagggctccaccttcatgacttaattacctcccagaagcccaacctcctactaccaacacatttggagttacaatttcaacacatgaatttggggggaacacaaacattcagtccattgctgtcagggaaagcttatgtagcaaaatgacgtttagacagagatcataatgatgaagaggcgctgtctaaaaagagattgcagcatattcaaagcttccaaggaaggaagtgtaaaatttgtgtcactggaatacattgatctggaaggaggagcttaagatacaaaatagtgtatacaaattagttccagagaagcaggggatggactatttagaggccctgtaggtcattttaagtatcttgaattttatcccaagtacaaaggaaatcacttgagaaatttaagtagagcatgacataccctaagtatttttaaaagtcagtctaagtaccatgtagctcatggattggaagaaggcaagagaccaaacatgtctagtgaggagaatatgggacagtggccatagaggtggacagaattaaacagattcataaagtagtaaatttaaaaattgtgtgtcagtaacaaacttttttacaatttgaacagcatacgagataatagttaactatgtacatactgtggaggaatatttaggcctatagctgtcacgtagagtaaaaaatgtataaattagatcttagttttcaagttagattaatcagtaagaagtttttgttgctcaagaacataaagactttggtttccctcatcccacatatgtgtcttttccctcatcccacatgcgtgtcttttccctcatcccacatatgtgtctattctatccatttataaacataaaatggagaaaataataagatcacaccaatggaaattcacctttaatcaaaaatactttgggcacaagtcactgatgttatcattttataatcattaagatgtgtatggatgaccttgcacatatgacctttcaaaaaaggaaggggcccttttgagagttataaataatctgcagtccatagcaatatttaaatcccaaataagaaaaatttaaagacaaataactgtaagaacttcatactagaaatcagagtttctcactagccagcaccattgaaattgtgcactggaaaaatctttgttatgcaggctgacctgggcattataaggtatttagcagcatcctcaggctctacccaccagatgccagtagcagcccttgaaaatcattaaatatgttaccagacattgccaaatgtcctctggggggcaaaatcaccctttggttgataaccactgctgtaaatctacctttctgcatatttgctttttcactaattaactaatattgaaataataaaatatcatgttcattaccaaaattaatactctatgtagtgatcaatcaatttgctattctattggatttaccgttcacctccctatatttgctggagacacaattagtttttcttaccatccataatcttcatctgccaatagtcaggatctacattataattatagtagaacctgaaatgattaggataataatgaagttggcaaagaagccatgcagcttaaagtatattaattagcaaacacatttaagtcttttatattaagaaaaatagactccttttatttcatgctcattgtgatggaaacatttttaagctggtattgctgacaggattaataactgccttgtggtataatcatattttataactttttcttatatacaaatttataatgaacttctattgaacagctaatggtttgacttctaattattcaatatgtaaataattcaggacaattcagagaagaggaggaattaaatataaacagcccattgctaagggaattttcttctgcatgctcttgtcttcccttcaataatccttatcttttccctcctgcttcagcttctttattgctcctctactgatttggttatcataatctttgcagcattgcaaaacacttcaagttccctctgcaaccttccaaaaaaagtcaatgaaaatggttattagacattttataattaaatgttcttttaacttttctgtcccgtttaagccagtatcttaccctattacaactttttaagtgtattccatctgccatgaaagttaaaattcacaggagaaattaaatctagtttaaaaagaaaaggttatgaatcaaagatttgtctcagagaatcagaaataagcattccagggaatcagcatatattcaaatcttttcatgtacaaaggatgtttaaaattttgtgtgatgccatggagaaccaaaaaaaataaaagataaaactctgcttgcatttgtttctctttcaattctatttctgaaacctttaggttaataacatgtttcatactaaatttatcaactgcctaagttcaaactttcttccttttctgacttcactctttctatcagtgccactacactcccagtttcccaagattaaaaatgtggagttttcttttacccatccattgtctctcacattttaagtcattgatttatttaatcatattccctagcatctactatgtgtcacacattgtgctgggaattatccaaaccaaacttaaaatagctcttaaattctataaaacggaagaatacttatcttatagggctgtgtaaggattatatgatctactatatgtaaagtattaaaacagtagatgacacatagttatctctgtgtaagtccccactgccaatgtcctaagctagtcatttaactcttatattaatatcttactctcatctttctaccttgaattttccaatattttttctatccttcttactaacaaagagaaactttcttaatctccttaaccaaccatcaatgttggattttattattttttatgataacgaagaattctagtggtttacagttagtaataatgtgtaactcttaactaaaaattatatttctgggattaattatatttatatatttctgtggaaactacctgaaataatcctgttcccaatctatatgtctttttggaagatagtcaataacatttaataagtataaatacttgtttaattttggtgatatttattgggatttttttgtttcaatgttttaaactcatcatggactaaaaggactcatccagagatgatggggagaagtaagatttggcctcttttctgttttttcattcatcttattctacttcattatgtttgcaagacccaaaaccatatctctgtctctgtattttctggcctataaagattgcagaaaaatagaaacaattattttaattatcattattttatcataaattctagtctgactctaggcttccaattaacagtgaacttctgaatctttgatacaagaccaagaggctctggagataaaggggaaatttctggagaaatttgggaagactgtggcccctgactctcatccatatcattacagtctgaagccagaagtagctatgaacatgcagtgcattttaactcttgtagacctatttcaggaagaaatacattttccaagtcagtctgcttaaaggtgcagagatttgaacagttaaagaagttttatagactgccccagatttcagatcttaacactaattgctttagatggagctgtctcatgccacattttaatatcttctagaacctcccatattacttagtctaggctttgcttttggattccttctaggacaatcaaaagtaatgtaaaatttgttcaaattcatttctgcattgccttgattcatctacgtaagtcccttagggaacagtaggataacacaaaaaacttcttatttatttaaaatgtcaaaagcaatcagagccacatttgaaaagctccagtcctcttcattctacattctctctcttaactgacataggcataaatcccaggaggtgaatgcaaaatagatctataacatcaatctgaaactgatttaaataattagaactctactatcactctatccccatttctttcccaaggtggaggaggaggaggaataaatgatcatagtttttgtgtgtatacaaatttctaaattaaaataatgcattgctacttgcatatatttgaacatatggtcaactcaattatttaaaaaatcaaatttgtcagaaggtaaagagaaataatgatggagcaattatccctctgaacttacttcttaattacccaggcaagactgctaatgatgtccatttcctaggttccactgacagtacagtaattaaaggtcatgtgagaacatttgtcccaaggagatataaagtcaaaatggtaaactcagaatataaacctgaactgtaatatgagtacaagttcatggtgcagaaccagcagtctagagattttatagcccttttgttaatcatagaatttattctgtttcataactctaaaccccattaactggccatgattggtagtttaataatctaggtattgacctcaaagctgagaatgtgcccgatgagatcatctgagtcctcattaccaaaaacaaaacaaacaaacaaaaaacctgaggtatcatgtaatattaggaagcttttttaaaatttaatttccagaaaattaatccaacctcctgagtagtaaagtcataattgtcaataggctaaaaagagaggctttacaatgtgaaaatggggccataatctgggcatagagagaggcgttgcctctgaattatgcttcgaagccctgatcagagttctaggatgcaccagagtcacagacaagcttccgtgttccccaccctggttgtaaagaaatatttcaaagaaattaagcttctctttgaagtaaacctagtgtttttctacattttatgtcatgacacatactaccatctggttatacaataaaatataattacttttgagagaaaagtcattttttccccttcagaaggatccaagaaaaagaatgctccaatagtctcttaaaaatctctcttcattatttggacatagctacccttgcaataaagtatgtttcaagtagttatttggttgttcatgtactttcaaaacagctgttttctcctcaacaactaccattttaaaatacgtagaactacactgcatatttatgttacaatgatagagtatatttttgtgacagaactgtcagttacactttattttcaagaaaaaaatggtattaaaaaagggagtaagctgtaaagattcactcatttggcttcttatgttgtttttagaacatttgctatacttctgatataattttacctccagccttgtaataaaatatgtgtatgttttcaacagaaagtgttaattagaataagggtaacttttactttatttgtttaaataaaatttagattcttcccctgaaatctgttttaaaggacgtattttattttcctgattacccagcttttcattgtgagccaccaagcttattttcagaaatttgaaagtttgaacactgttttgggttaagataattttaaaaatcaaatttaatttaactaatacatgttttactttcttaaagttacctgatacaagtacttactaattagaccttaatttttctttattgcctaatatttcacttaaaacttctttggcaaatctgaataaaaacgtgagtattcagattcatgaccaccttattttaatataatcttaaagcttataaatttaaaatttatgcctaatcttaatagtgcacatggagtatattagtttgctcaggctaccataacaaaatacccagattgggtgacttaaacaacagaaattcattttgtcatatttctgaaggctgagaagtctaagatcagggtgtcagcaaggtaagtttcattctaaggccatgtctcttggctgatagacggcctccatcttggtatgagttaacgttgacctcttctttgtgcacagacatagagaaatagcacacagagcgctctggtgtctctatttgtaagaacactaatctgtcaaatccccacccttaggaactcatttaaccttaattactttattttcttagcagccttacgtccaaatacatccctacagggtgtcagaggttcaacatgtgaatttttagggaatttatttattcaatccataacaaggagccacataaaagttactttcttgagtatgaactcatattagcctaatacagatatttatggttacatacagaagtaggtatgtgtatatacacaggttagtgtacagtactcctcatttagccttggttttgctttccatggttttagttatctctggtaaactgtgatctgaaatagtaagtggaaaattccagaaataaacaattcataagttttacatttcacaacattcttagtagtgtgatgaaatttcatgtcatccctcccaggatgtgaatcctccatatataaggcaaatgcacactgtatacagtgccctccaattagtcacttaacagccttcttagttatcaggtcaactgtggcagtatcacaggtgcttgtgtccaagtaacccttattttacttaataatgaccccaaagtgcaagagtactgatgctggccatttgaatatgccaaatgaaaactattaagtgattcctttaggtttaaaaaaaactgaatgctgaggttgctaagatcttttatctgtgaaattgcaaagaagaaaaaggaaattagtgttaattttactgttgtacctcaaactgcaaaagttacaactgcagtacataactgcttagttaagatggaaaaggcattaaatttgtgagtagaagacatgaatagaaacatgttctgattgccagcagtcgagttcattactatttgagattcacatccactgaggtcttagaagatatccctgaagaaggataagggggtattacggtatatacgtatatttcttttctctgtcaactgagagggcctaaaaccaaccaccagtagcaatgaacacattcaactttcatatgtggtttctaatagcattagtcagtaataataataataatctccttgtagaaatgggtgattctagtactggagcaggaactacacaagatatgcctgggacagcttgtagtgtaaaaatttaaggacataaaagaaacaaaatgcaaaaaaaaaaagaacaaacaaacaatgatgggagtatgtaaaaggaatataggagagaactgaaagagctcccaatggccaaatctggaacaatatattcaacaaataaaataatattaaattatcaaagtataaaataaataatcatgaatccatactgacatatgttaatgattaaataggtaaatgaattgaggaatgagtaaatgaagaatagacaaatctcctatgcagaagaattctaaataatttatgtggttatttcactctcaagaaggtaaagcataactctccacttccatatgggatgtgcacagtaacttctttccaacgtgtacgtgaggatagagaggagaaactgacataaggaaaggcggggaatattttttggtagagaaagctaacaagcactaccttaagcaggtaatcaagatgaaaatcagcagtgataaatcatgttgatagtataggattagaatggccctttacttctgaggttttgtttcccaaaatctataaccccaatctaaccatgaaaacaaacaaacaaacaaaaaagctcagaaaattcccatagaggaacattctatataatgcctgatcagtactcctcaaatctgtcaagatcttcaaaaacaagtttagtctaagaaactgtcgcagccaagaggaacctaaggagatatgactattaaatataatgtggtatcttggatggaatcctggaacagaaaaaggacattaggtaataactaaggcaatctgaataaagtatggattttagttaataataatttatcaatattggttcattaattgagacaaattcaccatactaatgtaagatgttagttaatagggaaaatggatgtggagtatatgagaactctttgtactatcttcataatttttctgttaaagtattctaaaatataaagtttatttaaaaaaaatactctcttggtaaactaacagaaagaaaacctcttatgtgttactgatatacaatgtatgtcagtcacctaatggtaaatgggaaatcttcctacatcatgcggaaagtgacaaagttggccatgaacaaaaagtttaaatttcttgactttgaagtcttctatcacagaatagagataaagaaccagttatgcttcagttaacttggaaggatttcaagtgaatgagatgatattgagagagatatgggaaagaaaaaaaaaagtgttcattcattacagagtatctaaggagaatgaaacgttttcaggatccttccatgtcactatatttttcagtaggccctcgtctcatagataatacaaagctgcaaagctccatgaatcttctgaggagataaaataccagtattacttattcacattacctgacagattgggaaacctcttactatataagtagtaagtaattgcaaagcataaattaggttaaatgaatttaaaaatcaagaaatttataatacatgacattcatttgagatatatatatatatatataccatacacacatatatatacacatattacacacacacatatacacatatatatcctctgagataagatttttcctgtagaaaacctaaaaaaagagagaaaatattataagaatctttaaatttataaatcttccgaaataagaaacatgttttgacattttgaaaaaaagtaattatagtaaataaatttttattcacaattaccctttaaatagcaaaccaatggaaaaaatagttcagatgaaaaccataagcaatataaactttatagttgcttactgtaatgtattgcaaatttaataacatattaacaagttaatcacatattacaaaatcaggtctttcaaaaaacactgggaaatcccgttttatgttattggtaagttaaaatctaatcaaaatctctaataaattttcagagctaaaggttaagatgttttgcagtaattattcaaggaacaaagttatttgcacctccgttgggggcatcttcttcaaggacatgaaagcctgacatttctttatgtctgcatttaattgtaaagaaagcagtctctcaaatttccggtttaaaagaaccatcttataagtggttctacattttgaagaaaagtttaaggtttctcttctaaaggctgatactgtatgatgaaaaatcaccactactcttgagtcagtgttacgataatcctgttatggcaagtgattatctatattcaaaaccatacatatgcctcagaaatgttattggccatgtatttcagtgtatatcatcttttaatgttacctgttaagtttcttaggaaattgataccaaccaaattttaagaagaaatataaattttgcagctgaatgaaacaacagcatatgatattgagatatctttgctattattagtgtggtcttaggtaactaagatcttggttagagctcagtgatttctatgaccaattcatattttaaaatttaatgatataatctcactgatagcaaagactctatcttgtggctatggaacagagaagtgcccagcacacaaaatatatatttcttgattacctaacgaattaatgatattataatattcatcactggaaaaataattagcaaatgaatctcccatgtttataaatcatttccacatgttaactttcattgttcatgctaatcgttcaaaatattttgttgttcatgctaatcattgattcaaagtatttacatacagagtcattaaccgagtttggctttctaacgttaaaattaagactggtactggatacacataaatatgttattaataaatggctacaaatgatctagtagtttaaagacttacatagcagaaccaaaactctaaaactcctagaagaaaatagggaaaaaactccttgacattgtttttcacaaaaatcaacaagtgactatatccaactagagaatgtctgcatagtaaagaaaaacattaacaacataaaaaggcaacatacaaaatgggagaaaatatttgcaaaccttgtatatgacaaggcgttaatatctaaatataagaaactcacacaactaaatagcaaagaagcaaataatctaatttaaaaattagcaaaggacctgaatagacatttttcaaaggaagacatacaaataaccaacaagcatatggaaagctgttcaacataactaatcctcatgataatgcaaatcaaaaccacaatgaggtatcacctcacatctgtttgaatggctattatgaaaaagacaagaggtaacaagtgttggtgaaggtatggaaaaaagggaacccttgtataccattggtgggaatacaaattggtatgatcatcatggaaaacagtatgaaggctcctcaaaaaattaaaaatagaaccacgacatgattcaacaacctaatttctgggtatatatccaaaggaagtgaagtcaggttcttgaaataatatctgcagtgctatgtttttttgcagcattattcacaatagctaagatatggaagcaacctaagtgtctgctgagagataaataaagaaaatatggtttatgtacacaatgttatgctattcagcctttaagaagaagtaaatcctgccatttgtgacattatggttgaacctgtgagacgttatgtaaagtgaaataagccatacacagaaagaaaaatactgtgtgatctcattatatgtggaatttaaaacattcaaaaagcagaaagtagaaaggtggttcctaggggctgggggctgatgtaaatagggagatgtacaaagggtacaaagtttgaattgtaagatgaataagtcctggagatctaatttacagtatgatgaatatagttaattatgctgtattgtttacttaaaatttgaagagagcagacacacacacacatgcaaatagtaactgtgggtagtgatagatatgttaatggatttgattatgaaaatcatgacagaatgtctaagtatatgaaatcacattgtacacattgaatacatataattttgatttgtcaatcatatctcaatgtagctgttctagtagttttggtgcttaacacataaaataagttgctagctgcttgacttcagatatgaaccaagttatctttagcatgcacatgtatcactgtttgtatgacaattttttataaatttttgaaggatggtgttagtttaattaataaaaggaaatacctaccatttagaaattaaaatttcatttgtatttgtgttctagagggtaactatttgctagcccatgtgtttttcagtaaactctatttccatgacgtaactactgtattagtttgttctcatgctgttaataaagacatgcctgaaactggataatttataaagaaaagaggtttagttgactcacagttcggcagggctggggagcctacaggaaacttataatcatggcataaggggaagaaagcatgtgcttcttcacatagtggcagcaaggagaaagtgtcaaacaaaaggaggaaaagtcccttataaaaccatcagatctcatgagaactcgcctactatcatgagaacatcacgagggtaactgcccccatgattaaattacctcccactgggtcccacccatgacacgtagagattatgggaactacaattcaaggtgagatttgggtggggacacagccaaaccatgttgactaccaagaaaaacaaagcatgtatttaacttacctatgaaattcaagcatataacatcttactgttggacaatagctttttgtaatacagataccttgattcaattataattaacaatgaaagtgtgaacacaatattgattaataattttctgtttttaaatattttttcaggttttatcagactcacacagatataccacgttaaaggccaagtgctggttaatgactatggaaatactctgatctttacgtgttttttaagtatttattatggtagttgtaaaggataagtctatattaaaatgtttaacaaagtatgaaaatagacatttttgactgcaaaaggtccagagtagaggagggtagagtgattttatattttacatacatagcatagcataatatggataaaatagcataatatactgaataaatatgttcaagtgtgtttacaaatcacctccgacaacaaaattttagagtagatgaataatctcttaagatataatgaagaaaaaatctttataaaacattccttttataggacagaataaatagaaggaaagaaacaaattggtctgacagtggtctttgtttctcatgtttgctcatatgaagccaagagtggtagataaattaaaatattaataggaaatcttgtgctgcatttaaccatgataagtctctactaggcagcctcactttgcttccaaacattttgcttcagtgtttggaaagcagatggggaaaattaaaattgaaaaaaaaaaagtcatgctttcaaaggcatctgagaactaataaatgaactcatttttactggtatgtttgcaccttcttaatagaagtgtcaaggttgtttcctatagtttcctggctgattatgacatacttactttagccacatcttaatatgagtaacagacttatacaaatgtgtttctcagaaatatcttctgtgctcctattcaactgatatgtttcaaaagtgctgcaaataataatctttttaaatataaatctgtttcacagtaggacctttagttaaccatttcattagtatgatttatgcttagccatcatatctatccacaagcatttagactcacagatttaatgagaaaactctcaaggccatgatttataaacataattctgccgtaaatgataacgtactgagtaatttcctactctgtggccacaataactggtccttgtgaagtctggctggatagaaaaattatcaagtagctacaatctggtaatctgcaaacttgagacatataatttagcactaaaattttatagtactgattatattaataaatattacagcaattattgtggagaaaaaggtgacgatgaaatagtagttagacacatggcaactgggtcatttttaaatggggctagcacataaacatttatgccaacattcctatactaaataccttttgttttggggtgggatgacagagtcttgttctgttgcccaggttggagtgcagtgatgtgatctccgctcaatgcaaccttctgctccaaggttcaagcgattctcctgcctcagcctcctaagtagctgggacttcaggtccacacaactacgcccagctgatttttgtatttttagcagagacagtgttttgccatgttggccaggcttgtcttgaactcctgacctcaagtgatctgcccgcctcagccttccaaatgctggcattacagacatgagccactatgcccagccaaagacaaatatatatatatatatatatatatatatatatatatatatatatatatatatatatatatattcagtagtttcaagactgccttgagctgttctgtttactcattcattttttgagcatcattttttcaggcactatgctatcaacagaaagatcaaagaaaaatgagacactggcctatattatagtttcagtaagggatacagatgtgcaaaatgacaactacagtgaaattaggattcaaatgaaagacaaggagccaatggattgcaaaaaagggaagaactaactaggtttgggggcatcaggaaaggttctatagagcatgttttatttgagtgatatcaagaaatgggtaagaattttttaagggaaaaagtaattagaaaaacgtatgctcatcaaaggaagtaatgtgttcaaaactcagagttgtgaatggacattatgagttctgcgataattacaaaatgattggagattagggttgtagagtgagaagaaacaaaaatgaaatggaaatgctagtagtagcaaaactatgaaggcagggccatgaagatgatgctaggaggtttagtctttgctgtattgttgacagtataatttatagccctgctgggactcatctgataacaaaagcaagtaaaatttttaaaaatcccttttggagcctattataatagttgcaatcatgatgtaagtcagtagcaatggagatggtaaggaaacagaattcactacacatatttgaagtagaattaattggctattatgaccaatgaaatgtgaagtgggagaaagaagaggatagaatatccgggttgtcacaaaagaatttaccacagaaaatttatgtatactaacaacattttttaggatagaattcataggatgggaagtatcgggtgggggatggcaatggaaatgaggctatacaaggatttcagttttgagcatgttgagtctgaaatgcctctggcagaccaggaaatttaaaatgtacttgtggactgagaagatacactaatttacagatatatagatatagatatagatacagatatagatagatatagagctttcagagctatctacatacaaagagtagttgaggccatgaaagcagatgagattatgcatctcatttactaagatgaagaaacaaatgaggatcaaagttagtgccataagaaacacatttagtagtactccgtaagaggggaagcctggggtcaagacatgaaatgaccaaaggagcaatagcaagctgtgctggccctggaaacaagaatagaaagaattaaaaaaatggtcaacagaatcaagtgctttagaaagagatgaggtgggatctgaataaaagtgaccactagatttagcacttgcacaattgctaatgccttaccaagggtttagactcaaggaatgtctggagagagcaagaaatgaagccatcaagtgattattcctccaattagttaccaatgaagaaaagaagaaatattgagtgatagtttgagaaaaaaaattttagaatagatgagtctttatcattctttatagactgaagagaagtcagaggaagagcaattagcattataggaaatagaggaaaatgtgatggagcaatgtgtgaggcaggtatggtaatatttaactttgaggaaaagtgaatatgtcttattttaagaatgcagaaaaagtgacaagacaagtactattttcagaacatatagaggaagagagaaaaaaattaaaaagttgaatattttccattgtaaaagaatacacaatgttattcaagaaatgaattcaaaactattcatgccaaatatgtgaggttttatattacatactaggtggtgggaaatgaaatggaatgttatttttaggcctattcatgaaaatttattctgtcatctccccaaggataatagcaatcatatttggtagatattgttctatgttagcttgacattgtctaacatttgcaaaaaagaataggcaaatagctaacacttaatgagcatctattctgtgccagatactgttcatcatattttccaaaagtcctttgataaaagcattattgtccacatttggtagaaaatgaaataaaagctgggaaaggttaaggttaagtggtcacatgactagttaataacggagccaagatcctaacataagaatctatgttcttttccattgcaccaggacacttttctctaaaaggctgtcttcattttcagtatttcctctaagttaaaattctagaaaatatcttcgtgaggaatgattaacagtatcacattaatagtgtcacacaagacattaatcttcaaaaacttctctgagggactggtggagaaatgattgaccaagatgttcatggaatggacctgagacatttccttgccagtgggagtgaggggtagcgaatttcagtagttaatattgttttgcttgtgctcgtaagctgatcagttctggagacatctgactataaaacaaccaaggcattcagggagagcaagaggaagaataaaacttacaaccatggcaggagtctattcatgactccagaatcactttaggatcaaaaggttttaaagttgcctttaaatccagatgatgggataataaaaaccaacaaactttattaccttgactgtggtgctatggctaagctgaacctacaggtcaagtgtaaccccagctgtagggaacaagaggaattaaaacctgaaagttaggatagaaccccaagaaaaggaattattttacgtttaattaaattaagtatgtagttcctctgactaatcctgaacattacttggatagctaagaacaccaataatgtttacttagtgttagagatattgtattgactttaaaataccaaggaatctactaggacatgccaggaagattataacgtggttgagttatttttccagatgcaaaacctggttgtttatgaaaagtcacaaaacctaagaaagattgaatatagtgaacgaaattataattatttcttgattattagttttcctctgcgtaagtatattgaacaaggaaacatgaggtactcagaattattcagtttgggctatttatcacacagggtcaatatacatctagcacattcactatgattaatgcagtccaattagagagatatatgtaggcagcagcaagactcatttcatggtaaagagaaacaattttttattttttttccagccccagtcaacttttttttgttcaataataaatctcaaatgcagttcacttaattgaaccaaatggtcatgaggaaaaggcagctgcagacttatactaagcagatagctttgaggaacactgtcatttttctatttgttctatcactagtgataattgggcttacttcctagcagttggatactttctgtaaaaaagaaaatataaagctaaaattatagacattatgctgtgcctgaaagagaaaagaaatgagaagatataattgaacctgtaaagggttcatttgtagatgggacatttcctcctgggaaatgaaagatctcacagtaatacaatgaatatacttctgatttatggtaattaattctgaatgtgggttatctaccacattgctctctatagaagatgaattgtacaactaaattatcagggtcttggaagtaaaattagcataaccttaacagaaagtgaagttttgtacctcatcttcacatagaaagcatagatcaagccatcctgtcttatttcactgcccagaggtccaattataaaaaggaaatgaagcaaagaaggaacagctttcctatgtattcttccatgacatgagtttttttggttatcacaccaagtttaggggaagattgagataccttcactccattaattctgacctcaagataagagtcagatgagagtggatattgtcccctgtggaagaatgtttcttcatacctagatttggaatagaatagtgtaatctaacatattgaaaggttcacataactaactctataaaaatgacaacttataatgtgctcctaacagaaattttggagccaccttgcttgaatttgtatgccacttaatcttgaacagtttattagggctttaaccacaattattgactgtatcagagctgcaaaactcacctttaacatttagcctccagctatttctaaaggaaagtaaacaacaattgtccactttcattctctctttgaactgctaagtagtaagttagttcagtcaaaatgctaaaatcagtgggcttaaagaaatagttacaaaataatcaataccatctattcaggaaagcaaactgtggggtcatttatgcagtcagaatcaaacctaggaactgaatttatacaaatttaaatactcacataaacaagagcagaaaaactaaaaccatctgaatttttcctaatattcaagatttagcatccaatagaataatttctgaatttcactgtttatttcatttcagtcatctgctattagaaggtatttcttagagcagattttaaggttcatagcaaacttcagatgaagaaatacagattgccccccaaacctctgcatgcacacctacatatcctgccccattatcaacatcccccaacagaatggtacatttggtagcatcaatgagcctacattgaaacattattacccaactttggatgtctgcattctatgggttttgaaaaaatgtataatggcatgtgtccaccattacagtctcatatagggtagtttcacttacctaaaagtcctctatacttcacctattcattcttccttccttactctgggtaactattgatacttttactattttcatactttgtctcttctagaaatttatataggtggaataattcaggatgtagcttttcagattggcttctttcacttagtaatatgcatttatggtttctccatgttttttcatggcttgataactcatgttgaataatattttagtgctgaataatatttcatcatctggatatactacagtttatccattcatctaccgtagggtatcttgattgctttcaagttttttttttgccattatgagcaaagctgttacgaatattcatgtgctcatttttgtgtggacataagttttcaacttacttgagtaaatacaaaggagtgtgattgtgagattatatggtaagaatatgtttagttctgtaagaaactgccacactgtttttctaagtggctgtaccattttgcattcccaccacaataaatgagaattcctgctgttccacatccttaccagaattttgtgttgttaatattttgcattgtggacactctaatataggtgtgtagtaatatttcattgttgttttaatttgcaatttcctaaggacctatgatgttaaaagatttttcatatatctattagctatcttcatgtcttctttatcaaggctgtgttaaagtattttgtccattttttcaatcaggtttttggtttcttatgttgaattttaaaagttgtttgcatattttgaataacagtcttttattagatgtcttttgcaaatgttttctcccagtttgtggcttgtcttctcattcttttgggttttgcagagcagaagtatttaatttcagtgaggcccagactatcaattatttatttcactgatcataccttaatgtatataaaaagccatcaccatacctaaggtcattcagattttctcctatgttattttctactcattatacagttctgcattttaattttaggtctatgtttgcttttgagtccatttatgggagcagtgtaggatctgtatataaattctttttttaatgtgcgtattcagttgttccagcactaagactattttttctctattgtattgcctttgattttttgtcaaaaattacttgattatgtgtatgtggatctacttcttggctctcttttctgttccattgatctatttgtctgtcattttgccaatagctacactgtcttgataactagctttataggaagtctcgaagtcggatatgtcagccctccaccttttccttcaatattgtgttgactattctgggtcttttgccacttcatataaactttacaatcagtttgtcaatattcacaaaatgagttattgagatttttattaggattgtattaagtctataaatcaagttaggaagaactgaaatcctgacattaatgagtcttcttattcattaacatgaaatatctttccatttgtttagttcttctttgatattttttatcaaagttttatagttttcctgatatggatcttatacatattttgttagatttatgcttaactattccatttttgtgtgtgctaaaataaatggtaatgtgttttcaatctcaaattccactttttcattgttggtatataaaagtaactaatttttataaattagtcttatattctgcaacctttcaataatcacttactggtttcaggaagagtttttttgtagattattttggattttctgaattatcatttttagttattcagttatatgttatatttccctattccttatttctttcatatgtacaattaattcagtgtcagaatgtagcttgttgggttccagaattatactctacaagtcactccgtcttagtacatgccttcacaatatggattctccacttaagtctcagccttattcatgtagaaataattgacactcataagggccatgagagtatttgtcatgtgcagattttctcagaccccaggcaagggcatactgctcctactcatgcagccccttatagtaccacactttgtaaaacagtttttgctatgctaaagcattgtttgtaattgcggtacattggaaacaacccaataacctatcaatatagaaacagtcaattaaatttttgagcttccacaacctgaaaaatatataaatgttttttaaatgaggcaaatgtatatattctatacattttaaaaagtagagtggcgtgagtgaattttatctcttatactgaatgtataagtatgaccatagttttaaaataaaaaagttggacattaacacatattaaactatatagaaaagtttgaggagagtaatattgcatgctcttatttgtagttactccagggttagatagaaggcaaatggagagatgaggggaatttttatttttatataaaatattaataattaagtttttaaacattctcttcttgaaaacaggaaaataaatttaatggtctttacagttaccttttagtgaaatcccatgctttgtaatattgtctgcaatagaaatactgacttttacaaaaacgaaatttaaaaaagaatatgtgaatgaagtttatgagtatcttatgctttttaaattgttctatatatcattaagaaagggaaaagaaggatttgcatatggctttatcttctagcatcataccagtagcaccgaatgcattctttaaagtgttatatctatctattgccagcagcagtgatatatttagatatatatatatatataaatttaggtatatatatatctgtatatatgcatgtgtatatgattatatatataacatctgtgtatatatatgtacacattcttcattcacatattcttatatagatatatgcatatatgtatatctggatgtatataatcatatacacatacatatatacatacaaaattatcttaacacctgcctattatttgaaaatgaaacagttgacattttgagcatggcacaaaaatatggacagaggtaagcttttttattaaacattactttcttaggtaactattgatatgatatatccccttgactctataaataaattaatatatagttttccggacaggttattgttcaagtaaaactgaggtttattttgtgacacaaaaacaatgagcagagaaaagagatgtagtaaagcatatctgacctggcagattattatacaaattctctgctctaatcaaaatgctgtgtgtgtttgtgtatgtgtagatgaatagtgagagagaggaaaaaacacaatattagatatacctactatatcccaggcagatatttaatcctcacaataacacttgaaagtaaacgttattaactgcatgttctagatgagaaaatgaaaactcagagaattccgcaggtctgactgacactaaaatgtctgggacttttcatagatgttgtataggcaggccaaccacatactgtaatgttgccctctgtctgtacaagtatcacctctctactcagagtgaggtcctacttattctacagccaggctcttaacttttcccaaatccctcatctgacgttaaaatatacatatcctcaatttagtacagtatcctattgggcacttaattttaataaagtaaacttctctaagtggcttacaaatgtatcttctcatatattattttaggaccattttatttgttataaaaatcttaaaattttataaggctgtgtagtgaatttcccactgtatataagaatacagtcagctacacgcctataattagtacaccattcaatttgacagccataataataataaaagattctgaaaatgccagtctattaaaaggaataaatacctaattgcaagatttctggcatgagagataaccggttaaacaaataatttatgacatgatctcttatttgttgccctcagatcatagtatattggttactacttgtttattattttttatttgaataaaatgtctaattctatgtcaaatcgtggaaagcatacaaccacctttaatagcatatattgcagcacatgttaagaactcttatttattaacactttagtgaaagttaatgtaattagttttatgaatatgaggtaacatatttcttccacctggttgtcctaaaattatcctttcaatgaaaaaatattttatcactgggctcaggtttggaaggaatgtgttattagcatttcttgtgaaagatgtatgttcttaagaaacacaattttctggattttaccatttccatatcatttataaagtttagtttgagagcccacaatggtacttccaaaaatgttggtaatgtaaagtaatcaaacatgcctggaatattcttcaaaggttggttaaacatcttataaaagtaattagcaaatccatctggaccaggggcttttccagatgggaaactttcattactacccatcattttccatagtttattataggtatagttttattttgagagggtcacagatagatgtgtataataaataaagcaacaaaattgtttaatatttgggtaagagatccttctgtataatcatatataaaaattaagcaatagcatatttctgatgagtctgtgttaacagacttttttatttatattattcagaaatatgtgtattttaaaatttcaacggaaaaaattgtgattatccatttctttaaaaattacacaatgttttcttttacttttgcagctctatcaataccagatagtgagatgtaacatcctgaatatatgaagcttcctaaaaatgttaaattcttacagattggcattttaagacacaaccatactgaatgaactggtagagaaagaatattcaaaaacatagggaatcaactgtttgaatatttgttcaattaaatttaacaaatatttctgaatccttattttaagcctggcattgttataggtacaaataaaaatataaagtatgtaaaatagtagtttaggagaggagataaaaatatagacaagggattgaattgtagcttgacaagtgaggtaaaagagcatgtactagatacagtagtggcgaaagcaggggtgctctacttttcttggatttggtaagaagctctacagatgcagagatgctgaaaatgctgtcctggcatttgtgaaggaagtaactttccaggcaaaaggaactgcatgagtagagacacagagcacgacacatcaagaggcaaatggcctctctttgtttatgatggcaataaaatattgactttccccacatagttagtgaaatatagaattaggaacttaaaaagaatacgtcatagcccccttacaccaagaaagagaacatgccctaaagaaattaggctcttttggccttagcaccattttctcagaaacttctgctccatgagagccaagtggagaaagaggtacatgtgtagattaaagcacaaaagaagaaagatgaagctgagatccaagtaaattgccagcatgtgctctcatggaggtcacaggagcagaatatggcatgccagtgactgaggacgatgatacaagttgttggactgcatgctgctctagaggttgtctctcaattgatctagaatttccattgccatctaattgccaagaccatctctgagaaaaccaccttgcccattaccaaaacagttcctgttgacctttgccccgggcctctgatattctagactacatctcttctcttctcagttgttgccaagtgtaacatgtaattacaaatttgtaataaagagcaattatacaatatattatttcttctgctctcttagttaaagaatcaaacagacaggagaagacagaaatcagcacactaggggctttaatctgaaaatgactgatgtgagtcttcatcagattcaaaaaattcattcaaatgaatgtccccaatgaaattactaaacaggccaaaatgtgccactgacgggactttacttaaggcttgaaatgttagctggggttaagcaacattagacaaggacatttagctgagctataacctactttccctctagggctgagatgatgtcttttattatcccgagaaatttgttataataaattcggttgaggtgttctcttctccatttcttttcttcccctagagcataaggcacggttggtttacacagctcaatctccttcacggcctggggacattctagtatagtagaagaatccttcttttatagaaacacacacacacacacacacacacacatacacacacacacagctgtttcgctcactgttgtcagaagcaacttgttctaaagggagggaggtgagtaatgagtgcctgcactaattcacactttaaagaggacacagatgagtcatttgaatacattttagtgttggccttcaaatagcagcctacccagacttagaaagacaatattctgggggcagcagcccttgtcttagggaccaaagtcatcctacagttcaagccaatggtctagaccaacctaagcagaaagcataatctaggctcttaccagccaaccttggctaatggaacctgttgcagaacagacagacatgggttccaagactgagatatgtaagatcaggaaaatagtttcaccctcttcgggtgggtccagagatattttcaatctcacagcccctctgcactgaatgcaggtgactctgagccattttgagggaaatacatacatacacaaaggacattttacaatataagttttttctgagaataactttcaactgaccttccctcactattttaaattggcaaaactgatgatcaagaagagtcacagatagatactttcccaattcaaattcaaagagcatgaaatgctaatggttatatatatatatatataatatatatatatataacatatatattatatatatgttatatatataatatattatatatatattatatataatatatataatatatatataatatattatatatataacatatatattatatatatatatataatatatatatacatatatatatggaaacaaagggattttgatggtccaatcagtttgaagaaagtttgagttaaacaaattaaataaattagattgcaagacttctcaaagacttttttcatgtttattaaaatcttgaatctctaagaaagatatgtaatggtgactatttcccaaattatttacgagtagaatcattcctatctaaacctatatgaatatctcactgaagactagtgttctgtggactgagagatgctggtttaataataaaaataatagctaatattcacaaaatttgaattctgtgtgtcttaagtcagctccaggaatatgtattttaagacaccaattattctacttgcacaaattgtgggtataaaccaagagcaacctctgacaaaagaatatgttcaagttctttcaatttagggccagagggtggaaaaagaaaagttggatgaagacatttttgggagttctccaaatttcaaacagtagaaaaagttggtagtggcaagagttgggatagataagctccataagggcccctgataaatgagactcatccttggaagtataataccttaagtctttataatttgccatcttggttgtagcataatctgttccaatatagtctgataataattggttgagtatctatttatgcagacatttaccacaaatgatttaaagttgtgggtggagaaagacgtgaatgcatgctgtacttgtttgggagaggtttgaaaacataagcgtaaagcatataagtaacagaacggagaaagtcacatgtgaagcaaacatagtaaaacacaagactgtgtatatgttataccatgtacaaggtgaaagaatgagtatggcagggagaaagtgtggaggctctgtggaagaggtaggatttgagcacagctgtgaagaagcaggaagacttggacagaaggaggacatccaagtgaaagagagaattttaaaaaaatagtatacagggagagaagtgcaagacctgttcataaaagaggcagtttcattttgttggattataggatcataggaggatgtggcaggatgtaaggtagaaaaaaataggttgattacagatcaaagaggatcttgaatatcatattgaagtctatgaaatttcctttatagatattgacaaacctctggaaggtttggcgaatgttcttgtaaggaataaaataagaagactgaatgatgaacaagaatgggtcaaaactcctagtcagatttgcagtggaggatgagacctcattataatctcttacttccacctgtgcaaatcattagctgacagctcaaatgtcaatccatgtggagtcactcagagctaggttaacccactgggtcatatggaaactttttatttctatggaatagagtcagcctgggtagacactctagagtacatgctatacattttgaagacttctgatatctgcagtgaagaaaacattaaaatgttttcacagttctctgtttttaaagaaaattccattagaatagtaaataaacccaactttatcttctatatttaatgtacactatataagaaagataaaaggcagtttatgtattttaaagttctgctcaatatctgctatatgtatgtatatatacatacagacacagagagagctatttcaagaagtagctgcacagcttcacaattttaataattatttttgtcatactgttgtggcagaggatctcaaattctattccttagtgactcagcgattgtttcacagtgctgttaggccaaaataaatgcctgatagttccatttatttggtagttaggtctcaaaaactcaataagaatttactagcaacttggaaatcatttttgccatatattgacataataatatttctattcttaaataagcatggtcacttaacaatggaatgcatgaagatgttggatattgtacatcttctaatgcacaaaactcaaattcaaatttgccactgctactgttatttcctgctccacattgattttcatgtggtgtttcttttatccatagaaatcacaaagacagcttcacaacaaatattgacattatctaaaggcatatagcgctatctaatgttgaaactataaattacctcaagcttgtatgtgcagtgttgctgtttcccctgaaaatattaaatatttcagggcacttctttgagctcactgcatcaccacagaatatcttggcacagagtttggagaacatggccatagtgcttgcttttgaacacctggttttaggacatgaaagtggcaggtagggaaagaaggaataacgtgtgtcaaaaaacaagaaactgacttctgaacaaggagtaataagagtaggcagtctggtgacagaaaagtctcaaaatgtttatggctaaaaaacaatttgaggctcaaatacatgcaaataatatttttcgtcaacggaccactacagcaaagataatggcatcagatgaccgcccttcgcccccatttaaagttgtccttaaatacctttcttattccaccaagtttggctcagtccctgtgatcaggatcgggggatgtgtgattaagaggtctttgtaaattcccgctaatattaagtcagtacccaacagtactgcttgtagttaaatagtagtttcaaaattttggaaatattttggatttcacaagagaagattttttaactttcaatttatttttttaatgaagttcattttcttttagtctaattccgacatttaaaattaaagtgtgcctgcatatcaatctctcagtgactgcctttaaaaatgatttttaaaagcccacatatcagagtaatttctttcattacataaacgaccctctggggtatgcagtttcaagtatattttgggaaggatacactgcagacttttagaacttgtgaccaacttttaattctctgacagtctcagcaggcagtatggggtggggggaattgctgtcaaaaaaaaaagttttgactttaaaaaactccattcttcacctcatctatgctaacctgcttctgtcataaagtgctacaacctcatgaaagaaataataatgcaatatagcagatttgtatctctataaacaatgaagtttctcaattatgcagaaacctttaaggaactgctgctatttttccgtatgtatatttgataatttttatttttggaattttgaacttcttatacctttgaatataatagaagaagtaacacaatcaaaccctaaatttcttctttttttaaaatccatgaattctatttgatgttagtctcagaaaaaacattttcacagattgagaaggtgtttgattataaaaggtcaaggcaaaataccaacatatttaaccaatacatttttgcagactgtttatagaaattctctgagttgcatagcaacaggctttttaactactacttgctatccagattttaataatttaattagtgtattttgcttcattaaattgctatatttaatagattaaatgaattcaattcatagcatgttttaaatggattttttaccacttgctgtgcaagtaagaatatgaactgtatttatcttctattcagatgcaacataacaggaatgaaatgggggatttttggttataactggtctgatctgaaagataaatagttaattagaagtttggagaaggtgaacgtacttttccaaattataccatgttcagaaagatgagaaagttcacagatgttttttttttttaagatgagaaaaataagtttgaaggaaaaaaatactctcaatgctttgtaatagttttgaaagttggcttcatgaagtttctagttagggaataactataaattgagatgtatgactaatctttgaagagtggctttcttttttctaattctaatatgtaatttagagtttcaggcttcatatcagcagcatatcttagtagcccaatcggtcctccttatctccacctggaagccgcataagcactttaaacttaacatgatcaaaatagaaccctttatccccaaccctcaaagcttttatctcaccgtcttctttatattaataagttaatccagtgtttatgcaagtactccaggcaataattcgaagagtgttctttgattcctcctatccctacaccccccgatatctattccattaatgagttctattggttctacccttaaaatgtgtgtgaatcctgttaacttttctccaccttttctgctgcctagctagaccaaacaccatcatctaaagataccatcatgtcaaagtgctctctctaaatccattgatctttctgcataccattctacacacagtagccaatgaaatctttctataacataaataagatcatgggatcccctaaataacttctatggctcttcttttgcacttagaatcaaatttttcctggaatccttgccctgacctgatctttcctaactcaccagcatgagcacattatactctgtagttcacactcagccacgtcagccttccattgtttccttgactgttctaagcccttcaccacctcagcactttgttacatgcacttcttgctgcctggaacgctctttctgccctttttcccaacattggcttgctcttattcttcatatttttagcataaatgccacatttacagagaggctttctctacattcttgtctaaatattttcatgttcttttcccttatttctctttatgtcatcagtgattatttctgtcacagcaattatcacaaatgttacttatttatttaatattttcccctagctttataaaggcataattgaaaataataattgttcatatttaatgtgtgcaacgtgatgttttgttttacgtataatttgtgaaatgatgaccacaattaagctacctaacatatctatcaactcacctagttacctttttgtatatggtgagaatacatcagatctaatttcttagcaaatttccagtatataacacattattaacatgttatagtaatattatatagtaacaaaataaattattaattttattaattaatattatattaaatcgatattaactatagtcaccatgctgtacgttaggtctcccgagcctattcgccttctaactgaaagtttgtaccctttgaccaacatctccctgtttccccaaccacccccaacctcaggttaccatccttctactctctgttcctattagttatcttttttagattgcatgtataagtggaatcatgcagtatttttctttctatgtccagctaatttcactcagtaaaatgtgttccaggttcatccatattatcacaaatagcaggattttcttatttcttaatgctgaataatgtttacatacacacacatacacaccgaccacattttctttatacattcatctgtaaatgaacacttatattttatcttgactattggaaaaaatgctgtgatcaacatggaagtacagatatttctctgagatctcaattttatttatttaggagatgtgcccagaagtgggattgctggatcatatggtagtcttatttttattttttttgaggaacctccatattgttttcatagtggctgtacaactttacattcctaccaacaatgcataaggattcttttttttccacactctcaccagcacttatcttttaactttttgctaatggccatcctaacgggtgtgaggtgatatcttattgtggttttgatttgcgtgtttccgatgattgatgatgttgagcactgtctcatatgcctattaaccatttcataacctgaaaatgtctgttcaggttctttgataattttttaaataaggttatttagctttattgttgttgagttgtatgggttccatgtatattttggatattaaaccattattaaatatgtggtttgcagatattttttcccattccgtagatttccttttcatgttgttgattgatttctttgttgtatagaaacttttcagcttgatgtgtttccagttgtttatttttggttttttttttgcctgtgcttttcgggtcatttccagaaaatcgttgcccagacctgtgtcatggagcttttcttctatgttttcttctggaattctatggctttaggtattatgtctttaatccattttgagttgagttttgcttgtggtgtaatataaaaaaagaatttccttttttttttttttgcttgtggatatcaagttttcctggcaccataattgaagacactatcctttctccattgtgtattcttggcatcttcattgaagatgagttgatggtaaacatgggtttattcctgggctctctgttctcttctctttgtatgtttgttgttatgcccatattatagtgctttgattgctataggtttttattataatttgaaatcaggaatgtgatgcctccagctttgttcttctcaaccaagtttacttcagctattgggaatcctttgttattccagatgaattttaagattcctttctctatttctgtggaaaatgccattggaaccttgatttaaaaaaatgcattaaatctgtatatctctttgagaagtatgttttgacaataatgatttttttttcaatccatcaccacaggctatttttttatatacttgcgttttttccatttctttcatcgatgtcttatattttcattatacagatcttttacctccctagttaaattaattcgtaagtatttttattcttttaatgctgttgtaaataggattgttttcttaatttcttttcttaagagttcattcttagtatacagaaacaaagctgactttttcgtgctgattttttatcctgcgacttcactgaatttattagtaacagctttttttcatggagtctttagggttttctatatataagattatatcatcaaaaacagagacaattttttcttttgatttggatgccttttatttcttttcttgcctgatttctcaggcaagaacttccagttttatgttgaatagaagtggcgagagtggacatccttgtcttgttcctgattttagaggaaaagcttttaacttttcaccactgaaaatgacgttagctatgggctggtcaaatacagcctttataatgttgaagtatattccttctatatctcatttttgggtatagcttttatcataaaaatatgttcaattttgtcaaatgctttttttttgtctattgaaatgatatgatttttataattcatcctgttgatgtggtatatcacatatattgatttatgtatgttaagccatccttgcattccagggataaatatcacttgatcatggtatatgatccttttaataagctattgaattcattttgctggtaatttttgagaattttttatctatgctcaccagggatattggcttgtaattttctttctttgtagtgtccttttctggtttggtaaaagggaatactggcctcatgagtgtttccttcaatttcttgtaacaatttgagaagagctagtgttaattctgttaaatgtttggtagaattcaccagtgaggccatgaggtcttggcctttcttttatgagagatttttaattactgattcaatctccttactcattattagactgttcaggttatctatttcttcattatttattgtttgtggattgtatgtttccaggaacatatccatttatgctaggttaccaatttgttgatattattcaaatagttccttgtgaatctttgtatttctgtataccaattgtaatgtctcttctttcatttctgattttatttgagtttttgctctttatgtattaactgataaataataattgtacatattcttcagtacatagtgatgtttcaatacatataatgcgtggtgatccatcagggtaattagcatttaaaacatttattcatttatatttcttcatcactctagctaaaagtttgttgatgttcttttctttacagaaaatgaactcttagttttgttgatatttttctaattttttgtagtctctatttcatttatttatgctctgaaatttgttatttccttccttctaactttggcattagttttctttttctagctccttgaagtgcaaaactggttgcttattaaagattttttttttctccatttaggcatttacttccataagcttttctcctagaactgctttggctacattttacgagtttttatatgttgtattttcattttcatttgtctcaaaatattttttaaattcctttttgataccttcttttccctattggttgttcaggggtgtgctgtttaatttccatttatttaaacctatttatacttaatttttacttatttacaccttaatttccacttatttataccacttattctacttatttattcacttattgatacctagtttcatatcacggtggtcagtgaagatgcttgatataatttcagtttgcttaaattttctaagagttattttgtgacctaataaatgttctatcttggagaatgttccatgtgttctttggaagaatgtgtattctgctactgttgggtgaagtgttctgtatatgtttgttaggtctacttggtctaaaatgtaattaaaatccagtattcactttttgtctgggtgatctatttattgctcaaaatggggtgtcaaagtcccctactattattctattgctgtcatgtctcccttaagatgtgttaatatttgctttatatatgtaggtactttaatactgggtgtgtatatggctacacacacatacacacgtttaaaattgctacatccttttgatgatttgacccttttatcattataaaatgactttctttgtcttgttttacaatttttgacttaaagtctattttgtctcatttacttatagttacccctacccctttctttttggattttatttgcatacaatatctttatcaatctattcaccttcaccttatgtatgtccttaaagcagatgtgagtttcttacagacggcatataatttgatcttgtttactgaaccatttagccactctgtcttttgattggagaatgtaatttatttacatttaaagtcattattgatgggtaagaacttactgtttccattttacttatgatttcctggttgttttatcagtcctttatttctttgttcctttctttatttttttttattgttgttgttgtctttccttttgattagataattttttgtagtggtgtgctttgagtcttttcatcttttgtgtatatactatagattcttgcttttttttgttaatctgaggcttacataaaaaataggattagaccgatctatttcaagttgataacaactttacttgcattcaaaaattctacattttcatctccctagatacatgtcctattttttatgtcacaatttacatcttttaaattgcatatgtgtttaatactagtgctttgggaggccaacatagagggatcacttgaggcctggagttttagactagcctgggcaacacagcaagacccatatctacaaaaaaaacaaaaacaaaaaaacgctaggtgtggtggtatgtgcctgtaatcctagctattcagtagggcagcatcacttcagcccaggagttcaaggctgcagtgaactatgattatgccactgcagtctggcctaggtgacagaatgagatgctatctctaaaaataaataaataaacacaagtcaataaattgcatattcattaccaagttattgtagctatatttattttcaatatttttgtcttttaccttttatactaaagttaaaaatgatttacatgccactattacagtaaaagaatattttgtattttactatatacttactttagtgagttaacttgcatatgttttcatattactaatagcatccatttgtttcagcttaaagaatatgctttagcatttcttgtaagccaggtctagttgcgatgaacacccttagcttttatttgtctgtgaaactctatcttttctttatttctgacggacagacagctttaaaatattcttggttggtagggttttttttttttttctttcatcactttgaatacgtcattccactttctcctggcctgcaaggcttctgctgaaaaatcggctgataatctcatggaggatctcttgtttatgacatacacaattctcttgctgctttaaaaattatctctgtctttgatttttgacagttttattttaatgtgtcttggtgaaatcttatttgcagtgaacgtgattggagacctttaagcttcacgtatctggatgtttataccttttcttagatttggaaagggttcagccattgtttctttaaataagctttctgccttttttctctctctcttctcctttttggactcctaagatgtgaaatttagctgtcttgatagtgtcccataaatcccataggctttctttattttctgttatcttttaaaaatattttctcctcttactgaatattttcaaatgaccagtgatttcacagagtctttcttctacttcattaagtatgcctttgacactctctattgcattttttacttcaatcctggtattcttcagcaccagaatttgtttggttctttgttatgatttctatctctttctttattaaacttcggtcttgttgagttgtttatctgtgttctgttataactcagcaagcttccttaaaacaattattttgaattgttgagcagttcatagatgtccaattcttttaggttggatactgaaatattattgtgtacctttgggggtgtcatattacttaatattttcatcgaagtcttgaagtttttgcattaaatccttgaagtcttccattgtggttattgcatttgaataagtggtcacttttgctaatcattactgactggcttcaggaaagaaataccttcaccaaacaaactggttagggtttctgaggctctttccaaatttttctatggatgagtctcttccatatctcttgctcttcttgggaaactattctttattttcttcaacttttaattacaggggattgatatgcaggtttgttacatgggtatattgcacccagacactgagcatagtaactaataggtagtttttcaacccacatccacctcccaccctccctactcaagtgtctgtggtgtgtattgttcccatgtttatgcctatgtgtgctcattgtttagttcccacctataagtgagaatatgcagtatttgtttttcatattatttaatatcttctgtggctagcagatgaaaatttcaatatgatgactttaaacagaaatgaacatcatttgaaaggaagggcatattaattaattcagggaaaattggatatttactgtgattcaggcaccatactaagtaccaagaatataatgctttcatgaagttacatcagatcaaaaactacacaaaggctttctaaatgtaattcaggaatggaatatgtaattttctgttcaatatggttatgttacactattgactgaaggtagagaaatgtactatcatcgttcatttatagtcattcagttgaactaaactgagaaggtgctttgatgaatgttttagatgagaagaaggtggaaaagacaatgtctattccctcaattctcctataggagatgtattcaaaaaacatttataaaaaaagacaaaaaatgatatgtacttgtgaaacagaattaaagtacataataaaaagagtcaaatcctaataataataaatttgaatgatttattgggatcatttaagaaaacaagatttcattagtctgtcaaaatgtaacagagcccccagaacttgtgactgtactttaatgtttcacatatatttcatgataaattaatttttttaccctgaggattagcatttctattaatcccttggtattatatgaaagtgaaattacatacaaattattatatgtatcagatgtgtttgcatttggccagggtgggagtagaaatgtttttacgtttatgacaccaaaattgttaggaactctaagtaagatgaataatttttgaaagcagagtcaacacaacatagaaaacggaaattaatcaatggttagatttcatttcaggaaaccaaagggtatctatctaagtcaatgatgcaaattaattgttttatgtattcatatatggaaaactgattacaataagaaacatggcattaaaaataagcaaacaaatttctggattctgttataaaagaacctctgatttttctgtatatatcctagctctaggaatcattgactaagtgaatgatgatagtaaggattcatccatttctatacaagggcatttttttttactcatttatattgaggtcaattttgtagcccatttctgtataaaaaggcatatcttggacaatcaagagctacactgcccaatatagtagcctttagctacatgtgactattgagcattcgaaatgtgactggtccaaattgagatatactttaaatgtaagtaaaataaaataaacaccaggaagatttggtatggggaaaaaagcatgtaaacattacattaatatttttatattgattatatattgaaattgtactatttttagcataccagattaaataaaatatattttaaagaaattcattgcccctgtcattttactctttctgatgtgtctatgagtaaagtttaaattgtatttgtgactcatatttttactagacagcatggatctaagaaatatttttaaaagaagtattttttattctaatattgctttcatgacccagtcattgtttaagtgtccattaaatcataagggaattacactgtgggacaccccagtatatatcttgccagtgttaatattccttttcctcatataaaggaatttaatatattttgcaagagggctttgtagagttctataatctatactgtttaaagttatcctcctcctttagtatatgatttcctttcctttatctgcaggtaggtccatttattagtaggatgccttcctgggaaaataatagaaatgataattaaataagtggtgatatttacctttttacaaagtttattctttctcacttccactccttgcagagataatgaaatttagtgaaataacgaaggagccacacttagccaaaaacagatatagctagacttttccaatgatcttactcaagctcttcaaaattgatttattatttccattacagtgccttgattcacaacccctctccctcctgaacacacacacacacacacacacacacacgtgcatgcacatgcacacacgcacacactcattattattagaggtttgctttctaccaaccgccaccccttcccccattttatcacaggtggcctctaaaagtgaaaatcatttatgccatccttctggcaaagaccagttctttttctcaggcaaagataaagtgttcatttttattgtctctcccattatgatacatttatctaaatggaattaataaagtacctaccacagatttccttagctgattgcttacaagtttgagaatgttaatattcaaggacattaaaatcggaataaaagaaattagatcctttgaaataggaggtattttaacgtgtggtcccataaaataaaataaacattctaaaaaatgaagcctataaacatcaggaagatggataagttgacacttcattttgcatatctctgcttaataatattatatttcatttcccatgctaagaaaacagccattacccaaagcagccactcgtaaacaggccttgtgaacagattgcatccttgttggtggtatgataattgaaataagttttctagtcttttatgagaaaataccagatgtataaaatacctattaatcaactctcttgcttttgcaaacataagtttcagtaccaatggctgttaaaaaatgaaatgtacaatgaaaaagaggattgcgagaaaataccaaagaattagctaagtaattcatctttgggctgtttctgagtatctgttgattgcaggatggagcagtaaagtcattactttggatttcttgaagaaagacttatgattgtcatgccttgtatttctgcacggtttgtcctaaagagaacagggtgggaaaaagtgattgtcagtgagtacatgaaaagtgtcgtctaccattttatttcacccgcactattctattctattaattgaagtttccaataaatatttctttgtctatcatcttttgtaaccataatgtctaggatcaccactttacaatgccgtcaagccaagtccctcccagtttcaacaaccctatcctacctcaccctactctttcaaatgcaaattagaaaatgagaaaattgagagggaatgaaaaaaggtgataggaaggaggagagaaaaactagcctagaaaaagcagcgttaaaatgacaagaggcgctattgtacatatattggcgaaaactgtcttaaactatttttccctcaagcaaaggtaaaagaagttgtttcccagaggtagaaataggtaattttaataaacgtgatttcggttttctacttgaatcatgatttaatatagtcagtccctttacagtagtctttggagtcaagatcatgtgcctcactctgatggtcttaatgtttccatatttcaagttcagggctttagctgatggagtttgcttttattcagcccagtgttctgggttaacttgccagttttctttgcccatttttacttttgaaagtcaaggataagataatgttatgtacatacctaatttacgtgtatagcatttatagaaaatatatttcacaatgtcatctcaaagctcataaaacagttttttgtcccacagacttttctggcattctctccattatctgactgttaaattctgcagatttagggcaaatatcaggttacttgaggcctactcgcctttcagaagtcactaagcattgtccagctaaggccacaaggttgatgccggctttccttaaaccctcctcgcatcacttttcctaagttcatcttccctagatgctcaggaatctctgattgccctttgttgggaccttaggtcagagttctatccttccttcagaagaccatgtgtgcgagttggtatacagttctccaaacctttcttctccacctgatctgcgtttactattactgaaagtttattggtgataattgtctgtagtttatacttgacttaaagagggaagcactaatggcagcatcactaagtttcctgaaaggtgaatgaaggtgatactttcccatgggctttagagttctggtagtgttcaatgacatacttcaaatcagatgtacttcctttaatttggttatataaagcatcatctatttcaggccggagtgactgaatgtgtgttccaagtgctttcacctgaatttccaattttgtaaggctttacacttacacatgtaggtatacattcattggtggagagggagggctggtacaaagacagcagaatctccagaaacatgtcctgtaagcacattactaaattaccttccagccatagttttatagtctgtctgccctgtatttttgtgtagcagatatctttttctgctatgtctaattgaattacctctgtgggtctttctctttctcacatagctttttataaagaaccctgggctatgtgacaagaagcctaggttctagtcccatgtctggcagtcactggttgaagaagttttgccaagctattttcatgtccctgatcttcaagtgtcctcttgcaataaatggggaattttgagtagttcagtcttgggaatgggtaagaggagcacagattccttagacaagaacattagaatcatatggtggagagagaggggagtattcaaactatatgatcctttttcctacccaccacaagaaattgtaataaagctccccaactcgagaaacactgttaaaatgaatcaatgtctgcacaatttttggaaaaataggcctttaaaaaaattagatatccgtttaaatcccttttccaaagaaattgatttacacacaaaattctggaaatagttttttgaagttcaaatatgcttacctctccatcccccagtcccctgcaaaagtttgaacttgtaatgatctcagtacagtgtatttgcttgagaatgctgctgtataatgtaaaccctctactaaaagcagtaggttttgttgttattccaccattgtatagtcttagttagctaagaaacattttggaaaagaaaggtgagttagaaaaactccccaaattatacttaatgaccataaaaatatttgaatgattatactgttcaatgtaattctgacctctgaatgcttctcagacataagttatcattattgattctaaaatgtgacatcagtacaacctgaagcttaacagatttttcaaaaaactcgcatcctcaatggctgttgtatttttttttttatttaatagaagcgtgcaatgaattaaatgaaaaactaaccagaacagcaatacagattacaaaccataatagccagctctaaatgtgtatcctggggtttcagatgatgtcataatctactactgcaaatttaatagtattgttgcctggaagccaagctgttatagtatgtttaatttcactaagatgtaaattacatggttcagctttgtatagtattggctactgtcactttcacttatttttgcagctgtcagccatcgtaatgtttatggcagttctgtttatctagaagcctgatgcagtttatctgtctatctatctatctatctatctatctctatccattcatttattagcttttttcatattctgccttactctttaaattctttcattaccactaaagccaaaagccaaattatattaaatttaacagctgattttctaatttttgagtattattttaagaggaagagtaaatgttctttaatagcattgtatgtgatttttgccaatacaggagtcactatattttttaaaaggttagttcggaaaattttttaagaccacttgtccctaatgtccctgctagtttgcatagagttggcattttctttgccctggcacagagattttttttaattgagacagggtctcattttgtcatccagactggagtgcagtagtgcaatcaaaggtcactgtaaccttgtactcctgggcttaaccaatcctcccacagctgggactgtaggcacacattatcatgcctgattacgttttttattttttatttttggtagagacagggtctcactatgctgcccagtctggtcttgagcccctggactcaagcaaacctcctgctttggctttccaaagtgctggaatcatagacatgagcccccatccttggccaatttttaaatatcatatataaaaattcggacttttgttttagctttctgtttttaaatttctcttcaaattaaggagcagttgagtttgatgactaagagcttggggttgggacatggaagccaactcttccatcctcaaattgtgtctcatatagtttatgaaactaccacagactcaacatcataatatggaaaatgtaaatacaaatacatactatctataaaatcattagccatataaagaaaacttccactccctctcctccttccttctgctcagagtttcccacagcacctagaaatcttggcaaagtcacttaactcctccagagttttgttttctaccccccacaaaagaggagattttactagatcatctctaggtgccctttcagtctgacaacatatgggccacagttaagatattaatacatttcttattggaggttttacacatctaatatgatacaagacacagagagagaaagagggaacaacccttaaagaattaattgagctgtcttagagaagtggggcatgagcaagaataaaggcttttctttttctggggatggtgcataaaaacaacttgattcctggaagggaaatacagaagaccctctgagaggagatgtcaacagagtttaggcaaataagacttagagatttttcttataagcagagaggcagctggggtctcaggtagacagagaggcaggacaagaagattgtcgatttttatatagaggaatgacattttaaagtgtcatttctatccattttggaaatcttgtaattagtcagggcactgctatttatctcttataatagaaagaaactatattataagtactgtcttataatagaaagaaccgaggctaggacacaggaatcctggattctagtcccagatctgccaaacattggttgaagcagtttagcaagtcattttcactttaaagggtcctcctgagaaaggcaaggaatttttattaggtcagcgtttagggctggattagaagagtttaaatcttttaggcaagaacattcaaatcatgaggaagggaaaaatagtacaaaaatggaaaaaaaagagagaaaaaaaatgtaaggaccaaaatgcagatattatcagagagaagaaaaaggaagaggtggagataaaagaaatgtgaaggaaagataatgtgatttgtatatattttcagagttctgcagtagcattttttcaaccacagaggctaaaagccttgagatctttcctttataatttcaaaggccagcaatgtcattgtcactcttctttgtggtccaaggagaaaaggaattggatttagtcttggctctgtcattcatttctaaggccactctatacaagttgcctttcttctccagacctagtttttttcttattgttaacactgaagatggcaagtgggtgaagtttgagatgtcttgctattctaaagttcaataaagttatgcttttatctggggaaaaggtgtttgccctggcaaaatcctcttcaagccctgtaatccaaaaactgaaagaaccaagcatatcctccttgaaatgtgctaaggtacaaaggtctttgaatcagaggtttgaacattctctctgaatcctgaagtcaaacaaggggccaggaattgttctaggtacgaattattctgggtatgaagtatacagtcataaacaaaatgaaaaaagtcccggatcttgtggaattatttatgccaatagtggacaattggattacgttttgcgatcaatcatcatgattcccttttacaacaaaaggttgtaaaacttttttgcagtattttgtagtatctgtgccaataaaactcattggcctaattcttagcatctctttgtacatctataagtgctgagagggagtgtgaacaaactattacacttatgtaatcacttaaaaggcagagagagttgcccaatgttacatacattctctttgttagaattgcatcgtgagattttcagtattagtggaatggttttagagatagagcattattagtttattgaaaatagatcttaatcctttaaatatataaagaggtttttattatccatacctctcctgagttgagctataagtaggaggaaacaattgaatatcttctggtcaccttaagaagcaaatggcttttaaaggaaattattgatacagactaagtcagtccttgagataggtcaaaataaatcaatgataacggaatctaaatttaaataaaatcatcattgcaatcaaagcaaacatattttattcttcttgaacacctaaaagcaagttaatgttccagtggcaatgaactacagatgttcattgtttttcttctgggtctgtttgcacacagcaaagcctagcctatatttaacttgagctttgtttatttacttagtgcagttgcattcgttagctgaactgtattttgttctttatgtagccacaaaatctcatctatatcatagaagcataatgatgaaagaaatctttgtcagaattttacaacctgtttttgaataatggatattttagaggagatataaaactgtagtaaatcacaaatatcctaacaatgcctatcaaaagtgtggaaattgtattctccagaatctttggtggcttggtatcctacaactggaggaattcaaatccaggaactgaatacaggaacaaaaagtaaaaggaatgagggcgcagggttttaaaataccgtttaaaaacagtgaattttcaaatgtttgtatgctgagatttcttcaacaagaaacatctgctgatatttctcctaaatcacttctaaggcttccagatgttaatcatgaaagttagaggaaccaactccaaatcatcttcatctttgggattctttcttttcactattgaaagatatattattaactgacacataatttatgtcaagaatgaaagagaatcttttgttataaccatccttcatgttaaaaatcatatataactacaaatattaccattaattgtaaataaaactatacctcttctttaggtagctaaccaaaaaagctaacgaaaaacaataaaaatttgctcactgaaataaatttacttctaaaagcagtctcaaatgtaacccatgagcacatccatataatttataaatacaacatccaaccagacagaaaatagaaggaaatagaaaatatatagacttactttgtccaaaaaggaaatttttgttctaatagaattcctaatgaaaggaatgggtagtggctgaatggtgccccgccccgcccccataagatgtgctcacatcctaatccctggagcctattaatatcacttatttgggaaaaagtctttgcttagaagatgtaattaattcaaatatgttgagagaaggatatcatcctggattttccaggtggggcctaaatccaatgataggtatccttataggagacacacagaggtgaagagagacacaaaggagaaggcaatgtgaagaccgaagcagacactggagtgatgtggccagaaaccaagctggcaactgccagaggctgaactaggcacagagcaaactctccccaagccctctgcaggaagtgcagccctgccaacaccttgatttcagacttctggcctctggaacagaagagaataaacttctgctgttttaacttaccaagtttgtgataatttgttacagcagttctcagaaacaaatacagtatgacttcaagcaatcagtgaagctcaacaaatgtaggaatatttcacccaaaggaaagaggactacgaaaattacagttcctcattcaaaatcactcaaaccattttttatgctttggcatctgttgagactccagcagactctaaacccaagtgaaatttaaaacatcaaaatcactcaaactgaagcaatttgaggtgtttagataaggaaagtattaaacagggagatatgtgtatacatattttttttttcaaaaacaagtgcagtcaagctcaaaaatatgattcaacaacataatgaatatgccaacttttgttagtagcttacttgaataaaagtaaatattatttgttgattaacagaataacattattttccaataatttctagactcgacgccagcaacttagtagtttaaaaattgtaaattaataaaaaaagtcaggcctcatcaattaataatttatattgaatgttcatggaagtcatagatactttagatttttagccaaaaaaatagatatcatgatcctggctttctaaaaacatttacactgggatgttgcatacctgaatattattatgtcagtaggtacttcaaaaatagagataagaagactgaattctgggatgttgctgctggacactcttgaatttatatcttagtttggaaatctcaaaatagttcctttttaaaatttcacaattattctacttttccattaaacaaaaatctagttttccttgatgagcaaattctgccaatagtcttatttttgtttaatgtccttatacttttctcttaagtgagtttaaatttgtttatgttaatttcttttaaaaagaaagtgtaggagaggtaaaatctttcattccttctactcttgcgtgtgattggctggttatctgtaacaaaagacagattaacaagacagaaaagaaacagaagcgtattagcatgagtacccagcaatgaataacccagaagaggtgtttaaaacttggatttattttggaaggtggaggtgactgcatcgcttgaagccaggagttcaagaccagcctgggtaacatagaaagaccacaactctacaaaaataaaaataaattgccagacatgtggtatgcacctgcagtcctagctacttgggaggctgaggcaagaagattgcctgagcccaggagtcaaggctgcaatgagttatcttcatgtcactgaggtccagcctgggatctgagagcaagaagctgtctcaaaacaaaacaaaatttaaaaatttgggtttaaataccatcttcagctaaaataaaggaagaaagtatgggggagacaagttataggaaggtggccaggaaaagtacaataaacgagggtaaggtgtgttatgcaaatttaagttcatgccttacccattgataataaaatctcttaattaactcgttcttctcttcctgatacaaaaagggacatgccatgaccaacagagatttccttataaatgtacatttcctgtacaaaagggaagtatgctgtttttggagcttcttctttgtcagctgtttcccaaaataatcagctcaaaataagctttatgccaaagaggcatattttggggtggcacattttggtcccctacaacagagtaccccagggagtattgtggcaccatgttaaatatcctgggcaaaaaaaaagaaatcccgtggcaaatgtagctgccgagatataaaattcagctaaaagagaggatagcaagcattgtatataggttgtaaagacaatagggaagtcagactgctagtttttggtgaaggcactctgggtagtattttgtatttcacttgggaaaggaaaacaagggatagcatcaaggtggcccaatgcgtagttaagactgctgcagcgactaaatctgatatttcaaaaatattataaacaataattctagagcagttatatctcaaatcattcttttatttaaacactttattcaacaattacttttggcttctttcaaatgtacaaagtaccccattatgctatttatccaggacacaaatgaagagaagacacttcttatcctaaagaactctcagccttgtgtggtgtaaaatacaaaaaataataatagcaatatagtatgacaaagtctgtaatgaaaaaatataccaaatgcaatatttgcccgaaggaaagtacattcaactgtaggtcaattgacagagaaacacccttgagccggcttttaaaaattaatgaatagtagttttcaaaataaagaaggaagagaaggaattaccaaataaaggaaaaagcatgtacaaaggcatagagctttaaaacttactagcaagtatgtatgaatatgtatagggatatagaagatatattgctagaaaagtaggcagggatgaagtattgtgtaaagaatttgaactttatcctgttcataatggagaaatgttggacattcttttacatgctgccacattcagatgccagtcaatctcacaatgatgctcagcaaggcaacctggcttggatccaaaatggaacctcaaccctgggatctattgctggcaatgcccgcactagatttttatgtatctctgatagcccccaaccttaaatctgtccttggttctctgattctggactttcatttattttcctattaaaagtggtataaagaatgaaataggatatcagaggtgtgcgaacatggtgaaggaatggaaaagagggtcaatttcaaatgtaatacatttcttaagctggttcatgctttctgatcaggaaagctgaacatttttctcttctcccttgctgaatttgcatctatgtgtgatccaaggataaagataaagaattcaaataaataaataaaaagacttttcacaagctgctatcataggaatgcacaggaaaacaaatttgttgggactcatttttttcaccaataatatatttgttgttgttgatatttcttttttggttttggttttggtttggtttttgctgtttcataggttgccatttccccaattgcagagtcccaaaaaggccaaaggcccctgagccaatctaaaaggcagaccaaattttctgacactgaaatgcaaaacattttatcagtttagtgcatatgagaatggctttaagtaaactcaaaaacatgaaaatcacctttacctgctgtttgaagagacacctgataatatgttaaccttttgtcattggggttatttgttaaaatctaaagagctaagaaacatgattaatggcagagggtttgcattccttgtctcacctaactataacagcttgtgtcaagctgcctgacttataccctctgagagatttactcagctaaataagatagggcagatattagtatttatacacaaaacattcaagcaatgcctatacttcttcacagatgagatgtttttgccctggggtcagaaagttctatcagtactggtacatcataggtgaaaacatccattcagggaacaggaaaatatgaagctacacatgctcatgctcagggccagtgctctggagcttctataagtgtaaggatgtcaactcaacattgtggccatatattaaagaatgtatgtatgcgactgttcatggtgtgctcgggagttcttctgggagaaggcaagttgcaaggcaaaatgtcagtcatattaaaaatgatttccccttacttaactgtagttattcaaacagtatttaatttaatgtgtatctaaagcatttacagggattttttaaaataacacttttctcccaatttcctcctgtttgtttatccattcattaagacaaagtatgttttgaattctaaagaactataattcattacctgaaaccactgaagtctgaaagaatatttaatcctttcttttcatctcccagttcagtctttcagtataagaagttacatgtaaggcatcagcttcaaacaaaatagccaacaaagtgctgtttgcagctgacttttccttgacaaagacagtgacaagagtccaccgtggaagctcacttctacaaataatgcatagttgaaactttagcagttggttctaactgttcaaataaagttggacaacccaagagaaagaaggaggaagagggagggagaaacagagacaaagccaggcaatcagtgacacagagacatagacaaaaatggagagagaatccaaataagtttatgaggtataataagcagacattctgatttggtcaagacaaatttttttgaaaatgtagttggttgtcaacatttagaaatcaagaggtttacgaagaacaatcttgctgtgttcatctgtttgcattgcactaaaggaatacctgaggctgggtaatttataaagaaaataggtttatttgtctcatggttcttcagactgtaccagcagggcaccagcgtctgattctggtgagccctcaggtagcctttacttatgatggaagtcgaaggaggagcaggcatgtcacgaggagaaaggaaacaagagagagggagcaagagagaaaggagaagatgctggactcttttttaacaatcagatcttatagtaactaataaagctagaactcactcttaaccataggagggcaccaagccattcatgaaggatctgcccccactacccaaacacctcccactgggccccacttccaacactggggatcacatttcaacatgagatttggaggggacaaatatccaaactatatcacttgctttatgactcccgttcaaaagcaagatctgataacactgaacctgcagctttgccatacactttaccagctagtactgagtgctccatgattctttagagtagaaatctctccagttaacccactctctttctgagctactttacttgcttatgtttgtctccatggtccctgcaagcatttgagtttgtgatctttgatagaattgtgcctttttgcaacacccaaatgcatacttgccttttaaagatgataaaggatggtacagtctcagtgtacatgctaagacttctcattcccttagctagactgtatgtataatatagtgcatagaactattttatacagcctcagattccttttcaacacagaacaccaggtatacacaggtataatcagagatgacatataaacaatcattactctaaaactctaagacatcagatgggtgctaattcatatctgtctccaccattgcttactaaatgttgccctaacattagaaaaattctaagaagttacaaaaatcattgttaccaagataattacaaatgttataaaatgcaactttgatgttaaaaatcacttagggaggccaggcacggtggctcatgcctgtaatcccatcactttgggagtctgaggcaggtggatcacttgaggtcaggagttcaagattagcctggcccacatggtgaaaccccatctctactaaaaaatacaaaaattagccaagtattgtggtgggcgcctgtaatcccagctgctcgggaggcttaggcaggagaatcacttgaacctgggagttaaaggttgcagtgaactgagatcacaccactgcatgccaacctgggtgacagagtgagaccctgtctcaaattaaaaaaaaataataatagataacttaggagctcattgcttcctccgtttactcaatgacttaacacgttactcaatacctacagtgtactgcaagagatataaagagaatcatgaacacagattccaccctcaagagctacctttcataggaaattaaagatagataatttgaataactgtaaagcaaagctgagagtaataagtgagatagcagaaatgcaaatgaaatgtatggtgatcatgctcaaacttcaatgtgcatcagaatcactttgagaacttgtaaaaatttagctgccctcattgaatctgattcaatggaattggaatatatctcttacatctatatttttaaccaaagatggagaactactattgtgtgggattcaagggtcagaagaggtgactccctgctggagatcagaaaacatcctagaagaaagcatgtgagtcgggccttgtattggagaggctttggctatgtagagttgaaaattctgagaagaaagatgagtggctatatagaagaaaagaaattttaaattcgttttgatttgtagaggcagaaagtgtgtgataccttttctcatccctcataagggtcaaggccaacactcctataatgaaagatggttaacaggaaaaaagcataacaaatgtatataatcaacgttttatgggatgtgggagccttcagaatgaagacttaaaagacacaagaagaaactgtctaattttgtgcttatattccatgaagagtggacagccaggtagaaatgtgattggacacaaatggaatgatctaatagtaatagactgagttgggaaacccagaaaggcttgtctgtgcaggttcttcttgacctctctgtatggccttccttcttcccaggtatagggaaggaccccttctggaatgagagtcttatgacctgctatcagacaagagtagctcaaagaatttctttatggtcagctcctagaagaaaggtggaagaaggctagagtgacatttttagactttacggtttgctttggggaaaaggaattttagtttctatgacttatcttgggaaagaggaattctgatttctatgagtcactcggggaaaatgagtggcaagagacagaagggcaggagaaggtcagagagaccttggttctgaagttgcttctgagaccttccaatgtactgtggctcaaattactcagcatgccaaagtgccatattttggggtattattttctgaaccacaacattcttcttccttccttaacaggaaacttcctgaagtttcacagtccagaaattgggttgctggattgtctcatgagcaatggaaccaatctctcagctccaagaataggccagtccagttaaactgtgaagtctcagctcccaaactgatgttgccggtgggcttactccaaagtgaggctgctatatggtgtgagcagttacatacttaataagaggcatttctatgaaaatgaaagaaaagcaaaagtcaatgtttaggagagactataaattattttctgagtctgggggatagccagttgagaagatttctagatttgagcttgatgcattttctgtgggagtggaggcaggaaggagcaaactgacagatttttctagtttgcagtttgcatcaggtgaacttttctaagcagcccatacaggaataggcacaaagtttgtgtatgtataagctaatctggtgatttttctgaagtccatatcaagtggtcaagcttcagcttgcagggctgcaggaaaagttcagttttaatttcaacaattccacacaagagattgtgagaaaaacctgaaagtattagtttcgagacatatcggaggacactaaaaacattcaggatccagcccagaattcaggtggacaacaaacctgcaaaaacaatgagctagagtctaataatgaattcactctacctttcttctaaaatatcatatttatgttgaaagtcacccccattcctaccaaagataatcaaagtaaaatatatttgtttgcaaaatcagtttagtctcattaaaattggcatgattatttatgtaagtgcagtaaaactagtgatcagccacataggatctttttaagtttgctttgcttgaacgttttataaggaatctcagactggacttttaaaaatatctgaaagctacagaaccaagccaaagattcaatgtcacatttcacctataatatctatatatgtgagaaaatttatttctgctcaaggttcccaaaaacattcaaacgttcctgggcatgtgacaaagggacattgtatatatttatttttacattgtatatatttagttttagggtacatgtgcacaacgtgcaggtttgttacatatgtatacatgtgccatgttggtgtgctgcacccatcaactcatcatttagcattaagtatatctcctaatgctatccctcccccatccccccaccccacaacaggccctggtgtgtgatgttccccttcctgtgtccaagtgttctcattgttcaattcccacctatgagtgagaacatgcagtgtttggttttttgtccttgcaatagtttgctgagaatgatggtttccagcttcatccatgtccctacaaaggacacgaactcatcattttttatggctgcatagtactccgtggtgtatatgtgccacattttcttaatccagtctatcattgttggaaatttgggttggttccaagtctttactattgtgaatagtgccgcaataaacatacgtgtgcatgtgtcttcatagcagcatgatttatattcctttggcatggctgggtcaaatggtatttctagttctagatccccgaggaatcgccatactgttttccacaatagttaaactagtttacagtcccaccaacagtgtaaaagtgttcctatttctccacatcctctccagcacctgttgttacctgacattttaatgattgccattctaactggtatgagacgatatctcattgtggttttgatttgcatttctctgatggccagtgatgatgagcattttttcttgtatctgttggctgcataaatgtcttcttttgagaagtgtctgttcttatccttcactcactttttgatggggttgtttgcttttttcttgtacatttgtttgagttctttgtagattctggatattagccctttgtcagatgagtagattgcagaaattttctcccattctgtaggttgcctgttcactctgatggtagtttcttttgctgtgcagaagctctttagtttaatgagatcccatttgtcaattttggcttttgttgccattgcttttggtgttttagacatgaagtccttgcccatgcctatgtcctgaatggtattgcctaggttttcttctagggtttttatggtttttggtctaacatttaagtcttaatccatcttgaattaatttttgtataaggtgtaaggaagggttccagtttcagctttttacgtatggctagccagttttcccataaccatttgttaaatagggaatcctttccccattgcttgtttttgtcaggtttgtcaaagatcagatagttgtagatgtgtggcattatttctgagggctctgttctgttccattggtctatatctctgtattggtaccagtaccatggtgttttggttactgtagacttgtagcatagtttgaagtcaggtagtgtgatgcctccagctttgttcttttggcttaggattgacttggcaatgcgggctcttttttggttccatatgaaccttaaagtagttttttccaattctgtgaagaaagtcattggtagctagatggggatggcattgaatctataaattaccttgggcagtatggccattttcacgatattgattcttcctatccatgagcatggaatgttcttccatttgtttgtatcctcttttattttgtagagcagtggtttgtagttctccttggagaggtccttcacatcccttgcaaattggattcctaggtattttattctctttgaagcaattgtgaatgggagttcactcatgatttggctctctgtctgttattggtgtataagaatgcttgtgatttttgcacattgattttatatcctgagactttgctgaagttgcttgtcagcttaaggagattatgggctgagatgatggggttttctagatatacaatcatgtcacctgcaaacagggacaatttgacttcctcttttcctaattgaataccctttacttcattctcctgcctgatagccctggccagaacttccaacactatgttgaataggagtggtgagagagggcatccctgtcttgtgccagttttcaaggggaatgcttccagtttttgcccattcagtatgatattggctgtgggtttgtcataaatagctcttattattttcagatacgttccatcaatacctagtttattgagagtttttagcatgaagattgttgaattttatcgaaggccttttctgaatctattgagataatcatgtggtttttgtctttggttctgtttatatgctggattacgtttattgatttgcatatgttgaaccagccttgcatccgagggatgaagcccacttgattatggtggataagctttttgatgtgctgctggattcggtttgccagtattttgttgaggatttttgcatcaatgttcatcagggatattagtctaaaattctctttttttgttgtgtctctgccaggctttggtatcgggatgatgctgacctcataaaatgagttagggaggattcctctttttctattgattgtaatagtttcagaaggaatggtagcagctcctccttgtacctctggtagaattcagctgtgaatccatctgggcctggactgttcagcaatatttgctgttctgcagcctccgctgctgatacccaggcaaacagggtctggtgttgacctccaggaaactccaacagacctgcagctgagggtcctgactgttaaaaggaaaactaacaaacagaagggatatccacaccaaaaccccatctgtacgtcaccatcatcaaagaccaaaagcagataaaaccacaaagatggggaaaaaaacagaagagaaaaactgaaagttctaaaaataagagcaactcttctcctccaaaggaacgcagctcctcaccagcaatggaacatagctggacagagaatgactttgacaagttgagagaagaaggctgcagatgatcaaaattctcagagctaagggaggagtttgaaaccatcggaaagaagttaaaaacattgaaaaaagattagatgaatggctaactagaataaccagtgtagagaagtccttaaatgacctgatggagctgaaaaccatggcacaagaactacgtgacgaatgcacaagcttcagtagctgattcgatcaactggaagaaagggtatcagtgatggaagatcaaatgaatgaaatgaagcgagaagagaagtttagagaaaaaagaataaaaagaaacaaagcctccaagaaatatgggactatgtgaaaagaccaaatctacgtctgattggtgtacctgaaagtgacagggagaatggaaccaagttggaaaacactctgcaggatattatccaggagaacttccccaatctagcaaggcaggtcaacattcagattcaggaaatacagagaatgccacaaagatactccttgagaagagcagctccaagacacataattgtcagattcaccaaagttgacatgaaggaaaaaatgttaagggcagccagagagaaaggtcgggttactcacaaagggaagcccatcagactaacagctgatttctcggcagaaactctacaagccagaagagagtgggtaccaatattcaacattcttaaaggaaagaattttcaacccagaatttcatatccagccaaactaagcttcataagtgaaggagaaataaaatcctttacagacaagcaaatgctgagagattttgtcaccaccaggcctgccctacaagagctcctgaaggaagcactaaacatggaaatgaacaaccggtaccagccactgcaaaaacatgccaaattgtaaagaccatcgatgctgggaagaagttgcatcaactaacgagcaaaataaccacctaacatcttaatgacagtatcaaattcacacataacaatattacccttcagtgtaaatgggctaaatgctccaattaaaagacacagactggcaaattggataaagagtcaagacccatcagtgtgctgtattcaggaaacccatctcgtatggagagacacacataggctcagaataaagggttggaggaagatctaccaagcaaacggaaaacaaaaaaaggcaggggttgcaatcctagtctctgataaaacaggctttaaaccaacaaagatcaaaagagacaaagaagacaaagggacattttttacccacctgtaaagcagtcacgtgaaccatgtgctcaaggtatgagaccagtttctccaaggtgcgctttcttgcctttctgaagtttaccttagtttctcaaagttgtctggtcatattttaaaatatgtcattccagtcaagcatttgtaagttaagaagtgtttccccttgtatcctattacaaagagaatattttcttattgaacttatgtgaataactacattgccataaaaatgagaatactcacaaataatttccaaattttggagatatcagatggggagaagaataaatattttcattctatttaccaatgtatatttgaccaaattgctgtaacaaatagatagcttaaaataaaaacaaaacaaaacagtttctttaaatccagaaaagttaacatttaagtaatcagcaaaatttcaaataagtaatcataaaaagttcttatcagttcatttagacccacgaattaattcttactctgtttgatctcgatgagcacgttcacaaaatcactcagttcatttattagagctctgaaaattctcacccagtccaatggtataatcttaaagttatcagaaacctgtacatttcagagttctttctatcctttctatgaatctaattaaagaaacaagtttggacctcagctgattgacagtgcttttaaataaaaaccaaagtaaaacaataactatttggatgtcaaaaacttaaaatggccgtgattagaaacctgatgagcgaaattgataaaatttggttgtttctgtggcataaaatattttaatgtaataaccaaaattatattagaagtatagacttctaggaattttatacaattttgaaacattcgtattactaccatacctgtaaatataacttaaagaaagtttagcatcacttactgttcaacaatgcttccatatattttaatatatcaaataagcctaattgctttagtgtctctctttgtataaaatatcaagcaattctcctaactcagtctccccagtagctgggatgacaggcacgtgccaccatgcccagctaatttttgtatttctagtagagacagggcttcaccatgctggccaggctggtcttgaactcctgacctcatgatctgcccacctcggcctcccaaagtgctgggattataggcatgagccattgcatccagcctagaaagaatttttatgtttgtttacagacttaaatatatttaccttctgtataccttataaaaacaagatgtcaaaatatatatagtttaaaccaatgactagtaattaatgtgtcagtattttaacttataaataaggcagacatttaataactattacttaatttcactttaaagtttcagaataccaaaaatatttttgaaactatttttaagtagatatcttttataaaacataaatattattgaaaagtttacttacaaacttttattccacttatatcttattgaatttacttattcttaatatttgtgcttgaatgggtcatgaaaacaggctaagcataatctatgtttttcttttgaaaaattgaaaccaatccaaatctgtgttagctagccttgtcttaaccaaggcctctgagactctgaacatagttatggtcctcaattcccacctctagtcatcctgggttttgagcaatcagatggtgcccagtgtgcctgcaaatggcagagcacatctggatctttgacccacataccagggatagagcacaagccaaaggatagaggtcagacagctgtgaagataatgcctggatcaccaggagtcacaactgggccagggaggacaggactatcctgggcttgaccctgcactttggctagcagcccaggtgctatagatacacaaatgtcttcaggctgtaccatggccatctgcccagatcccaaaatccagggcttcatactaaaataagctcacagcaagatgtgtgtaagatttcaggagagcacagcaactgactcccatagcttcagtccaccaataaatcaggcaagtatcaaaaatatcacagaataaattgttaagggtaatttttttcttgctctcatgactaatatataccaagtaattggttctgctcttaggttcgatttatcattttatgaccttaaaacatttaggagacacaacctaaacctgtctaaccagcaatcccaggcaaaaatgtttgtattatatttgatgctgacaattcagaagacattcctacttttatatgaccaaaaaatttaaaattatctttatttaccaaggattatctcatatcacatgaaccaaaagcctttgagttagtttctacttttcctttttgacagaatacttgtggtttttttttttttcagacagtcatctccctgaagtttgtatttccaaaaggtatctatagttctagtgaagataaaagataagcatagttctagagaagacagggtaatagatttacatctcatgggcacagggagattgcaagttcttctaagaaggagtttgaggcatatttgcctattatcagagctcaatcttgtggaggctgtgggctagattttagactggtgatgaaaaagacacaccgtggctgtctgaatgtttccaaagaccacttggaatggtatagggaagtacgcagagggtcctaggataaaattaagaagcttattcaaaataaggggctgaatatcagaaagttatattttggagaccaatttaatcagatacgtggattttcagttttgcttttgtttaatcttgggtctctcaaaatgaagataaaagcataagagtaaaatgccacaagcttaggttgtgtaattgttttagaatatacctcattgcatggacattttattgaagctggtgggtgacctaatgtcaactagcccattctatgcccagcttattctaaaatggaagtcatatttttcagtggtgagcatgctactagctcttaagtgcctgaactgtgtcctccagtcaagactttgactctaagatccctttagctaacttaaccaatgattttccagtttctctctgaccgaatcagatgcccgaggccttcctcacttaagtacacaagaaaaagagacaaagggttaaaacccagacacctataactccaaaaagtggagtctgtatcccctgcagcaataattacttaatgaactgctgtcagttacttttaaaactgcatctcttgtcagtgacttgtcagccactgcaaacccaaaggtcaagtgccttcacactgcagtaactaacccttggtatcctcaaagccaaagagattaggcaatgcaaaacacagcagagcttcagacctgagagaaacttattcatgactctcagggctacatgcagaagacagaggcctcccaaagggggtcaatagtgcctttcctggattcctcaagaggttttagtgtcacaggatgtctccttcaggtcccttcatgtggctgccagaacgctgatgcttcctattagtaatcttgtatctactcttcaccaaatggaggagaaagggacttgaaggggaacatatcaaggatttaaggaaactggacagaaaatcaaaggtgacaaaaggcagaaggaggaacagaagtaaatggaaggaacagttcttagaggagctaatttgaggagattttaagtttctcaaaaaggtcaatgaagtgccctgttaacctcatcaaaaatcatggcaacaagaaaagaagctgacagagggactgaacatatagatagcagggatttgaaaaaatgggttttagttgactaagaagttctcacaggagatgcaggatcaaatagacagaagagagaggcctacaaaaatttatagtctgaagatcagctttccattaagtcagctttggaccatggagctcttaaaaaaaaattattgcaaatctcttgtcagatttcaaccaacaaaacagcaaatattcctggctttgggggaagggaagatatttgcatattggtggtctagggtaattactacccaaacttttctttcttttttaagttcagggcacatgtcggttttttaaatactcagtttttgagataaggatagttgttgggtggtggtggtgttgttgtaaagatagggtctcactctgtcacccaggctagagtacagtggcatgatcatagctaactgcagccttaaattcctgggctccagtgatcctcctgccttggcctcccaaagtactgggattacaagtgtgtgccatcatgcccaggtaaggttagttgtttttaattcctcaataattaatttgcagcctgaatgctattgaggggctcacccatctatccaattgtattatcatttgtttgctccttcctatcaggaatcaggtttccaactaagaaggaaatcaaaagatttctgtgctctatatttagaattgttagtgtttgtgatgttttaataaattgtttctttttccttctgagtatacagttccattttagcttagtagagaaagtcaaacaaataagaaccaaagttatatctgacaagtaattccagacaaaaactaataagccttttgaggcttaactaaggtttccaaagaggaagcaaaaaggtgcagccttttcaagatccagagcactccaaatgacagccagagttagaaaagcttagacaacacattgagagctggcggtagtcaatttgcttagccacagtggggcttaacacacatttctctctggccattttctttggggtcccaaccttatggttggctgcctgcacacaaagcccaaataatcaaaatgccccaatagacggagtgttaaaaatgtgacaaatgggaaaacaaaggctgttcatggaaggggaaggaccacaaatgaattgacacccaaaaccaaaagtcataattcaaatgaattcaaacaaataattcattctttagctaaaggaatgtactaaggaaatggagctagatttagaaaaagggaattttaaatctggggaccagaaatgcaaaagatctggagtgtcagggactcccaggaagttgagagagtataagagggcagagaggagaatttatgggtggatttgaattttaactttgtttctaatctaatttctgctttttaatcttattaaaggagtatctaaggctagcttttatactcctttgtgtccatttttaaatttgattttcccataggtatcagaaatatagttgtttgggatgagagctctctcaaataattttgttccttatttgtgtatttatttatttattttgggatggggttttgttcttgttgcccaggctggagtgcaatggcacagtctcggctcactgcagcctccacctcctggattcaagcaattctcctgcctcagcctcctgggtagctggggttacaggtgcccagctacttttttgtatttttggtagaggcagggtttcaccatgttggccaggctggtcttgaactcctgacctcaggtgatccacctgcctcagcctcccaaagtgctgggattacaggcatgagacaccgcacctggccaattttgctctttttaaatataaccccttattgtttagaattgactcagactaataagttcatggagacatgcaaggtaactttccatgtttagaatatcatggccaaacaacaacaacaaaaaaaaagtcaccagagttactgaatctaagagcaaatttatacaaatgattttttcatgttaatctgaatttggaaaggaaggaacaaacaaatttttactttacattcttgacaagattctggaggcagaaatctgggacagctgacattgataaaaattctgaccttttttatctggctttttgttggttgtctgagaataacaccagtatgttccaaagtgagtcaggtgtctcaggtgtcccttattggacaccagaaacagtaggggcaaaaatggggtgataccttttctcacccctcataaggctgactcccctataacaaaagacaagaggagaagaacataacatgagagccttcagaatgaaggctgaaagacacaaagaaaaactgtccactttatgcttacattccatgaagagtggacagccatgtaggagtgcaattggacaaagggtaataatccagaaagcccccatcagtggaaactcttcttggcctctgatatggtgtagctgtgtccccacccaaatctcatcttgaatcgtagttcccataatccacatttgtcatgggagggaccaagtgggaagtaattgaatcatggagctgattacccccatgttgttctcatgacagtagtgactgggtttgcataagatatgatggttttataaggggcttttcccccattgcttggcactcattctgtctcccgccaccctgagaagtggtgacttctgccatgattataagtttcctgaggcctccccagccatgtggaactgtgagtcaattaaacctcttttctttataaattacccagtctcaggtatttcttcatagcatttgaaaatgaactaatacaataaattggtactgaggtagtggggcattgctgtaaagatacgcaaaaatgtgagagcaactttggaaatgggtaacagtcagaggttggaacaatttgaagggctcagaagaagaaaggaagatgtaggaaagtctggaacttcctagagacttgttgaatggcttttagcgaaatgctgatagtggtatggacaatgaagtccaggctgaggtggtctcagatggagatgaggaactttttgggaactgaataaaggtgattcttgctatcctttagcaaagagactgaaggcattttgcccctgtcctttacatctgtggaactttgaacttgagagagttgatttagggtatctggcagaagaaatttctaagtgacaaagtgttcaagagaaagcaaagcataaaagtttggaaaatttgcagccgggtgatgtcatagaaaagaagaaaacaattttctggggagaaattcaagcatgcagcagaaatttgcataagtatgaggaaccaaatgttaatcaccaagacaatggggaaaatgtctccagggcatgttaaagaccttcacagcagtccctgtccacagacctggaagcctaggaggaaaaaatggtttcatgggctgggcccagggcccgcccactctatgcatcctcaggacatggtgccctgtgccccagttgcttcagctccagctgtagctaaaaggggccaaggtatagcatgggacatggcttcagatgatgcaagtcccaagccttgcagcttacctgtagtgttgggcctgcaggtgcacagaagttaagaatagagtttggggaacctccacctagatttcagatcatgtatggaaatgcctggatgtccaggcagaagtttgctgcaggggctgagccctcatggagaacctctgctagggcagtgcagaagggaaatgtggggttggagcccccacacagagtccccaccggggcactacctagtggagctttgaaaaaaagggccatcatcctccagaccccaggatgctagatccactgacagcttgcattatgtacctggaaaagctgtagacattcaatgccagcccataaaagcagccaggagagtgactataccctacaaagccacaggggcagaactacacaaggccgtgggagcccacgtcatgcatcagcatgaactggatgtgagacatggcgttaaggagatcattttggaactttaaggtttaatgacttccctattggatttcagacttgcatggggcctatagcccctttttttggtctatttctcccatttggaatgggtgtatttacccaatgcatgtaccctaattgtatataggaagtaactaacttgcttttgattttacaggctaataggcagaagagacttgccttatctcagatgagactttgaacttggacttttgggttaatgctggaatgagctaacactttggaggactgttgggaaggcatgattgtgttttgaaatgtaagaacatgagattagggagtggcccggggcagaatgatatggtttggctcggtgtcaccacccaaatctcatcttgaattgtagttcccataatttccacatgttgtggaagggacctgttgggaggtaattgaatcttgggggcagttacccccatattgttctcatgatagtgagatctcacgaaatctgatggtttggtaagaagattttccccgtttgcttggcactcattctctcccctgccaccctcagaagaggtgccttctgccatgactgtgagtttcctgaggcctcgccagctttgtggaactgggagtcaattaaacctcttttctttataaattacccagtctctggtatttcttcatagcagcatgggaacaaactaatacagcctctgtgcatcattccttattcccagggactgagtagggccccttctggtataagggtcttaagagctattattggacaaggttgggttagagaatttccttacacccatctcctatatagaagaacaaggagggttagagtagtatttttctaggtttatagctggatttgtggaaaaggggttctagtttttatgactggccttgaggaagagaaattttggtttctgtgacttgcttcaagaagaatgtcagaaggtcagagggatcgtgggtctgaggctacttctgaggctttccaatgtcctttagttcaaagtactaaacatgtcatagtgccatactttggagtattgtttcatgagccctagcagattgatctaattagattaataataaataaatatataaaactaaacaaaagacagtgtgaaaacagtcaaacttataaaaaatgcaattccttggcttgcatttctattatttatattgattcaaaaagaactggtatttttattacttccagaataaatttcataacagtgaaatgtttatattttaccatgcaatgatcttttaacaattgatggaatcgtgtacttgtaagcttcattattgtgaattgcttataccttaataaaattgaattcaatttacatattagctaattgaatatgactagctgaaatggaaatgttttataatgatggtgcatagcaacaacagattgatagttctttagtactttagtattccagttctcaatagttctcacagcatgtaataatgtagtgcagggacaattgttgattttccacaagctgatccttagtagttgatcttatgcaactcttctaaacctcctttcagtagtttaaaggtaatgatgggcataatgcactacaagtgctaaagaatttagttttgtcaactcagcatactaaaggatctcaacttatttattctacacagcaacttttgttcccctgcacaataacatacaagtgaatagtgacactgtagggatagtaccatgttttaagaagtgtgaaatagaatcataaagagtgtgaaattacaaaaagtggagatgcacctttggacagtcccattgtattctatgccaccagtttcctggatggagagtgacagaaacagagatcaaacaaaagagaagaaatgcctgattatcagaaaaaggaagtatttaacattagggaaaatacgtaatgtaaatgatgagttgacgggtgcagcaaaccaacatggcacatgtatacctatgtaacaaacctgtacgttgtgcacatgtaccctataacttaaagtataattaaaaaaaaagaaaaaggaagcatttcttagatattcatttaaatctcaagtgtgttactgttctatatacttaatagagattacaagtaacaaaaatggcattcaggaatagcaaaacaaagctgactttggcatatacctaattatatatagtgcagagagtattatttgttggaaaattaggtagtttcaaaaatgctgggtagcatttagatagtcttactactttaatggtactcaattgtccaatttgggtatcaacacaaaatgaaactttgttaaaccctttaattcttccatttattatatcagttccaggatttccacttgtaaaattcctgattatatctgaaatctacaacacagtcaataatatactctaattacttatttgcaagagagtattgtatttctaatttggcttttccagccaaagagttaagaatgccaatttagataaatttaattcccagtcattaaaatgttttcttgggtacaaaggatggaattctgtgtctgttttttaagtctaactaatgaacaactgtactgagactatcttttaaaaactaattttctcaccaatagtagcagacagtgcagatataagcctgttaccaaaacaacatgaaaatcgggcattttaactctgttcctaacttgttagaacacccattcccccctccccccgacagacatacacagataagaatcaaggagataagaactttcaagtttcagctcacttggtagattaagcaagtgtgagattggctatttgaagtattcacgttctggactgcacactataaagcgataaaaatctgtttttcttagcttccagaattaattgtttggcagtgggttgtttttaattaggttatccaacaaaagatagtaatctcaggcaaaatctctcaggttagtcttttttaaaagaaaagatacagatttatcctcttattttcagccaattgattatagcatctcttagtctggagaaacactgtttctctatatgcgcaacactcctgacaacaactgtgtggagtttttccgtaccaagcaattctccaactctccaccaaacagctgggtgtcctagcattcaatccaattctgacatcatctaaatgtagttagtttgagagtgtaccaattagaaggcttagtatcacaacactgaacccaatccagatgtcagttgcaagcctgggcctcccatacttctgatggactagctataaattggggatttctacaaccctattctcaggtgtgataatgtgctaaaatggctcacagatctcagggaaacactgtacttatatttactcaggaacagccagatggaagagatgaatggggcatatcctacctgggtacgccaccctcccagcattttgatatgttcaccagcctggaagctcgtcaaattttgttgaagagattttagttagcctaatcttttctcctacctacctcctctttagaatcattctaatcattcagtctttctgtcgaaccgccccattctgaagttatctaggcctgcacccacccacccccattgtctcattagcataaactcaagtgtgatcaaaagatttgcttatgaataacaaaatacactcctatcagtcgggaacagaggacaaagaccaaatacactgtttattataccatattgagttaatttaacatgaaaactagatgaatctattgctattacttaagtaataattagattttcattacaagataaatcttaataaatgaaaataaatctcaacaatgaatctagtattatctagtcactccctattctttctctattttaatttaaaaagtgtataatttctgtatttaatgtaactatcagtcttcctaaccaaatatgaagtatcagtgttcacaatgataaatttgttttctcatatctcatcatgcctgctcttcaattctatagccttgttggcacgtgtagtttctcttcccttgaaaagagtcagttaagacaatactagttccacaaatgtatttttttgtcagcccagctttgtctctcctaagatagtcttatttgattttggggagttgtttcattccatcatgtataattttggtctgagagtaaacccgagtatttgtcagccatttgaatagtcaaaggagccataagttttctctcaacatttttgtacagtctagagaggacacatgatctaagcttggccaattggatgcttttttgtggttttgagtcttgggtaagggcgcaatgaaggattacagattattcatcacacaggaacaggccggccagactttcttctatgaggcattgctgttcttcctggccacagctcacatggtcttcctatctgtcttaattctctgggccccttgtagccttccaataatttttttttacttaactaaagactcttgtttgcaatccaaatcttatcagttacaggactattactctgctttttccaatgtaagtaaatataacttttaagaatagaaggataatacctgtaagttgaatgttatcaattttttaaaatgtctatatttagaccaagaatatagcaataaaatgtgatatcattctactggaaaaattaggtgagatatgaatgttacagggaaacaaaaaggtcaacacatacaaacttttcacttctagccttaatgacccacattaaaattatttctaaaagaaagaaagtatatatggttaaatgtaagtcttacctttatagataagcctttgtgctctccctgtaaaaacatttgtggtaatgtacatacataaactatctacacttcacatactttttaagtactgtttgtggagcctgcttattagaattctgccttttcaatttgtaatgtaggagtaagtaactataagaaacaaaaaacgaaggcaagacaagggaaaaggaaaagaaattaatagtttatgtgtgcttcttaaactaggctttacgctaggcatttgaaatacataatgacgtttaatctccatagtaactctatgacattgtaagatttcattcattttacaaatgcaggaacagaaacagtgatcaagtaagttttttcaagttcatagaactagcaaggcatcaaaatgagatttaaacctgtttaccctaaagtccatgtatttattgccatatgagaaaaaaaagatacagtagtagattaattatatatatgatcacacacattcagatatgtatatatactgtatatatcaacatatatcaacatgcatatatgtgtgcatattattgaactattgatttgcaaatacacatgcacatatgtgtgcacatatgtgtatttgcaatctaataattcaataagatgtatttataaaaagaatgagtttaaattttttcaacatttcttattccatctgggagtttctacagtaacacattttgagagaaagctgaccacatcctatttaattgaattcaattcttatgaatattcctgcatgaagaatgaatgtcttcattgaagcacaggggttataagagtagcaattatttaatataagcaagtgataccttagaaatacaggcatatatatgtaaaatgtaattcatctatatttgtacattttattgtatgggctactgtgcccagcaatttcagctaacatgaccaactgacatgatatagacagcctgcattctcccactacagaaacagaaatgcttggaaaaatagggcattacttatctatctatcactgaataacaaattaccaccaaaatattatctcatcatttctgtgggccaggaatttaagaacagcttagctggatggttctggctctgggtccctcattaggctgcaatcaagtttcagcttgggctacagtcatctaaagggttggaaagggctggaggatccatttccaagatggctcattcacatggctatgggcaggatgtgtccgttcttcactgcctgtgggctggaggcctgagtttcctaccatgtgggctgcttattggtgatctagcttcccccagataagtaattcaagaaggaaagaactacaaagaagttgtgatatctttttatggcctgttctccaagtcatacatgattacttgagctttattctaatcattagaagcaagtacctaagttcagcccatactcaagcctttgtctcttatagggaggagtgtcagagagtgtcaaagagattgtggacataatgtttttaagccacagttatcacaaaaagtaaaatgccaaaacagtaggaggaagccagggccagatagctgatgggatttcagacctggagatattttctccaggctaggggctgaggttgtaatttcacattagaggagaaaaataaagaatctcggtcttctcccataccgtgcaaataatactactaactccactacatgaaactaggatcttagaagggttgtgatgtgtatgaaaaaagaaatggaaaaaaattactcaagggcttcaccagtatgtaaggaaacttaacatatgaccgtgattgtacttcggggatggtagaaagggggatgtctttgatcaagttacttcacctcatttgtaagcctcttttcctgtaaaattttgatattactttcttaacctatttcaccaaagtattataagagtaaacagaaattatgataatgcactttagaaaaaaagccatataaatatgaaatagaagtatctaacaatatctatcatctttttggttgtgaattaaagtcctcctttagtatgttggaaacaaaatttagatatatttattatctggtgtagcccttaatgcaaattagtcaatgaccatatcttcatatgattgtgaaatatgtctttaattcactcaacatttgttaagtacctattatatgatatccatgttaagtgaaagatacaatgataaccagaatagttagagaggttaccttcatgcagcttatagtttaaatgttctgcatagcaaccctgtgagatagtcaaagtacttatctcctaagataaggaaactgtggctcattccaactgtttacccaagatccaagatctcattactccactgtagataaaagacaaaaccttgaaacaatacaatgttccttcctctttcccacatttttatatttttaacctccatttttattcaattacccctctccctccacttgtcaccttctgcccatacccttcactacccactaaattccctgggctgagttttatcatcctgactgatttggtatcatcaataataataacagtaaggaaaaagtgagtcttctgagatagatagggattaagatagctttattaaataggttgtaagtaaaagtaaaatttgctttaatcccctgatattagatttttcatccaaataatagctttgatctgaggccagcaagcatgtcccaccagtcttgccctttgcacagagaaacagaccactgcctactagatttccctgaaggcatctttgattcccaaagtaaagctacctagccatctaaaatgaccactattcttcccccactttacctatctcatataaagcagccttttaagtgcaaataatatctggtagaggtaacgtcaattcatttttagatactgataaatttgacccaattgatttattattttcttatgtgcaataggatcctagaattccagaagagggaaccataaattttcctcagtaacaggctcctgaaaacaaaaaatatattaggagttcctgctgctgtctgggcttgtgaagaagaggaggtattcatactctttaacatggcaagtctgaatgagatgcatcaatatgatactatattatgaccttcctaaataccctaaagacactattcaaactgtctagttctttccccttctcctcttcttgtgttctgtattttatgttctattgggcaaaattctctgttgcttttcctccaggctgacttctttttccatcttcctgttgtgaaactgttcaaaggccagagtctagaattcttaaatgcgctatcctttacatgaaaaagattatgtctcaaggtaagtttctcagctagtgatgtctcaatagggctttgtaggaagcacccacgtttagttcaagacactgatagcattgggtgatgtgtgaggaagtgggttctgcatagatagatttgtagcacaaggaatttggcataaagcaaccagcatgagttgtttttctccgaggtgtgaggaatttttcatcaatcatgttcatcttcttatatagtgttccttgtaagaggtgctctatatttcttacgatggttggtcttcgataaagatgttaaggcttgttcagtgtgtcttattgaaactgttcaggtaatttctgtctggttgtcacctatgacatatttacctaatgctcatatgttaatggatcagatgagctaatcatagacataatttaaaaaaatttttttctctagaaaccatttgcaatgattctggaaagttccatcttagttcagccttccccttctgctgtctgataatattttaataaaactatgtactttttatcaagaagtttcattatattaatcataactctttgtagaaaaaagacaaaacaggaacaattattccctatggatttgagttgccatagatgccagtatacgtgtataaatgagtttaaccaattcactggatcaagttagtattcaccaaagtaacaggaagtcaatcaaattatcaaactgattttttggggaaaaggtctttgagcaatttcagttcatagacaacatgtagacatcagcaattagcaaatgtatcaatttgaatcccatgtatctttttattgtgaaagatgattaactcttagcttaagacatatcttacagagtccagaaaactattatgttataaaacaatgatgtactttcttcagaaaagatagtaaagcagttagcacatacttagaaaatttaagtgtgatatcatttaaaagtcattaatggatgaaataaactaggtaagccagtttaagttgttgtaagtcataaagatataaaaatataaccataattaatacgtttaccttaatcattaataatgactttagtttaaattttccaattttcactgtagactattggattatctaaactagagcagagatattttattatcccccattttcagcacttctttcaaagttataaatgaaagccatacttaaatttcaataatggagccaaatcagaggcagtcttagaaagaacatgccaaataagaataactgtgttgaaaatgaagtttacgcaatgagaaccacctatttaaaattgaaaattttcctgaaatggcctttccctttctccctccccatacacataatatccagcaaacacaatacatttttatctgaaacttatctaaaataaacttcactaaagcaggagtcatgtgcctaggcttcttactcttgagtctatcaccagttctgtgtgggatctgagggagtcactgactgtagctgcctgtctctctctcaacttcctcatttgtaagaatcttgaggaaatctccaatactccttctaaagttaatctttgagtagtctttatagaatgttctggccttgtacaaaaccaacatgatcttctaatcagatgaaagtaagcagattagtagaaatacatttgttatattcaatacttagttctatatcctttttatacataaacatggtcttctgaattcaaaatattcatttcagccatgcaagcataattccaggtgtataggaaaaaggactggacatttagggaataaaaatggaaagctaatgaatatgtaatgtactcagccgaactcttcaccagagacatatcatttataatcctcagttcttcagttaatactcaattataattaaaccacgtgcatttgatttgcattgtcaatgcactttgcctgataatgtgttggttttatcctgtttttctcaagtaccaagttttttaataataccaatttgctctagtggaatgatgtctactttcatagagagatgttctttgatagtaacagaatccataaaatacttttaaaaaaaataatgaaggcatttgttaggcataggctgtttcatcagaatatacctagtttattttacaatggtaaaattgccaagacttagagagcattctgattgaatcatgaatattccaaaggggtagattaatctgtgtgaactagagaactctgctgaaactgctgtttaacattctaaagtgtggaattcatcttcttacagcacaaaagagcttcctataataaagattttttataacagcaataaggcagctcagtggggtgtggttttcatgaaataatcacacttctgagagattagacattgtgccttatgctgtacaatcccctcaagtattatgatgacatgttgatgccacctcccccacacagctctattcctcagttactcagtgggcccttccaaaaatatctgcccacttagagctatattataaacaagctggggatctataatactgtattagtgctttatcacatcacagttttctttatgtttctcataagtagaaattcttatacctttccattgtagttcagatttaaaacacacaaaccaaaaatatagttacagtaagaaaaagtcatagtttagtaatatggactgtatacttgttgcagtttagctaataattatgcaagtcatccattattaatctgcattgttttttaaatgaggcatccattaagagttctggcataaatttgaatattgtactgtaaaattaaccaagaatatatgttaacattaaaatatattccttcaaattttcaaaaattattacatggggaatatgtcacttttattcgcagttcacttcaaactgtaaacaacatctattgatattttcagtgatctcctaatgctaatagtttgaagactgataatagggtgtatctgttgtttctcattggcaaagataattgtattcttttgcatatttcatctgttttcgtgtttagacagaatattaagaaaatatatggtagggacctataaatgccagttataagtagggtttttgatttattaagcacttttctagaactatgccaaaatattaagctttgtgggcataactctacatttttgacattatggaataaattttttaaagttgctttgaaatgctacataattgaaaattccattataagtaatgtcgcactccctgtgttctagaaaaatatgcctagcttaaagtgctatttatttcaaaaataatgccatttttaaacacagaactcttgtaaaagatgaatagcatgttttaagctaatggtacaattaaccaaagtttcagtttatgttaaggcctggaagttgtttgctaaactttctgggcaaggaatctagtggtctatcacaggctatagtaacaaaaggtcaagctattaaattaaattaatagattacttttgcctacaataagaaaaataatactaataaactttgtaagtttttcctaagaatattaatattgttacagtggatacatttggcagttctagttgtggaagaaggttccaacacaatggacaaaattaacccttgcttttattatgaattttataacattgattgatttaaactttaatgtctataaagatcacttcaggattttgttaaaatgcagattgtgactcagtaggtctagggtggggtttcagagtctatatttctaataagctctgaagtgatgactgtatttcttgtttaggtacagcgtttgtgcaacatcatgccgtaatcttgtatcattcctttgtcttcttctgctacacgtgacagattgctaacaggttttggttgttgctatggacagaattctggtcctccaaagtgtatatgctagaaccccaacacccaatgtaactgtatttggagatagggcctttgaggagatagttcagtttaaataaggtcataagagtatagttacagattggggtccttatgaaaatatacactagagaggtcactctctgtctctgccatggagcacacaaggagaggatactgtctgcgagccagaaagagagccctctccagagatctaatcagccagcaccttgatctcaggcttcccagcctccagacatgtgaggtaatatatttctgtcctttaagccattcagtctatgatattatgttgtggcagcccaagccaactaatacagatgttattgttttgtcttttgctttctttcctctcatattttacctgaggaagtaaagttaaccaaattaggaagccagtgtaaccagaagcaagttttctcctgttgctccgaattctatcctgatcatgtcatgcatcatcattgattggctgagcaagaaagatgatgcttttctcactttgccaatgaatgcatttaattttccttagttactacattattcctgttaacaaggcaaattgttgaggcaatctcttaaagccttagagtagaaattccaggccgatacttgaaaaaagttgtacctggttgatttcatggcctcagcctctgccatgtcttcacacccgatatttcaaccagggagagggacagaactgaaggcagttgtcatggctcttttacctctcagaatatggaggtgggcatcctggctgctgccaatcagttagcctccccctactttcctactcatacaccaggttatcaacctgcaagtgtcagcaaaataaattgtagtacctcttcagtaaaagctggagggatctattatattgcatgactataaggattatcttttgaattataaaaatacaaaatggccgtggggacaaactgattttgtgaaatagaggtttgcctaagttacccacattcctacatatagtcaaattacattttacagtatatgtcaaatgtagttgactgtgctgtaggaatactaactacatcaatatttgaattcaaccccccgaaatgcaaatgaatggatactaatgtctattcaaagcacttcatttgcattatggaaagatgtgctattatatcatggagcatccccttgctttttaaaatccacctatttttagaaagtttcagaaacagttttacaaagaatatatccccaatgcacaaaggaggcaaattaaaacaaggttatcaagaccaaatatgtttgggctaacttagttagtgtattggccttcatttggtaagatttatcagtaatgctttctgcctctaaactcaaaaaaacttgtcattttgcaatatgaagccttctagatagtgcttttaaaaaaaaagcaaaagcaagtttattaagaaagtaaagaatggttaccccataggcagagcactaaaagatagtgcttttagtaacatgtacaataattatttgaatgtgtccatttattataatactctaaaaatgtcacaggcatgagtttaggtagtccttcaatgatttattttcatccaaatatttaatttgagttacctaaaggaaaaggttcacagcattttctcccatttttctctaagtaaacttctctaagtaaacagttaagtccttcaagttctaagcttttcaagagtattttatgataccgtttatttcaatatgagtttgtatatcactgtgaaaagtccgtatcaaatggatgaaaaaaactacagaatgcaaattgtattgagctaatgaagaacaaaaagcttccctttaccatagtcccaatgttttgctgaaattggggcagatgcccatttcctgcagagaattgcaaaactgggaacatgcagctgccagattttcactgtccgccatgtgtagaactctcagggtggaggttagaattctgatccaccttctgccttcactccacagaaaatgtttccaaaggtttacttgtgctcaatgtctaatccttccaccagagaatcaagtttggtgttgatacagggattgctcttgatacattcgaagagttttcctttgcttgattgtgtgtttcaatgtaaacagggttattctatagtgaaaaaatatgtattattgggaaagaatttaaaatgtatctctatgactttaaatacaaactgagcagctgctttaaactttaaggaatttggcttttagccaaatgtttaaggacatgtctttggtattagattccttgctataatgtttttttttttaatttaataagcacagaagatgcattatcattatggaataaatcatctgtgaaatttgatattttgaacaaaacaatccctgaaatataatcctattttttaaccagagtagtctctgaaaacaaaatcaattgtactatgtcaagctgtacatctagagaccttgtatttctaaaaatctttgcagacagtgtttttaaatctgtaaaagtttgtaaatgcctcatatcagcccagaaaattttaacaattctatttttccaatatttaaatatctgtacattgaaatctaaaaaggattttcacataagcttatgcatatgtaataatgtaatatattttaattggcacacacgatgtgaaaagagactttgtttagtggaaaaattgtgtaccaaagtaccccttcctttccttgtagtatattcattgatgcttatgctttttattttgctacttaacagctggactacacaaatgagacatagttaaaaggtctatttggcttcttatatttaaggaataccaagacaatgccccagggaggttgcagtgttgcctctggagaatgtggggtgtgattgtctggtagtgttttttacctcgtcagctgtgagggccgggcattcatgacagtggagaatgctgctctttgcttgtattctcatactagaagaataatgctgataacactaccacacacaaaagtcccagatttagttgcagtgctcaccagtcttacctgtcccattatatatgttacagtcccagatttagttacagtgctcaccagtcttacctgtcctattatatatgttaccaaaggacttagctttcatttgtctcacttagaaggcttccacagaggagtaaaaacaccagtgtcctttctgtacctaaaattgtcagacctatttatattggaaaggcatttcattttatttttcttgtcagaatgagactgaaatcttttatgttactgagaaaaagaggtgcaggattaaactccgtaaaattttcatctaatggccactagtcttgttttaacattgaaatggcttttaaaaatgaagtgtgacagggagaaagaaggtaaagtgagcatcaagcaacattcaaggcctatctaatccggatctatgagttgcataggcttgattagaaaaatataaagagaaaaaattgaaaccaaaacaagacagaagtttgacattgtgaggagaatattgaggatagccagtatggttagaaaacgaaagaagcaattcccaaagatgctttattttctttattcagtccaatgcaacattaattaatttgctgctgtgttccaagcctgaagatcaggtgttccttaaacagatagttatatgttctattttcggaccccagagggctcagaaacaaacagagtgaacatgaacggcataactgtcatacaatggaaaacatgctttgttagcaacatgaagacagaactattgcacgccatagataaaaataaatttatgtattaattatgtaagagagcaggggaccaagaaggcttcaaaaaggaagccgcttctgaaatactttatcagaaaacatatggacaagataatactggacaaatgcaaagaggaatttggaatgctgggcgggattttggtggagatgaggttttaaagagtagaaatggatccaaggaaggttatgtcaagactgcctggggctaagttttgaaaagccttcaatataaaaaggaagtctggactttattctggcaggcccttagaaaccagagaaactttttaaggaagggaataatatgctcaagtttgtgtcttaggaagatagctgtgtagatggagtcctgaatggataaaggatccgacatagccaatatactcccagatgagaggatgctggttgtgctaaggtaattgctgtgtcaaagaagaggacataatgaatttgagtgttgctcaggtttattccaaggaacactagttcaaagtgatatgccttaaaaagagatttggtaaagtaacaactctgggaaatattgaatcttattttatgtatttgtagcccatataaaacacttatgaggtgccacgcaggcttcttaagtaccctacaaatactcatttaattcttatacaagacccttataaagtaggttctattatcatccacattttacagatgagaaacatcttgcctatccaggatccccaacattaggaagagacagagttgcaaagggaacaagtggcctttaaactgccagccctacagcctcccagtggaatctctttggctaaaggggcccttagttctcatttgcatataagttgtctgactagtcttaaggattaaaaaaaatgttaacactggcatttcttaaacatattggttctttgaatttttttgccctctactctttaaaatcccgcagaactaatgccctctgaagcccaatgtgggaaataatagaaaaaaaatagaaataattcagaagaaaaaacaataaatgttggtaaccaaaagtcatttaactgttccattttaaattattttaaggttatttatttttatattaacacagttatagattttacaaagaagtattttgttatatcaatgtctataataaccctaatattatttcaataaagaggagagggttgtttcattctaaaataaaaatcagaagaaaaagaaagataaggcacaaaacagaggaatgataccaagcttggtctttctagacccaagctgaagacttataagaacacctacaatttccagctttaacttctcccagtcctgtttttattattctcagctgccttgagctttcactctaacttcactctgaacctggaagatgacggctgtgtagttaatcaggcttagtctttgaggctggagagggaggagaaagaagaaagggcatatagaagggtggctcaacataggatttgaagtttaaaattcctaggctcaggattacatattttatcccatttcttttctgtaaccctgcgaagcaagtagtataattagctccatatcatagaggagaaaactgaggtagagagaggtaagtggctaggatttgggagctggtgactatctagcattggcatccttattttaataggtaatatttgttgtgtctatattccaggcattgtacagtactgagtaaaatgtatgtcaaggtacatacaaaagcatatgcaatttttacagctctgtgaggtagtccctattataatccccatttaaaaggtgactaaactgagacttagaaggttggtaactataccagtgtcacatagctagtaaggaatggaatcaaaattccaatcaggcaggctgacactagattgtgtgttctgaaccacacagcaagtactgccaatgtttatacaggtgacactcaacacagaggagaaggtgtcacaaaatggtttatggtatttcttgcccctcatctagcagagtgtacagtacttgtccatttactaatctgtctcctccaccagactgttgactccatcagggtaaatactgtactattttactgttgtggtgttctgactccctagcacaattcttgatacatagaggattttatgaatcattctacagtgaatcaatgaatcaatgtacgatggaatgaagaaagtcatgaacagctacatgtgttacttgtaaagcagggtttaatccagttgtattagattaacctcctgggttgtacagccccctgaggagctgctcccttcgtcccaactccacctcactgtgcctcagctccacaatctggtgcccagttcctgcagcagtaggggaaattcctgccaaaacagaggcctcagtctttcccttttctccccccattctgcttagcccatggagcagtggaaatttccacccattgtaatccttatattttgtaatatattttcatataaattatcacatttgatttttatagcaattctgtgtggtaggcagggtatttttattttctctccagaactcagggaagaaattttcagtaagtggctgagtggcaaatccagttctcttgtagctccataactttcccggtgaacaagtacaagtatgtaactgctccattgcataacctgggttaaactactctcaggcgtgacttctgcaactgagtcaattaagagacacatgaaagcaggctttaaacatttcccaccagcagatgacttctaaaggaagtttcttcacaaatgcacatggaccaattttgctaggttgtagtttgaacttgttaacacacaaatgaatcatcaaactgatcctgcactggaactattgttccaagaaagtaggccaaacagtagcactgcatttgaacaaatatataagtagtgtgtgttcaagaggcagcagaatgtcatgattaagagcatagactctgaacccagaagggctcgttcaaatactagttcttccattgtacaactgtgttatctcgattacgttacttaacatctctgggctttaattccttcatctgttaaaagtaatactgttagtacatatcacacaggcttgctgagacaactacatgagttaatatatttatatagtgccaaccacacagtaggcactatgtaaatgtacgtatgaatattatttttataatgtatctttgcaaaaagctttgaagaacattagaagggctagataaaaatattggcgtttttatcttctctaaaagtttaaaaaacaaatgtgtacaaaaaagtcacagagaggtctcattgtcagttttaccctggtaaagacattaaatggccttatttgctttctcctcattgagaagctctaataagtttgatcagctttccctctcccaccccctgctttgtagtagaagttaaaaaaaaaaaaaaatcctcctcccttaactgctttaacgtttaacagtcaccaagagaaactgttccatcatgatgtcttccgagttagtggactaaaacaaattcagcctgtttaatcgtatggcatcaggcaatgctgaaaatgcaatttgttgtgaaatttgtttttgcatttgctattagaagccaagtgttcagctctttttcagctttccactggaccatatcggggaacacactagctggagggcatctggagcactgatcactcagagggaaacgcaacagctgtgtttttgacagctggagcaggcctgatgtccatcaacaaatgtcccggatactttgcacttctccttagttagtagggggcagacaacactctgttggtttgggaatgagaattcttccatggttaccatcttgtttgggtgttggaggatggatgttaagcactggaacatgtttacatttatctgttgttccaccaaatatttgctatcattcttattatcatgcccagtaagaaaaaaaagaagatgaagatattctagaaaagtgagcaaataaaagtacaaacaagaaaaactacacaaaaaacaaagctgaacaagggataaggagaccctcagaatcggttgcatttttcctgcttgtttattgtcagagagagagagatgatagataaatattttgatcaaaaggaatgctgtgaagggatgaataatcagctcttctttagtgtcctttagcaccttactttcatctcacatgaaagtgtctcatgtgaatgtgaacttattattcagggacactgtttgatgctaactgtgccttttgcataatgtgtctgtatatttgaatacaaagtgactaaaatttatacctttataaaattgtaataaatataaccgattcccaaatgaggcagacctaaccaatggttgcctattatcaaaacaaacaaacaaacaaacaaaaaaccaggaaaacagggcatttgatttttcaagtgcggttttaaatgaagtgattttatttaattacaatgtattgcatttagcaaagaatactttcacataccaataactgtgcacgaataacagagtaacactgtgttttgtgtaaactttcgttgatgtctatgcatcaaatggaaaaacctttcctgttgtccccaaaccacaagtcttctcaaagtcccccaacactcccaactcttctaacttaatgatactttaaagcatttacgcctctcagttaatgagttcagctaaagagatgtaaagtcaattctctgcaacaagatcttgaaacagaatctgaaaccactgaatatagtggtatataagagcaccttgagaagctacgagttagaactttcacataagagcctattttgggatttgatgtgcatcgtttcaacttcatttaataagtaatcatgttataattaaaattttaatcaccatcttactcttaacctgacctaaaaaaacaggtcacagttataggagttagaatctatagaatcttagagaactctaggctaattccataagttacagtgataaaccaaaggcacgggagttcaaatgacctcaagtcacatactatagaaggaaacccagatctaactcctaatcccttgtttttttcacctcacacattgcaaaatagaaactatgtaatggttgaaatgtgtcacacaagagtgacacaccaactgttctctcagtaggaatcgtcttgagtccaataacccatatctgtattagttccttaaatgataatcaaaacatactcattaaatctgtgaatggccttggctgtatgtgcaaaatacttctatctcaacatgccgggtttcttgctccttcttctgtttttctcccagctttctattgactggctgtgtagggtatttttaaaatgcaataagctagcagttaaaacaagttaattttcttggctgctcaatggatttgaccaaagtgtttttgcagtaatatacaattaatagcgttaaaatcacaagttataaacagactgactaaatagtgaggaggcaacaataggaatgtgtagagagtagctggaagacactaaaagctagcttaaaagaactgtttcagcatagggaaaaatcacagaggcctaggggtggcaggagacatttgatgtgtattagtgatattattgttattttccttagtcttatggcaataatttaaggctgttgtcaaatttaaatctgttttcaaatgtgctaatagaatattttaaacaatgaaaaacattacctaagaacatggaattcaccaatgaatagtgatggatatcataaaatacaaacatctttatccctctcagtggtgggtattgcccatacaaaacactgaaataattattctgtttccaggcaaaatccagttttgatgctattgttcttataaagaatcagaattgacgagtatattcaagaaacaaaaatgtttgcttctaaaattttatgttcattaaacttggggagacagcatagatcactaaaaagagtgcagatattaaaattttctagaactggtttcaaatcttggctggctgcaacactgaaacagttgtgtaacctgggctaagttactcagcctggctgaaaataaagttctttaatttcaaaatgaaaaaaaaaaaatagtaccagtttcttaggctatttatgaggattaaatgacataatatgtgcaaagcacaacaaagagcctttgacaaagtcaataccaaaaatttgatggttattgttattctcttaaacatgttacatgtaattgtttattaagaatctaattattaaggctctttggtatatgtcaaatattttgtagcttaaaggtcttgtaatttaacttcttaatatcattgagaagaaaccttagctcttgtgtgtgtgtgtgtgtgtgtgtgtgtgtgtgtgtgtgtgtgtgcgtgcgcacactgggggagaggaaggaaggaaagaaagaaggaaggaaggaaaaccagtgatgaaagctaatatttatacagtacttaaaaaatatgcccaacactcttctaattgctttacaaacattaattcctatattcctaatgagaaacttaggacacaagacctattatcactctcattttaaagatgagtatactgaggttttacaaaaggtaatatggctgaggtctcagagccagtaaataattaggctatgtttgagttaacacaattgagcttcagagtctgtatgattaaataccaggcaatacagacctttataagtaaatatgaaaagagacatagatgggtctgtatgtgtggcttacatatgactgtggaaaaaaatgccagaatgtactccaacacaaacatacacacacacacacactcacacacatgtattgccttgatatttgcaaggacaaaaacaaatgctctttaagcaaacattattaaggaactatgtttatctttattctcaacttccaaagagaggaagaaaaataagaaatttcagaaaaataaaaataataattaagaaataggaaaatagaacctataagaaatgatttttaaaagcctggtttctattgaagagaaaaaaaaaaggaaacaaaattaaccacttgtgcatattgaaactaaagatacatttgtgccagggagcaaaattagtaagttcacaacaaaaaaaatagttgcctttgtttcctggccaaagagaaaggagatgtttaggatgtggcaagtcatttgtatgtggcatacatgtggcacatgtatgtggcatgtggcatgtggcaagtcatttgtatgaaagtaataatccaagtccattaaaataaattccagaaacatttgcaagtgttctcaagcaaaaaaatggtaagagatgttttaaatatgattcaaaagaagcaaggaaggagaaaagtggaactaactttataataaagttcaaaagttatgttttttgatgaaaacaagaaaacaaaggagtaggcattaaaataaattatttaaatgtttcatggcaaattaagaaattttcaaatcccaaagtatctttggaatgaacaagttaaattttgaaaccaaatgtggaaaacgcagtgattcttaatattattatacatatggatgaaactcacctgttatatatattttaatacccaattcttgagtttcagattcgttttgaagagttacagccaatacattatttgtggagataattctctatggatcttttgcatttctgcacatctagtgagcagagatgctggctctcttttccagacttttcaaggttgtgaggagctttggaggatagaaattgtttgtttctctggagcaaagggcaagtattttactgttcagtaaaataatgaaaacattttccgctggggcaaaggttggaaaggctcattataaaagatttgtgctaccttagcttaggacacaaatctactgcgtgataatcatctatctgggcccttctgcatcaccccatgggatctgagtttaggaggaaccaatgaaaatatgctaaagctcatactgcttgctctgctgagagtaataaagtcctttgtatctgacccaggagtttcatatcttctgtcagcatccatgaaaccatggtaggctaacttactaattgcaagtaaggtaaaatctgagacaggatatatatttttaaatattttctattgaaaattttaaacacttataaaaatcaacagaatagtataatgaattctttctgaggccatcacccacttcaacaataatcaactcatgaacagtctggtttatttatagtcctgtctcatttcaaccatcctctacaaaatagtagtattttgaagcaaattccagacatcatatcatttgatacacaaatatttcagtagatatctctaagatttaaaaaatatgccacaataccgttaatacacccaacattaattaacaataactctttaatgcaccaaaatactggtccatctctaattttcaattaccttataatgtctttaacacattacttgtatctgaatccagatgaactcaacacagtgaggctgattgatatttccctcttctgatctctaggttctgcctctaatttttctttcttattctttgcaatttatttactgaggaaacacaggtgtttgacccacagtctgaattttgttcattgcttaacaatagtgtcttttaatatatatttctatcttctccgttttctacaaattgctaattaggaatagaggcttagtaagattcagatctctttacccccttgaaactacatcattggtgggagtatattctttcaggagttatattgtcagccggtcgcggtggctcaagcctgtaattccagcactttgggaggccaaggcgggccgatcacgaggtcaggagatcgagaccatcctggcaaacatggtgaaaccctgtctctactaaaagcacaaaaaaattagccaggcatattggcgggcgcctgtggttccagctactcgggaggctgaggcaagagaatggcgtgaacccgggaagtggagcttgcagtgagccgggatcgcgccactgtactccagctttggcgacagagcgagactccatctcaaagaaaaaaaaaaaagagttatattgtctctgggtttctttcttctttgtagtttgagaccattgatgcttaacttttagattcattaattcattagtgtctacaaactaatgatattccaattttatcgtatcttctttatttctttctacatagagaaactttccctaaatactaattggttcacttaagacagataggaaaaacacttggtatgttccccttattttctattcttgaggataattttaaagattattaaatttagtttgataaatatgtaaatattaacatagtcacaaagtaaactctacaaagcaaaataccaaataaagggaacatatcaaatatttatcttatcccctccatatgaattaaaatgtgaagatagatcttaactttcatttatttattttgtatcctataccctcacctctctttagaaacaacttttaaaaaccagatttatggtttgtcctccaaggtgttttttaaaaaaatacaagcagatggcggggcttggtggctcacgcctgtaatcccagcactttgggaggccgaggcgggcagatcagaaggtcaggagatcgagaccatcctggcttacacggtgaaaccccgtctcgactaaaactacaaaaaattagccgggcgtggtggcgggtgcccgtagtcccagctactccggaggctgagacaggagaatggcatgaacacgggaggcggagcttgcagtgagatcgcaccactgcactccagactgggagagagagcgaagctctgtctcaaaaaaaaaaaaaaaaagcagatatatatgaatagccataccaccttttttcttagaaaaataatggcatactatgtatttgtctcttcctttcctttttcactaaaagatatactacgaagattgctcttggaagtatatagagttatttctcattcctttttgcagtcatggttctctattatatggatgcaccgtgatttattcaaccaacctgccattgatggaaatttgagttgtttcaactcttttactatgacaaatagtcttacatttaacagctttgaccaaatattgttaagtatttttgcgagcatattgttgcaatacattactggaattagcatttctaggtcaaagggtaaatgcacatttaatttggctagatgttgccaaattatcctctgtagtaattgcaccatttttcatacctaccagcaatgtaagacagagcacgtttttccacaaagttgatttttacaaagctcgaccagcattgtatgttgtcagattttgggagttttgtcagtctaatagctttagtttatatttttatttggcttttttttctttgaactgtttccctaactcatttgtctattgtatgattgattttttttctatttttagaagctctttgtattttagataaaggcagttcatttactgacatctctcaaagtaacatctgcaccccgaattctatgtgtaacttaatgctcttatgtccaactatctactccctgtctccatgcggttgtctattaaatatctaataattaaaagttcaaaatgaaactactgctttctcaccacacaccaactcttctctcctagattccccctactcagttacagcaagtccatcattctaggtttttgagaccaaaaagcttaagagtcaaacttgacttcttgtttttttcagtcaccacatggactccatcagcaatttttactggctctactttcaaaataaatccagaatcttctcctcaaatccatcacttcaactctgatttgagtccctattattttccacctggtttattacaatagctttgtattagtcagggttctctagagggacagaactaataggatagatgtatatatgaaagggagtttattaaggagtattgactcacacaatcacaaggtgaagtcccacagtaggccatctgcaagctgaagagaaaggatgccagtctgaatcccaaaacctcaaaagtagtgcagccttcagtctgtggcccaaggcccaaaagccagtggaaaatcactggtgtaagtccaagagtccaaaagctaaagaacttggagtctgatgttcaaggccaggaagcatccaacacaaaagacagatgaaggcaggaagactcagcaagtctgctctttccaacttcttttgtctgctttattctagccacactggctggcagctgattagatggtgcccacccacattgagggtgagtctgcctctcctagtccactgactcacatgttaatctcttttggcaacaacctcacagacacactcaagaacaatactttgcatccttcagtccaatcaagttgacactcaatattaaccatcacaaccctcctaactgatttctcttgcctcccccaactctcactccagtatagttttcacataattgccagtgtgttctttaaaaaacatgttacatcatgtcatgcctttacgcacaaccctccaatggtcctcctcttgtaaaactgaatgtcttttgaatggtctataaagctgtatgtcatctcccaccaccctccatcattacttctctgacctcagcttccactcccttccctatcactcactcagccccagcaacactggtcaccttgttctttgagcaaactcctcttgttctaggcacaagccttctaatttgccaacctctagaatgctctaaaagctatctagaatactcttcccccaattatctccataacttacttcctcattttcttctctgtgcttgtaatgacaacaattatgtcacttaagccttctcttaaaacccaagataaaataaccccaccctctgctatactcactacatcccagtatcatgctctccccttcaagtcacttaatgacaaactgaaataatgatttgttaattgtgtcattgcgtccttcttccacctgagactaaccatgaggggatgacattattaagttaactgctgcatgtacaatcttctagggcagtacctggaataaagtaggcattctacatattttttataaatgggtgaatgagtaaaagaatggataaatagatagttatactgtattgacttggcaattacagcatacagaaatatctgagtataagcaaaatgataaaaactaaaagccacaaaaaagatataaaatgtatgcttagtgctaagaaaactttgctcaatgtcattttagataatgcaaagaaagaagactgtcttaatgatgctttgtttttcaagtttctatgggaaaacgttttgaattttggcatacttttatggtttcttttggatctatattattattattatctagaagtaattgagcatgaaacctaagcaacgcattaccatgtgtttataattagatatacatgatcatgctccctgctcatcaagaatatgaagtggaagccaatgtgtagttaaatgtgaactggtgaagtacttagttcatatttacagtattatatgattagacaaaagacactggtttaagttgtctgaattaaatgtgtttacttaatgtttcaacatgaatacaaaacttgatgggaattcacttgaaaacaacaaggattcttcctacctgctgtttcttagttaagaaaagattcaaattccagaagattttttttaaataagtgatttattatttcactgtttctaaattactgtaagcaaagcatcagattagtaatgtgtttaatatgagctattaaattcccattagattaaattgccacccctagagatctgcaaagctactatgaattaatttgcattcttcaatagtcacacacttcaccttttctttaatgccgcagatacttgaggaagtgtatcctaactccaggaacaataagttgtcttatgaactctgaaattcttagttctgcatattgttttgtgataataatgataataatttgagacatttataaatggttctgataggtttcttttggtcatttttaatatacaatataatattagcacaatttcaagtaaatctgtgtcaaaagctatttttacaaggctgtacagagcaaaatctattcactatttatgttcttttcagttgcatttaacaggaccatcaatttaaaaccatcattgaattgactggtttaatatttgttttaaatatcttacataaatgcaatgtaaacatttcatctgtgagccttccaaaattaagccagagttatatagagtactctatagttggaagcaaaggactcgtgagtgttcctttaaaagttgagaacccggtaatgcttagaggctaggaaactctgtaaagtgtctgagctaggctttatccaaacatgagtggattaaactagctgacttggtctccttaatagtagattaacatcatccattaatttatgaacttgattttgtgatgataagtaagaaaactccaaggaaaaaaattagtaactttatataaagagacctgtttgcagtgagaaatgtagtcactggaagcatcagacatattcgctaatgaaacaaggcctgtgcatatttactaactacatttctgcaaagcagatttaccaactcaattccccaaagctaaagagagtatcaggctggattagaaatcagaagtccctattcttgaattcacatgatgaattcacatctgttccctggcgcacagcattaattttagcagtaatgcagccagtattagtctaagttgacccagaaaggcagtggatcactcagggcaaaattctcagtgttcccaatttaatctgatccccaaatcagagatatattgtgcctatctttacctaaactgtaaattttaagagtacagtgagcagaaaaagccagtctatggcttgattttctttctccaattcttctcatactctacactcaaattagcttttctataacacatctctaaaatagccattttctacataagaatttcatatttcctaagacctttttctttgctataaagcatgtattgtttgtctgagtccataaaatacccgcttgctacatcagaaactgcaaaaacacataaagaagaaaatcaaaattgcctctaatccaatttgaactttttgggaaatatgactgtggcagagatggagagaatggatcaaggggaggaaaatcttgggaataggaaaaatggtaggatggcttcctgaaaagatgcaataagaacccgaactgtaacagtgggactgatagaagattaaaatgatacctcagggacagagttaatgacttatagagggagaggaagaagtgattttaaattttctaatttgagagaattgatagatgatgatgtgaaaaacagactgagattcctatgggatatgtggtaaagcataacaaaaacatgcaattcaatgggtaaggttttaaaatggaataaagtccaagctctactatatgccagttttgtggccctgactccatcacctaggctttctaaatttcagataaaagggggaaaagtatatctgattgtgtgtgtgtgtgtttgtgtgtgtgtgtgtgtctgatggagtctcgctcttgtcactcaggctggggtataatggtgcgatctcggctcgctgcaacctccgcctcccaggttcaagtgattctcctgcctcagcctcccaagtagctgactgacttttcagaatttgttttgaagtttaaacttgtatctaaaatattgtttctagattgacatggcaaataggcagctgggaatagatgtttagagctcaagaaagggataaagacggttgatgtgagaatcaatggggataacaaaggtgatgtattaggagtgcatgagactattcagacattggaagagaacatgtctaaagacagtgacctgaagaaacaacaacatttaagaggcggactaaagaacagttagaaaagcactcttaagtaaatgaaataagaaagccaagcttcaaagatcaagagcaaagtggctataaagtccccataactgaacagttgtgttcagtgctaactgagcatgtcctcaggttacatgtgcagcagttcagaagatcatttggtaggaacatattttctcaatacaaatgtcattcatactgctaattcacaactgcaagacagaagtttcaaggcaacaactaataatgtaccactacaccccccatcccccaactagagaagatcctgataaaagggttaggagactgttgatcaagcttgcatctgatgtaatgtggcctcttcaacatctggatctaataacttgtgacagttttctttgggacattttgaaaatgaaaaattttcaatccaacaatagtagaatactggaaaacagctgtcagggacagctttaatgtctcctacttgataagaaaaatgtccaaaagaaaattaaaatgtcataaacatatcaggatattaaagagaagtattcagtaaatttttaaccatcttgcatagggacttcgggttaatctgtagaaaggtaagactgcaatagatctgacaataagatttgtgttataatagagtgcaaatttagtagaatgaagagattcattaatcgttgttactactgctgacaaactgtctaggctttccaaacactggactcgactcagtcatgttctccacctctgtgtgtgctacccaacacactatccaaagtccatccaaatggcatcttttccatcaaggcttttcttatcttccggttgaaacaagcacttcttgcactgaactccaccaaaagttcgtgtccatctttattagtgtattcaacactctctcctctttctaaaatagttattagtgtttcatttcctaaatgtttcttgagggtaatgatcacacttcactatgggctttttgctgtgctccacagcttccagttgtaggctttctgcatggtaaacatttggcaactatcattaaaatgagttaatgactgtgctataattatcacatcaaaattagtccctcatcccaaataatcagtttatttaaattaatgagaattattttgtatagattttgcaatcaacaaaacattatttttaccttttaaatgcattgagaatattgtaagacatttgttaattatttttatcagtaagatatttaaaacttaagtggcttagaaaagttcaatgtttgagcctgatcctaaccctgtaataggaaatcaatgtttttttttaatcaccaagtctataatatagtactctattccccatgtatgtcctatcctatcctattgccttattaaagacatactagttaacatttacattgttcttaggaagactgatcaaaataaacttggtatcaacagaattattgatttaaattttgctgcactcacctttgccaaatattagttgtccaaataagcattccacagttttcttcaatcgagaaaaataggaaagaccttgccaccaaaatgcaaacacaagagtttatttatatttcttaacttcctgtttccttctacttaagtcagcattgttttttaatgctgcctgtttccaacatttattttagttttcttcttgctcctgacatgtatatggcagtttccagcaattttgtatgttgcttacaaaaaaagaaaaaagcttttctgaagatgtcagtgtttgtagtcaaataaaccacttttcatgataagattttccatatatttattcagaggtgtctattcttttctcttatgacttgataatagtcctgctattctaacccttcagtaaaacggtgtttagaacagaatttaagatatttgcagcatacactgtgcttcatataagaagagattagctttttaataatagcttcttttgaattaggaaaggatttctacaatagagaggaaaaccacatggggaaatgtaatcaatgatggttttgtgtaagctttaataatttctttgttctaaaggtttttgcagtttttggttagaaagataaaggaactcccccatcacatttattcactgcaaaagcattgttgattatccagggtatttcttgatacctcttaaggaatccacttttagcagatctctgccaaccagggaatcttccacaaggatttacaattgttttgctgagtggcgtaatgaaaaaatcaatgaaatctgcaacagacagtcttggttggaatcctgtgttaccttaggcaaattgctttattctctgagtgttgggtccttaatctataaagtgagagggttgtaggattaaataagattacatgtgtaaaatatcaacaaaatatattgctcataggtgaagccaacaagtgtaaactgttttcactcatagaaatttaatacctacatgattcagataaagaagagagaagaattttcctgaagtgctctttgtagaaatgtaagaagatgttagaaataaaacagatcacattcaaattgggttaaatgaaaggaatgtgtttcatctcacataacaaaaagtccaaaggccagaaagactctcattgtaggatatcaggatttttgctcaaattttctgatttctgctttctaaactcctcttcatggttttgttttgtttttgtttgtttgccaagctggcttgctcatggtcaccaaatggctcccagtaggagcagaggcaacttatttcctcgctaacagacagtgggagtcaacattagccttcaaccatgccctgactagtctgcccctttgatttgattaacatttcagatcttgtggccaccactggaccaataacaactttatgtaggtaaataggcattgccaatttacaatcagaaactaagtttcaaagacttgctaaaccacactgctaggaagtaggagagctagaatcagaaagcaaattctctaatgccaagtccagtaatcacagcagggccatacttttttgtaaataagatttcagctatatatatatatgatgtttataatttatatataaattactttagcgtgtttctaataaaatcatttttgaaacttaaatttgaatttactttacctttatttaggaaattgacttgtatattttaaatgctctgtgactctaggcatatttctgaaatatatttaaaattctatttaacctatttatattcatctttccaaatatggtgatctgtggctaaaactttctctaggtttaaattgatcttggtttcctttataacacttttatcagttctcaccatttatatttagtctggtcttattttcattcctctcattagcgcttcatagcagcaaatcactgcatgtgaattctaccagtagagatgcattttacagactttgagttttctggttaaggactctggtgtgtaccatagggcatacgggacagcaattgcattagagattttacttaaggcatctaacaggtattttacataacagaagtttatactaggaccctgaataagagaatgtgcttaaagttcttccatgttttctaaaataaatctttatcccagcaataatacacgaatagtatagagcccttccttaaggaatcaacttagttatatatatattacaaaataccctaggtgcaactagtcattctctcctctttcttttttttacctaggggatgatattgtgtctccttgtgcactcatcatcagagaagccctaaggctctcagccgtctttcaatctaagccttgtagataacacttgacctgctgcccacatgtctttggtactatataaatatttaatcataaaaatcataagttatatcttcctgccatggctgagaatttcctgaaaagtcacccaagttgcttgatgaatctggaagtaagaggcctgaccttagaatcaaaagcagaccttccataatgggatgcatgtaggagccaattaagaagttctgttcatctacctcttcttatttgaagatatactatatgcagtcatctatctcagggataaatcagatattttccattaaggtaagacactgattatggacactcttaacccaagggaatcataaggcatctatccacttcatttttattttagaacatgtgagaatttcagaccagtttaaaactaactcctaagtttgcatttgagctgatgttcctcggtaatccagcacattgaaatgccaaatctcaggaattccaaaccaagtcactaaaaaatattcatggagaagaaattaactaaaattcttgagaatgacttgagagcagcagagaaacagtaaaatacatggtacgcttccacatcgcatgtgtcagttctaaaagttgcttgaattctaagtgagtccatgttaagtaaatgaataaaagaaaaaaaaaacctatttgacagagggctacaaaattgctcacataagggttaatttccagtgaaactttaaatggacacttagggtacaaaaattaaccaaacttattttctaagtttggtttgattttatggtgtatgttttcaacccagttaattgcacgtgtgtgtttatagcctaaaaatctcccagtgaaaactgcaaaagattaaagaaatgcaaagccacagtgctaagtgaaattaaaataataagtgagctcaaccagatatttttaaaagactaaaaaatataaacctcaaattttattatcaaaaatataagtaaacctaaatgcacacttttacttccttatacatggttaaaaattctcagtagcctttttgtgttctttcactgcataacacttatttgaaattattatttttctagattagtcctgccaaagttttgagagactccagtgtcaaaaagcttgatgctatgcaattccctgctcaatgtctgatagagtggtgagccaattattttcctgaagcttgtgtggactggagctatcataaagaaaaagataaaaagtagaaatacagaaagggaacattcattccttcaaaaatcatttattgagtatctgaaacatgaaaggagtgttgacaggaaaaggaagccagagtagactggaagattaactcagcagaaaagaaaaataggccggacatggtggctcatgcctgtaatcccagcactttgggaggccgtggcgggcagatcacctgaggtcaggagttcgagaccagcctggccaacatggtgaaactccatctctactaaaaatacagaaatcatctgggtgtggtggcacgcgcctgtaatcccagctactcgagagggtggggcaggagaatctcttgaacctgggaggcagatattgcagtgagcaaagattgcgctattgcattccagtctgggcgacagagtgagactccatctcaaaataatgacatgtggagacaacacagatgacaggtgtgttagagtgtcagtgcactccagctgaagacgaccaccagtcaaagaagttgagtttagtgttcactgcagcgtaggagaacacaagccatcggggaactatggggactttagtaagggagtgataggatttattaatattataggatttgggcttgtgtgaagtgctttgggggaaagtgtaaggaagtgtggctttgctctggattagatgcttccagaaagtgaagataactctgccatttggtactgtaatcttattcagaaggaagaaaggcagagtgaggtaaaactgtaattggtatagaagtaacaattacacattaactaagttgggggatgcttggtcatttgtgggttttgacaatgttattatgtttttgtctattctcagacatgattagggagtgatcttgtttgtatctagatctatcatggtcaaagattgaccttgtctgatattgatattccatgaaatggtttatgttcaacaggagaatagcaagaatcagctgtgagagccaggccagttggtagcaacaccaaagcctgaaagatagtagcaggccaggtccttatcagttgttgctttgctcttttttagggggagacacataaagattatggtaaggaaaagaccaaagaaaaattgtggatatttatgtattgcatacatattacaagacaggaaatatgctagatgttttgcatgcatgatttcacgtaatattcacaacaaccctctgaattaagtactatttgagtgcatattacctgtaaggataataagacttagaaaaataaagttatttgtttaaaatggcataaccgtataaagtagagtagggatgggattagaatcctagacctgtctaactttagagcaaaattattgaatcattccttataaaagagtgtatgaacacaacattggtaccttaagagatgagtgtctccattaaattaaaaggtatatcatggcagagatactgtgttgttcatttctgaattatttcagagcaaggagatttgtgatttacttagaatggtgtttaatacatataaaatgatcaattagatggatggaaccaaatatgcatgcttgatcagacatgactatttcatataatttcactctgtgttccaggaagtaggaagaaaccttaagatattggtaatagtaattactcatgttttggatcgtgtgagtttcacaatgtacccccacatatttattcttatgggcagataattctcttatctttcatatgagaacattgaaggtcaggtatgctaagtcctcacataagtaacaagtggtcagacatgggctagaatcttggcctccccatctttatgtccagaggactatcctccaaactgtacagccttttatcttttaattcttcaaaataatttaggtaagagaagaagagtttagaattctcagatttttaaaatattttctaaatatcagcatttatgtagcctttgtatttaataataatgaaacaatgaccagcctataactctgttttcacccctactttttaggtaattgtcttttcttattcttgacagcctgtagctgtttcaatccttaagcactataaataatttacagcctatgtatacttcctaaaattgtctttgtatacacttttttttttttttgcatttaaaaatgttgatggctgaggaacactgctagggtctagctgaaagcaacaataccacagactctgtgggaagcgaatgctccattcaaatgaaaggtttcaagttgtgtgatgaattgaggaaaataaaaccaatactttaacaaaaagtaccaaaatttcaaaactttgtattaatatcaacacactgaaaaacatactgaaacagaccagcacagtccctacttaatccccaacaaatgtcttcccattggcttactacggatatgaccaattggcctgtatttagactaaacgagatattctgttgatagtgaacacagtttctatcacccaaagcatgtttcatcctttaaagcatcaattctgtatttcacaaacagaatattttgatttattttccaaacatatgttttcaactaaatgttgtttgtgaattatgtaaacagcatgctgaaattgagattccacataagttacctttttttatccaagatgtatgctcaagttttcatagctttgagggctaacaccatgtcagcttaacaatttgtttgttttaaaagttgtatatatgggtatgtatgtatatgtgtgtgtgtgtatatatatatatatatatatacacaaacacacacatatgtatatatgtattcgtataaatatgtatatatatacacacacacacatatataccataggtatctgtatacacacacacacacacgtagggttcaactggtccttgataatactatttgactccttcacttagtagaatggaataactaaaacaaaaaagtgtcactgacttactaaagatacaaactttataagctatagaatccatactagaacccaactgcattgatgctcagagaagcattttgttccacatccccttttagtaataagcaaaatgtttacaatattaagagataatatgcaatgtgctattagaactattttcccactatcgctcaggatcccagcgccctatttcaacaagtgaagttaaacccatataagtatactgaccagctcctcacttcttatttgcctttgcacattcctcttgtctgtctctacttgatagagcaatacagtcatgttctgcttagcaatgcttttgtcaacaacagaccaagtacatgacagtggtcccatgagattataatggagctgaagtttcctgtcacccagtgacatcacagccattgtagcacaacacattattcatatgtttgtggcgatgctggtgtaaacaaacctatgcactgccagttttataaaagtagagcacataaaattatgtacagtacataattgatagtgataataaacgactatgttactagtttatgtattaactatgctatacttttaattattactttagagtgtactctttccacctataaacaaaaagttaactgtaatatagcctctggcaggtcgttcaggaggtattccagatgaaggcattgttatcatagatgatggcagctctatgccttttattccccctgaagaatttccagtggggacaagatgtggaggtggaagacagtgatactgatgatcctgaccctgtgtagacctaggctaatatgtgtgtttgtgttttagtttttaacaaaaaatatttttaaagtataaagattatttttaatacagaaaagctcgtaagataagggtataaagaaataaaatatttttgtacagctgtacaataggtctgtgttttaagctgttattacagaagagccaaaaaatttttaaaaagtttataaagtagaaaagttacagtaatctaaggttaatttattattgagaaaaaacattttaaaataaatttagtgtagccaaagtttacagtgcgtataaagtctacagttgtgcacagtaatgtcctaggccttcacattcactcatcactcgctcacagactcacccagggcagcttctgtcctgtaagctccattcatggtaagtgccctacacaggtgtaccattttttatcttttagatgatattttactgtacattttctatgcttagatatgtttagatacaaaaatacttgccattgtgttacagttgcctacagtattcagcatggtaacatgatgtgtaggcgtgtagcctaggagaaataggctataccatgtagcctaggtttgtagtaggctataccacctaagtttgtgtaagtacactctgtggtgtgcatacaatgaaaaatcgcttgacaacacatttctcagaatgtattcctatcatcaagtgatacatgagtgtacttacacatttatccaagtttacaaaacaggagaagattatatgttgtatttgcccccttaaaataggcttcaaatagcataattatcatgttcacatgcagctttttcctctgcgtatgatttttaaagattgtatctgaccttgagtaaagcaatattcatgacctcaattcattactccatatcagtgatatttatcaatcagtggattctaatttagcataatttgctaccagaaataaaaatataaaatatttaaaatgcaagctggtcactcatttttatttacttacatttaactgaacgtttgtatatggaatttcatagtcaggtcatatgcctttaaatagacaagcaaaacagaggaatggaacattctgttgacaggtaaatgtgaatcaatctggtttcattcaaaggaaaataatcaagctcttttcaaataacctaaaatgcaaaatgattgcagggtggaggggaggggaccttatcagcttctcttctcagagaaatgattgcgattttctagctggaggaacatacgctgcagcttatctcgtgacttctctgcagtctctgatatttattaacagttgattttctgtagttgctcttctttcccttcttccctcctccagtgtaaattagttttcccaaatctgtatctagccttcattttcttatcagtcatggaaaaaggatgattatttcattattggttctgaagagtctttcatattaagtggtgcagctctggtttcaggcaggcatttaatggactctctatttgttttattgtctcatcatcttaatcaaagccctctgagacagagtcttttgtagtaacaaacaagaataaagggaaattatgaattgttgcttccacagaaaatgcagtattcattagaaatttctgttgggattaaaaccaggctgacttcaaacatgtaaaaacaattataatcacctatgagaaaccttttaatcactaggatacctgttttctgagtctctcattagcctactaccaaagcaggtccctcgcttggggctcatgcttcactgtattgtcacaagatagctagtggaagattttcagctctcaagtttattttttttgtgtgagaactgcactcctgctttctcccaacactttataatttttttcttacagctttttttttatctttgctatataaaatttaacattaactctctgatttactgaacagacactgtcctagattcctgatattgaacaactatgggaaaagtgtaggtgtcatgctctcatttttagattcagatgactcaaaatagcctgaaagtcccagtctcacactgtccctgcactcctttgatcatattttgataaatttttcagaagcagtacaggaattgggttagctatttaagtagaagtcagtttatattggggcaacatgaaaatggtctaataaaaatccatgtttctccttaatgggcaaatcaaattttctgttgtttgcaaaaatcaaagagacacaaaatacccccaacattccagtatcctaaatactgattactattaatagtatatgtttaattatatcttaatattttatttgcatttagagatgcttgctaatacctatataaattttattaattaattgatgcaagaagctaaagtataaacttgattcttaaatggcttttggttcacatagtgcaccatatttcaatggtgcaataaataaagagttacagcattgctttcaacttcagatatggtcatcatcaggcatctctgacataatgttaaatgtgtttgtcatattgggacagtatacttagatagggaaatactcataaaatgtattagttaactattgctgcattacaaattatccccaatatagcaacttaaatcagacttttcttagctcacagtttctgtaggtcacaaatggaggtagctgcattagcggggtgcctcttgctccagacctctcacgagactgcaatcagggtatcagccaggactggggtcatttcaaggaccaaatgaaagaagatccacactcaagttcagcaacatggcttttggtaaggctcagaagaccccttcctatctcattcacaggattgttgacaagccttcagtagtctctgtcgtaagcgaaagaaattaaccttttgccacatgggcccttctatagggctagtcatcatgtggtaactggctttttccagaccaaaggctccaagagacagaatgtgacatagcaagcaagaaagaagccccagtctttttataatctaatcggcaacttgccattacttttgcagcattatttttgttagagacaagccactgggtccagcctacattcaaggggaggaggttacacaagtgtatgaatgccaggagatgagaatcttcaagatccatttttgaagctatatgtgacagttcaacatctgaactctatggttcagccttctctcactgcagaataggctcactctctccaacagtcccccaaagtctcatcccattaattagtcaggatgcactgggttatgagacagtagtaactctaaaatctttgtgacttagaataacatagttctatttctcaatcacaccacttatctatcatgggttgatatcatagtacattttatgctgctgtaacaaaatacctgagactggataatttgtaaagagcagaaatctactggctcacagttctcagggctaggatgtttaatgtcaaggtattagtgtcctcctagggcttttgtgctatgtcatcacatggtgaaattcagaagatcaggagagagaggaaaggggctaactcgttgtattagtccattttcacactgctgataaagacatacctgagaatggctgggggggcctcagaatcatggtgggaggtgaaaggcacttcttacatggcagctgcaagagaaaatgcggaagaagcaaaacagaaacccctgataaacccactggatctcgtgagacttattcactatcacaagaatagcatgggaaatactggccccatgattcacttacctccccctgggtccctcccacgacatgtgggaattctgggagatacaattcaaattgagatttgggtggggacacagtcaaaccatatcactcatccttttatcaagagctcactcctgcaataactaaccaactcccacaattaaagcattaatctaccaatgagaacagagccctcatgacctaatcacctcttaaaggtctgactttcctaacactgttacaatagggattaagtttccaacacatgaactttggaggacacattcaaaccatagccattggctacatattcttctcatgctgtcctcactcagaaagtctccaacatcactgtgccaggagcgaggaaggggcaaattatcactggctattaaagtcttctgcatggaagtgacatgtgatacttctgctcaaattacacagccacactaatttcaaaggcacaaggaagttcactttgaccatattcctggaaagatgagaaatggaaatatcaatgaacagcccagaaaacaacctaatgggtaaagtaatatatttcacatccacctgagtgcatagcaaaataataaagagccagattttgatttgtttattcatttcaaaaatatttaccatttatcactgtatgctaggcttatgcaaaatgctgaggacaaaaacagaaaaaaataaaagcagttcctgtcttctgctttttcagtatagtgggcaaagagataaccatatagacagttataaaatagaaatcattataaagtgttaagacataatagaagcatctcatatggatttaaggagagaagggatcagagaggacgttttgtagtagataaaccctgatgggttctgaaggatgtgtaggaatagaccaggtaagaaaagtgaattaataaaatttcaatgtttatttaataaaatgaatttatgatgagagtcttccggattaaaaggcctagattcttctatatctgcagttaactactacgttagccccatcaaatcactgagcaactgtgcacctcaacttcctcatctgtgaaatgaggtttaattagatgttgttcaagatctctttcaactataaaattccatgatttttcctgactctagaggatattttttcaaaagcaccttctatgtgataatcataaaataattaccttataaagcaatcacttactaaaacagctcagtgaacacttatggaaaattcctcatacctgaaaataatggaattgtattcccatctcttctgatacataccatgttcaaaatggattacaaaaagaagaataagatgtaatttagaatagactgatattaagtagttcttcatggctagcttctactcttgtggtccttgtcatctttaattcaccaccctaggaatttctgatgattttcctgtgtaaagagactctttccactttatgtgttggttttgtttatttgcttgtaaaaagattccaagacatgcatgcacacaacacacacacacacacacacacacacacacacacaatttattttgcactaaaattctgtgaccaggttgacgtccactctcataattccacagaataccatgtctctcattagatcctgcaatccttcaaggatctccctacttccagggaaaatccttaaaagggttgttagagtctttaccactcatggcacaaccatcattcttctaccagtcaactgaatcctaggtcaggggtcttcccttttctagtccaagccttcactccctctctcctctttcactaaccaagcttagactttcaaagcaaataacttctaccaactattggcaaagatgttatacaacagaaacactcatatattgcaggaaaagtataattgctacaaccactttggaaaacagtttggcattatctattgaaatttaacatatacgtaaccagatgatccagcaattccactcctcattatctacaacatgcataccaagaaatatctacaaggatgtttattgcggcattaattgtaattgctttaaactggaaattacccaatgtccatcagcaatagaatagttacaaaaatatggcactgtatattcagatatttgacaaattacaacatgaatgtagccaacaaccttaatgttaaggaaagaaggcagacacaaaaataacatgcaatacttgattacatttacataacgttcaaggcaaccctaaaccataggttagaagtcaagatggtgtttgtttacctttggtgaggaggaaaaagtgagtttgagagtaagcatgaagtatgtattactggaaatgtgctatatcttgacgtgggtggtgtttaccctgatgtttattttgtatgattcattatttatgtacttttctataagtgcattatatattgatttttttaatttaaattatctcttaatttagttgagacaaaaggactcaggattccaagaagtcctgcttgttcttataatggtgtcacatggaaacacacatacatacacaaacacacacacaacataacacaacaccacaaaaaaaaaatcctcttattctttagtcatgagaggtacaatttatttgccattttatatattgttcactgcaatgtgggttgcagtagtatttgttgttgttgttattaacacagctccaaatcagtctatttcacaagaaacctataagggatgacattagaacaaggttgagagagagagagagggaaagagagggaagcagggagggagggaggaaagacaagctatgccatttaagaaatctaacatgtttgccaagcaaagcttaaaatcacactctcttattcatctgtcttggctttgtattgtacaaactgcacataaaaaagggacttgacaatttcataagacaggtacctttaggtatttcaaaacttattttttcctggaattttacttacctggtgtttaaggtaatgcaaaggactatccttatacttgaatctgaaaatctgagtacaatgactaatgagaagtatgtgcaaacaattctaaatgaaagagaatgaaagcttcctaatgaaatctctttaatatgtaattttaagctactttaaaaagtcacagttgcttgcactaatgagaatctgttttaaaattacatgttattttgataatcagaattttgagggatgatttagaatagggttaacagcagaaataaaattgataggaagtaaacttttttctaatttagagtgaaaatcattgcaatatattatgtaaaataaatttcagtgtttctgttgaaatacctttttcaggtgtgaaatgttttaattattatattttatataatactcaagagtcatattaaaatttggaaatttcagtttataacagaagggataccatatagtaaatataaaaaaattattctaagcaaatctaaatatttttatgtgtaagaatataaacatcatctagataattccagttagaaaatagaagattatgctcttttaatgcaaaacacactaaatgaaaggctatttctgaaatgtttgttatttctgtgaaggtggaaaactgggttatgaccaaagtgaattggagccttcaaaacttcccatgcatacacacatatgtattaggatacgtgtgtttgtgtgtgtgtgtgtgagagagagagagagagagagagagagagagagagggagagacagagagagagagagagacagagtcttgttttgttgtccaggttggagtgcggtggtaccattacagctcactacaccctcgacctctggagctcaatcgatcttcccaccttagcctcctgactagctgggactacaagtgcatgccacaatgcccagctagctttctgtattttttgtagaaatgggatcttatgatgttgcccaggcttcatgaacatatacaaatactagaaactgtatctggtcagattgtgccccaccatggacagatcttcgctttaaagttatgaacttcagctcttacagtttcctcagccataacaaccagtccaaattttggcagacagctgggaaatgaaagaacccttattgttatttcctccttgttcatttctttctctcccccagattgagcatgttccatgcactagggtctgccttcttgagccaaattacttgctgaaaatccattttcttctgttcatgagaatttatcatctattttttctcaatctccagaaaataaaatgggacttcttaataatttgccatttttaatcacagtggagaaaacttagttgacctagacattatgcatggcttagaaaggattacatttttttctatttctcactgatgttaaatagtttttgttgtctcctctaccagatcgacagataactagactgatatttgtactctgaaaagaaaggcacttgtgtggtggtctgagaggcaaaaaaaaaaagaaaaaaaattatctaaaatgtctatgaaaacctgtaagaggtgtctttaactagtaaatccaacgcatgtttgcctgacactagagaaatgctttattaatatatagacattaatgtgagtgaactacaaatttattaaagcaaccataaaatctagcctgaaggtgccattcagcaatcatctaaatgagtaatggaatagagcctgaggattttctacttcagatcaaaaggcagttgcatgtctagcagcaaaagtttcctcttcattcctcagaaaggaagccaggagatctgatcatctcctctaaagtccgttgcttaagtagggctgaaagtaaaggaggtaaatctcggaaagttgacttctgccaagcaagactaaacttaaccagcaagtggacaatagtaaagagagacagatgggtgagacttttggagagacccttaggaagtggccccaaacaggtggttggttgcctaaaaggaatcattgaatagagtgtgtttgactctaggggaaagggagagaagtgtcagtaatgaatacatggaggcatgctgactgagatttgatattgcttgtcagatgtctctatttttgtctagacttcaaaagctgtttcattgtaatatgtgaagagcagaaggtcttggattctgtgattggttattgttttgaaaaggaaagaaaattacctttcattttctctccattggcattaaatccagtagagggtcaaaggacattccaaatcaccacgactacagcaaggagcttccaagcccattacttctgactaaggttgtgcaatgctctcagcgtcttacctaaaacccacaaatagaggcctataagaacagttttgcaagcatattttgatgtgttccacttgctgtgagctcttaaacaaaatcaaattttacctttaggtatttaccaaaggatattttggaacccgtgctaaatgaagccttatgttccctattcctgaaggaataactatttagaataatagttcctatgaaattttcatgatacatcttatcacataagatttaagttattttaaaaaacagagagagggatggtaagtatatgctattttctgtgtcaagcgctcagctaaaacctcaaacaagacaaaactagttgctgtatccacggggtaccatagtttacaatctaatgtgggaaatctaataaaccaaacaggctaagtgctataataaacacccacccttttaatggcttaaagaagagaaatttaattctcatttacataaaacgcagtgccaatagatgtcctagtcagggtgaggtgacgaatgctcatctatgtaacactgtactgtgaatagaccttattagtggaagtgaggggtgatcctgaaagctgtggctggagaatcatgttctttttgtctttgggacctttcctcctttaggtccttagggatttaacctataggtaagaaacatagaatgaggatcatatgcaagatgttcttaagactgtgttccatggtgaggaatgtagtcacatctaactacaaaatgtagtctggctatgtaacagaaggaaaagggaaatgttttggtgaacagttagccattttctccgacacagggtgatgtgataacgtgtgatagggaaagatgcagagcttgttggagcatctaggagattcatctaactaaaacttagagggagcagggtgtcaaaaagtctctccccatgagatgacaactttgctgggaattgaaggaggaataagagtttaatatgttaaaaagagttgagaaaaaaatgtgctaaacaaaataaagcaattgtgaaaacaatacaaaaatgaatcattaaggtagacttcaaatcttgtacaaattattctgttgagaaattaagacattgtgcctttttatatgtttcagaggtgtggatctttttaaattaattatgaaattcttaaacataaatgtaatgcttataagatggaattttccatgctaattcgtcccagaacgagtaggatagacaaggatttgctttagcttggctgccaaggtttaagtgctccccttaacaacttaggggcattatttatttaaaggccaaaggatggatattctgaaatgtattatgtaattgtaggatgcaacaaaccaagatgtttactggacttaatgaaactgatgttgtaagaaggcaatttagccattttatggtggacatgttagtttcaattcaacattttaaagaatagtcaatattctgctttatagcctgtgaacaatagtgatttccatgttggtttttggcatttcactacttcaattaaagattgtatttcataaaattgatactagtttctcattaactagcttactttttctcatctctgcctcaatccccactaaaaaatggggtgacagcatttatcttaaagacaatgtagggattaaaatattttttaaataattgttactttctatctttataattaggttttgaacttcttgaggccagggactgtgtctgaaaacaccgacggtggctaactcaaggtgagtccacaaccacattttaaccctttcccttctctgggtcctaatacttaatacagtaactgatgtatagttcaactcaacgaatattggttaggatggatggatggataaaatactcaaacattttactctgtttacctaatattgagttattctttactatagattttcctttataatgtattaatgacaatagaataactaagaaatctgtcaatgagagatttatttttcagttctgaattatatatgatgttaggcctgaacgtggggggaaatctaacaatcggttaaatttctgaattgaagcagcagatgcttatagatttaaatgttgattgaatttagctgctgctgctatgaaattattagccctcggtggtggtctcgcctacatactttattttggctcttttggaagctacaaagctatttattgttaatgagggaataaagtgagaaaacagattagtgagtagattagcgaattttttaaagtctaatctttgttaaacaataacaggttatgatttaatgcattcagttctcactactttgtgacaaaatttttgctattaacacagctttgtttcattacatatcccttttctaatataaacatttcatctaccataataatactttttgtttaaaatcctctgccaaggacattttttcctcacccattgcagtttaatagtgtgtttctaatcctacaaagataattctttgaaataaacaattcccatattctttctctgagatatttgatctgttggcttgttattcagagactattatctcgtaataaacttgtgatgaataagataaacttaaatgttttaaaatcaatgtttctaaatacaaactttctaaataaagtctgtgaggtttaaaagttcgttagcatgctcaaatctcttatctgctaaaattttgcatcctcagtttaaagaaaagaatatcaccgtccctatcccctgttgatcttattttggggttgatgtatcttatgactctaagaaaatggaaatatctgcatatggagaaggtacacaaaggtccttcagaaatcacagtaccactgaagtcaaataagatgataactcaacaaacaaataagagataacgaagattgtagtaaatttatttcaggctttcagcctgtttccatgggggttcatcattgttcaattttatatgttaagattcagcttaccttccccaaaaagctttcttggatacccccagtcaaattgatgtgttattcttttgaattcctctgtgtcttcattcttgactctcttaaaatactactcattctgctttatgtttcagcaatttgtatagaatcagtttccattttccaagcacattatcttccagtgttcatttaaaagccacttgtttgggagtccaaagtacttatttctgtagaactaatcatacaagtgatgttcctattttctttttagttctatttctgtctgatctagtgctaatagaaatatttcaaatatgcctccattaatgacattgtttcttcaagacagaccaattctattataaggagcaaatttcatagattctagacttacatttgcctggattgtcttctacttattagccatttgatattaagtaaactgtgcaaatttgtgcctgagatttctcatttgttaaataaagataataattatatttctggtggctgtagtgaagattaaatgagttcatatatgaaagctgctttggtgaatactatttgacacagtaggaggtacataaatttgtttgtagatgttattattgttatttttattaaaatttagagcatcaggaacctgtctgctcacacacaggcaggtttgaaaatggaaacaggcagcatattttagcagttcaccttctcaaaacaggatagttgcttgaatcatagcacacagtcagaaaaaaacataactacctacctagagaaaaggctttttttctaactgtattttcaaagtgaataaaaacgaaaacaagataccataatcagctgcacctcattacaaaaatgaaattaaggtaaaaataacaatgattattattgaaatcatttgttgagcccttagtatgtgccaagcagaaaaggaatggctttctatgttatcttcatatgatcccattacaaaagaaactgatggccaaggaggcaaaggtctctcacagctaaagagttagagcaagaactccaacctaaacctttctgactttcaaattctttggtatttttactctaccgaagacggaactctgagccaagtccaaaagtgctttacaaattaatatttacatattccaatgtcttttttatgatttttgccacttaagaaatctacctggctcttttcagttccaacttctccatattgtctacaaaaatttttaagacatgatgtgtacaaaaatattgtaagacatgttgtcagacacttgggtgaagctcaatacactttatttagggtattagatttcatcagtatttcctaaattgtcttttcctccaattatttaagatcaccagctagtgagctagttgtttcagggcattgcctgaaagaaagaagaaattctttccttttgtagtatgtgagtgttatacatcagtcctgaatgtagccatctaacacaaaatatatattttttaattttattactattatactttaagttttagagtacatgtgcacaacgtgcaggtttgttacatatgtatacatgtgccatgttggtgtgctgcacccattaactcatcatttagcattaggtatatctcctaatgctatccctccgccctccccccaccccacaacaggccccactgtgtgatgttccccttcctgtgtccatgtgttctcattgttcagttcccacctacgagtgagaatatgcggtatttggttttttgtccttgcgatagtttgctgagaatgatggtttccagtttcatccatgtccctgcaaaagacatgaactcatcattttttgtggctgcatagtattccatggtgtatacgtgccacattttcttaatccagtctatcattgttggacatttgggttggttccaagtctttgctattgtgaatagtgccgcaataaacatacgtgtgcatgtgtcttcatagcagcatgatttttaatcctttgggtatatatccagtaatgggatggctgggtcatccagtggcgcaatcggtacttatgtaacacaaaatacttaacttttcactcttgccaataaaaaagagctttcttgtttaatgtatccttcatcccttaaatattttaacatttatttttgatatgtatattatgtgcaaaacatattgtacatatatgacatttactcctcacagaaaacctgaggtctgtactttatctccatgttaggatgagggacctgagaactagagaaatgaaatatcttgctacatcacacaagaattcaaacccaggtgaaacttcagagacctcattcattattttatttcaaggtggttcctgattgacagaatcaaaaccatctaactagatggcaaaagaatcaggtttccattatcctgccagttcctccttaagtgtctatgactgtaaactttttaaaaggagggtgtatgtctttttgctcatcttcacatttcccacaatgtctaaacattgaaaccatagatgcttaatcaatggctgattgagaatgttagagggtatttaaaatactgttgatgcttaatatcctagtcttcagctagtggttcgtagcattttgccttggggacattgaccaagtttagtcaatttggttaagtgagctttctttgtcatgtaatcatcagtgtcacttttcataattggatcaagctaatgatagccagaaactgttaaaatgtctgcatttggaaatatgtggggtgaacataacaatactgtgggttctatagccaaatgctttgcttattttggaaagggcaatttaatttgttataaataacatttgattaaatgctatgcagtatcatgttttaatataagaaccagtgccaatgcttataaatattttcatgtaagtaggtctagtctggaattttattaaatctttgagtttcaacaattaagaaaatcagaaatactaaggtttctttagttgattttaagaattgtttgtgaagttctgagtagcactagtttggagacataaaccagatcttctaactaaggcataccattaagtgagcctgtttttagttacttttagtaaagaagtaattagcattacacgtagcaggaacatattcaggtctctaaaagagatctttgattacagtattaatttgacagtcccaggtaaagaacaagttaatctaattaagggaaggttaattgtgtatgtagactgtatggccagaagaagaaagctcagcaggatgttcccagagcatttctgcttgagagagtcacatttgttcattcaagggtagtaaaaaacctttatactatatatacagcatttaaagaaggacttattgaaatgatttactagcaattcaatgtagaaacaacaatatgtaaaatgtaatgacttgtatggaggttgactaaatgcttttcagctctaaaagcctatagttgtaatgactcttcataactagacttagagtttgtcaatatgtctacacttacatggtcagagaatattagaactaaaataggctgtaaagaccccaggccatgatttgtacatgacaaatttaaacccagagaaggcaaatgtcctgcccaagataataaaagatatttggtagtatatctgtgattcaaatcatttttattctgtgtttaaaaccacatcaccctttgatagaaagaaggaaagaaaaaaggaaagaaggaaggaggaagtgaggaaaaagagagagaaaagaaaagaaagaaaggaagaaagagaaggggaggagaggaggaaagaaaaaggcaggcaggcaggaaaaccaaggcaattaaggcagaaagactaagggaggtcacagttcaatctctttgtaggctactttcctgagacacacacacacacagtcagccacactctgattaaactaagcataaacctcactttcattattgagtagctgtatttacaagaaaagtcttccttatattgatacaaaagctacctgccttttttatccttagtcttctatttcctatgcaaaatatctgtagttccttcaccattcctattatgagatgggttccagatatttcatcatctgatctctctttcccagcacatcgataaaatatttcatgtttcaaattgatgcctacaattaaataccatgtatcaaatagtgtctggataccatcataggcatgtgcatctcttcatttggccactatacttttagcttttaaaattaactcagtcttttatatgttttaagatgcctttataaaacaactaaagtacaaagccatttttatagggactactataaatagcggcctcttaagctgatttttaaattgatttgtttacatccatcattttcaagtcaagattgataggattaagcattaacaatttgcttaccggaattttttttgctcaccataattatttttaaaagatcatcagtttggattgtttgaattaatcaagcattagacataatcattttaaaattaagtttaatttgagttcataatgacaaaaaacaaattttaagatagttatgctctaatatattttctaattatgcaatatattaatgagtataaagtataaatttttcacactagttttagtcagtacttatcagttcacttctaaaaatagaagctaaaaaacaattagggtcgtgatatggttaggttttatatccccacccaaatctcatctggaattgcaatccccataatccccataatccccacatgtcaagggagaggccaggtggaggtaattgaatcatgggggcagtttcccccatgctgttttcttttcagagtgagttctcatgagatctgatggttttataaggggctgttttcccttcactaggcacttctccttcctgctgccttgggaagaaagcaccttgcttccccttcaccttccaccatgattgtaagtttcctgagacctccccaaccatgctaaactgtgagtcaattaaacctcttttctttataaattacccagtcttgggcagttctttatagcagtatgaaaatgaattaatacaagtgggcattaggatatacagacagaaaaaactactaagatagatagatagatactcataggacatattttgaccatctaaccatctagaactgaattccattaatgtctttatctgttttgtgctgctataacacaatacccccgcatgagtaatttataaagaatggaagtttatttgactcatggttctggagactgggaaatctaagatcatggcaccagcacctggcaagggcctcatcccatggcagaagggaagaaggtggaagtgatttcatgagactgaaagagtaaatggggacagaacttattctttcatcaggaacccatgcccatgataattaaaccacttctactataacagcatgaattcattcatgagggcagaggcctcatggcttactcacctctttaaggccccaactcccaacaccattacattagcaattaggtttcaacatgagttttaatggagacattgaaatcatagcaattaacatgggtctatttttaaatatctctcatcttagtttagtaatcaagttggaaattacctaataaatggacaaaaaggaagaaaagcacctaagaaaagaagattaggagaaagtgaatggtttttcagcctgcatagaactatatagatagagactgacttctaactcctcctgagagtgaccttaatggtcaaatcatcaatgattatgttcatgaaaagttagatacctctttctagaaataaatgaccaaataaataagctgaattaattcaatcacattcaattataggtggcagagtgtagaaccagaacaattagaccagcaagctgacaaccttcttacatatcaagcccttaagtttatctgcctcatgctcttcaactatttttctacttataggctgtggaaagatgaaggatgaaatataagagtagcaatgtgagattgctgaattattaaattttggtgcttggtagctgcacatttgttattctgagggaaggagttgcagactcagctatagaagattacctagaagttgagttcaagagtgatatataaaagactttgtgcttctttctttcttttttcaggcctacagatttggggcattaagttatacccattgcatatggctccgcatttataatatgagtttttgctagtcgatgacccattttccaaatactcaatgatgtgatcctggaggtacctagcatgagctgtgctgaccatggggagaggtacttgggccggtagaaatatggagtaatacaatcggatcacacaaagaagagtcttcctcaaaacaaatagtatatttttgagtcctaagcttataagaattgttaaaactcttttttttttttttttttttttttttttgagacagagtctcactctgttgcccaagctggagtgcagcagcgcaatctcggctcactgtaacctccatctcccaggttcaagcgattctcctgcctcagcctcctgagtagctgggattacaggcacccaccatcatgctcagctaatttttttgtatttttagtagagacggggttttactgtgtttgccagactggtctcgaactcctgacctcgtgatccacctgccttggcctcccaaagtgctgggattacaagcgtgagccaccgtgcccagccaagaattattaaaactatcttttgtacgattgacaaacatgccctgtatgatcttatataatttattaacaaagattttagtggttaattgttcttgtgatgaacagggtaacatgaaagacaacgttttagaaaaatcttgtcttagttcactttggctgctataagaaattaccttagactgggtggcatataaacagcaatttattttttatagttctggaggctgaaagtctaagaccaaagtgctggcaaatttggtgtctggtgagggatcatttcctggttcatagatggggtcttctggctatgtcatatagtggaaaggggaaatcagttttctgggtactcttttataatgatattaatcccattcctgagggcttcatcccatgacctaatcacctttcaatggccccacttcataattccatcacactggtgatcaggcttcagattatgaattttgggtgagctagcaacattcagtccaaagcaaatctcacggtcttaaaaaaaagaaaatcattagcacattaaatggttccaaatttataaaaataataacaatttttaaaattacttctaaatctgatcctaaatttttctaggcagaattacatttttcaatcactttttgaaatattagaaatcactatagttattaaataagattatgaaatctcttatgtaatatcctttgttggcaacagttgtttacaatttacttaggagaacatattacacaatttaaaaccacagtaatgctgagatagcatttatgtatatctactatcttcacctcaatcacaaggattatgctcctgaaaacccttaaggcagataaatgcacacatttggaataacataacttataaggttatatttgagccaataggagtatgtataaatgatttaccttgattaaaataaaagtatgtaagcatagtaaataaaagcatagttgtgatgatttctgtctcttaaatgggtaattgtggatatgttcaaagtcccttttttcattcatctatttattgaatatttattaatcagtcactattgtagatgatggagagacaaagatacaaaaaatggtacctgccctcaaggagttcatgatctgttacatggagacaataggaaagcaaataagtattctatataacgattttttttcctgttggtaatgttttatttgggggggctgtatggtataaacaaatatatttctgttttatagttcaaactattttttcatgcaatatacttctcatagtattttttaaagatacttaactccctcattatcatggaggtttaattgcctagaaaatatatgtctatggaatctctcattctctgaggcatttgcaattctttttaaggtgaaattgtgcataggctaacataagagcatgccggtaggagccaaagtgggccagacactgcagatattgggatacagtgttgaacaagaacacattagagtaggggaggccaatggtaaagagaaaccggcaaagtatcgggtatattagatagtgacgagcagaggtgagatttaaaatagagtcatgctttgtgtaacaatggtccatggtcaaccatggactgcatatacagcagtggtcctgtaagagcatactagcatatttttactttaccttttctatgtttagatatgtctagatacacacatgccattgtattacaatggtgtacagtattcaacacagcagcatgctgtacaggtttgttgcctaggagtaataagctataccatatagcctaggtgggtagtaggctataccatatagctacactggtaggctataattagtaagtttttgtaaggacactctatgatgtttgcacaatgatgtaatcagctaacaacacatttatcagaatgtatccccagtgttaagtgacccatgacccaaccagtacaaatggataccaacccatccgaatagacacccagctacacagaatggaagttcattttacttgctgaataccagacttgaaatcagcactattaggacaagataaagtagggaaataaaattaaagtattgagtaaggagaatattcaaattttgaactgagtaggtgacttttgagtcaaactctgaagaaagtaaggagtgagtcatgtagatattagggggaaaatattctagataaggaaagagcaggtgcaaagaccctaaggagggagcttacctaaagcaaggaacagaagggctcacgtgtctggagtgaaagtctgaggagagtcaggaggaaaagatgactgggaaataaacgaaggccatgttagctgctggtaagaactttggctttcattctgagtgaggtgatctctcattgaacattctgaacagaagatgatctttcactgaatattttggacacgatcgaatctgtattttaagagaatcatttaggcttgagttagaactgaataaatggggcaaaaacagtgccaggtgcaggataaaggctattggaataatgcaggcaagtactggataagatgatggctttgggagtcagagaaatggttaaattctagataggcattgcttagagctacctggatgtgcaaatcaaccagatgggaggtatagaggagaggggccaagaatgacacagactagaaaaaccaagtgccatctatatgccaaaccctttgccagtgcctagggaacatacagaagaataagaagacatagcacatctatcatgaataagccaattaaataaacaattataggagagtgcaaatatttccaaaacatgggaaacacagagcccgagataatgctgcttaatctaggtccaaacgggcaagggatcacttctccagaaaatgaaagtgagtaaagggttaatcagatttattcaggtaaagagaggaggaagagaagagataaaaatagttatatttatacatgcttggatcccaaacattttactttgctactgtgtcattgttgactttattactatgtttctttagggaaagtacattttgccactgaaaggaaattgattcaaaggctatattcttatacattcccttttttgacaaatattcatgcagcactcattttgtgttagggtctctgtgctgagtgcagaagaatttactaggatgaattatatttgtatcttttccaaaagaagctaagattataactagctcacttagagaatacttagtgtactaagatatgcagtaatttattcaaatcactggtacactggatttgtaataccatttatactgtgagttacctgaattactaactactcaacagattaccctaaagacatgcttcttgttttggccctccctctataatatccttatcatctatcataaacagcctagcttatcataatatttgttaaataatgattatgtctttccaaattttaaccttatttttgctgcagatcattgagacagtaatgaagaattaatatacctttatattttgtggagatttattctatgaactttcattatagaatccatgccaagaggctgttacataattgcttctgctaaggatttttcatatatatataaaataatcaataatattaaacctagtgccacttatagaagagtagttttttcctcatcaatatgtctacctgcagtctctcttctcttatagaaaatacgcccatagaattctaattcctatcaacatatttgaccttgtgactgctttccacgtattcatgattgtttcctccaaactttccatttatgacaatcgtctatatatttgatgtcaatgctttcaaatttaagaccccttcaatcacttcccgcattttttcatgctctttctctttacttgaagaagaaaagctccttttcctatttccctgtgaaaccaagcataattttgtccacattgaaaagaaagaccaataatgattataaatataatctaattatatttatatataatataatcttataattagcaatactccatcccataccagttttcccttcacattttacagggaaaatgaattgatctggcaacaaagaaactcagagttatagatctgtgaaagttattaacctctcaatgccccatttagcttttcccgttccacaagaatcaatgataagcacactcaacccttttatgttcttccttaaagcagagagttaacgagaaagcagcccctcttgttttgactttcaatttgtaatgtttatatttttctgagaacatggtactgctgccctggtggtaccacaatgtggcaggtgtttcttaagctttcctggacagctgggcctatgatgtagaggagcctgtaacccacatcaagtttcacttcgtttgaaagcaccacagtcaccacacttgcatctggacttaattccacagatcctgaggctggctcattatcattctggaccatcttgcttccctcctactctcattctccagtcaattgttttaagactgttttggaagtctggggctgacaaatgatgaattctcaacttactgtcttcctacttgtttctctaggttggatggatcaataagcacatattaattatatttagtgcattcctttttgtcaaatcatcttttcaaagctttctgttttctgagcatccacttaaccacagcagagaaacagtgaaactgcttcttgccttccattgaaaattagcctttggcctcaagccaaactgcctgggccagcgttaatataattcacaactggaagaagacaatcaattaatcaatactataatttggaactgaccaaggtagtaacactcgcagctattagactcaactgactgacaccatttaggattaatgaggtagcaaaagcaggaaaacaaaagattcatttaaggactttttccctaaaatcaaaccacccaatctattttgttattttatttttttctattcagtgatgccacagtgaaatctaacataagtaaaaatttgaaggacaaagaaccttacccatcacagtgattttgaacaagaactctaatgaacatttttggtatgggtttcagaaaaataattcagcttagtgtcagattcttctgagaaatctaaacacaatgatctaaaattgctcctctggtgttattttcacatcctttgatccaattttgtaatcacagattgcgatatttattgtttggctaaatcaccaccttttaagttgaaaaaagtttaattttcaggaaaactttatgggcttagtctagtttaatcctacaataaaataaatacaaatgaaaaaacaccaaagatctgtggtgcttgcaaaatgacaaatatcaaccccttctaatcccttatggcagagccatcaaatcttgcagttccaggacaggacaggacttttcctaaaactgttggctgagtatttgtaatgaaacatcattaggctaaccaggaagttagtgcctttgttgttgctgctattgatgttgttttagttttctttggattgggcacacctatgctctgagtccttagactacagatgcctttttagaatgtgtttaacctgaaatttccaaaatcagcccaggggtattaaacatggtagtaaatctttgttttccaacaagaaagcaaaatacagaagaatctcttttaactttggcaaaaacagaaagaaggagtaacaaagctgcctatgtgtatcaccatatatgtaaggggtatgatttgaccagcaacataatgaagtctatgtaaagagactttctttatagccagggcctacctcattttttaattggaaaatttagtatggggttttctcatttaatctcctaactttagcattgcaaactgaagaaaagtgcttcaaatataatcctgggatttatattttctttccaaatacttaccgtctattcattatcaaaaggtctttgaaaatgtaaaagtcctcttagcattgaatcagaaacactgagtataggaactttagtgtggcatagaattggttaggagtcaagacatttttgtagtatgacctttatatatattacctgtggtggtttttgaattatataaagtgaaataaaactttagaaatatcataaaagttttttatgagaaaagttaaagccaaaaagaggctctataagatttattaagcaaacagtgtattagataagatgagaaggttcaattagaaggctaatataaatttatgcaaattgatttccactgataaaaatttatatatacgttttgtagcacccagtggttatttctatgacagaagcatattttctaggtaaatgaaatttcatgaaataaaaagtatatatccaaattattttttattatacagagacaggagagcattaattttcattctacttcactacaaaaaaaatatataaataaatattttttaaaaaaatctaaaagacagtacttaatgcttttaacagataaatgatttaaggtcttattcaaatgtacccgtaacaaataaactgctttcttcctctcagaaaataaagcatgaagttgaaaatagaattattattatttttgtctgttggctttttttcattaaaaacattagctagtgcttctaaagcttacaaagttagagaacaaatatgtggtggtgtctcaaaacaagataaatagtcaagtcagtgcaaaaaaatcgttttttaaactataagtttcgctgcttacttgtttgatttctttatattcaactgtattttaaacaaaagacattttgagacaacctgcaaaatgtatataacaccatgggatattttaatttcagttttatgccattgtatttcaaaaagaaattagggtagctttgaagatgcatgcaatatactaaaataaaataaatttaaaattgctaaaaatatatggaaaaggcaataaaaatgaaacaaggttaaaaaggcaagataaaaaaatgaataaatgttaaaaaagtaaattgaaggagggcaacatggttgcagtggtattctgtagaggattttatgtcaatctaaactgtctagaagaagggtaagtaaccttttactgtaaagggccatagaccttgtggcctatacaaactctttggcaactagtgaattctgccattttagcaagaaaagaaccgtacacaaaacataagtgaataggcatggctgtgttccaataaaactttatttagaaaagaggcagtggaccagatttagcccatgggcggtagtttgccaaaccttcagaataaagcaaaggtggaaaaaaaaatcagttatctgattttaagataaaaatctactccacagaaggaccccacagaaagataggttttcgttggcatgtgagagggagctttctaaggatgatcagactgtgggcattgtcagtgcaatgtctctccagtaaataaaatagcatgtttcatgcagtggctgtaaaatgagtttaaaattcaggataaaaattaattttgcttttttgtagatgaaaacaatgaacttttctccttatttatttatttatttaagacagagttttgctctcattgcctaggctggagtgcaatggcgcgatctcggctcaccacaacctctgcctccttggatcaagcgattcttgtgcctcagcctctcgagtagctgggattacaggcacgcaccaccatacccggctaatttttgtatttttagtagggacagagtttctccatgttgatcaggctggtctcgaactcccgatctcaggtgatccacccacctcggtctcccaaagtactaagattacagttgtgagccaccatgcccagccctccttatttttttaacacgatattatagcaataatatttatgttttggaatcatttttattccaaagttggctgtgctgcttattttgtcatcattagcaaatcgaaaaatcacacacacacacacacacacacacacacacaaaccccatatagcatgagaagcaatacaccatcttgcattgcatttaaaaaaataagaagcacatcagtgttaagaaatggaagagcattactatggtaattgtgaagagaaaaaaaatgcaatctgatagggatgacgggcatttaaacaaatataatacaataaaggttatgatatgaggagacatagttctgatttgggctccctggttttgaatatcaggtccactatttgtcaacaatgtgacctttaacatattctttaacctctctgggctttagttttttttctcactgagttgaaatgattaagataagacttagtactgtgcacacagtacttaatacttacttaactcagctaagagcgtatattgcaaagtgaggttctaagttgttatgaaagttttcaaaaataggtggtggctttggtccagctatatgactcttataactataggtagtcttaaacctcttacaactataggtaggttgtctttttttggagttttttggaaggaggggttttgaagatttcttttggggagaggtattttgtgaatgccctccttctccaaacttacacacaaactccaaggtgtttttaagaagaccagtgagggatcataatctgtgtcctttcaaattacaggttgtagtgaactaatatctgagctaagcctaagtagtctacaagcaagaaactggctaacatggtctgttgcagcagaggagagggctgattagagaatgttaatggcatctctaggttttgtagggatgatggattcataagcatttccttgggaccacttttgagccacacaggagaggaatatgcaattaggtggtcttaaactttgcacacaggtcagctgggggaatgagatgaccttaacagaaagtagaggccaaatgctaggagcctagaggctgcagaagagagctctctgtggatggagtggaaggagtttctcccaaaattccaggaataaacacaagagagtcagttttggacatccaccaagtccagagagtataggaatatgtcatctccacagattcagctaagcaatatatttttgtttctctcaactctcctctattcctactattacaacattgaaaggatcagaaaccacagtaaggtagatggagaagtgattcaacttaaaaaaaaaaaaaaaaatcaaacccagagtcttgatatattcatgagctgagacattttaattagtggattgaaactatgttttgtgagttaaagtcaccacaggtttttttaatacctacatagggacagacaattgtacctgactaaatttatatttgggacaggataagagctagtcactgagaaaaaaattaaaagggtgatacacttaaggggaaaaggctggtttgtgattatagttggttgttttattattacattttataatttgtactcattcagtattacatatgttgctatatctatgtctttatatctacatcagtatcttttgatatacattgaaatcaagtttagccttcaaagatcaagaagacatcctttaatatcacacattgactattggttattgacttctaacttatctccttgttaatatgtggccccccgtgaaatgtacacattgctatctcagtaagttattttaatatgtacagagtcatagttgacatccttgaaattattagtggtctcacattatttatgaactaaattcaaaccttaatagtatgatgtacagaccctttagagctggctcttttttatctttccaatcttactataatatagtttctatctatcccaaacagcagccatttctgacttcttgcagttctgtaaatcaaccaaatggctttgccgctctaattatgtcttcacctaccttcatctgcatagaatgctatttctcatctgactttgtttctccggagaagacctaattctctttgaaggcaatgccttacataaaaactcttccttctctcctcaaaattaagaagtcctgacattcatcttttggttcctcactctcaatgtgcatacttatttcaaacaacaaaaagaccttaatgtatttatctttctatatatgtgtcttcattattagactatggattcaaagaacaattcttattcacatctataatctaagcatcaaaaatatgtctttcaggtagatgaagttcaataaatgtttattgaatgaatttttttaaaaagaaaccagtaaatgtttattggaattttttttttttttttttgagatggagtcttgctctgtcacccaggctggagtgcagtggcatgatctcagctcactgcaacctctgcctcttgggttaagcgattctcctacgtcagcctcccaagtagctgggattacaggtgtgcaccaccacacccggctaatttctggttggtttgtttgttttgttttgttttgttttgttttgttttgttttagtagagacaggatttcatcatgttggccaggctggtcacgaactcctgacctcaggagatccacccgcctcagcctcccaaagtgctgggattactggcatgaggtaccgtgtctagccttggagaaattttttaaaaaagaaatcagtctaggactttgtatttcttcataataaatatgtattgaacacctctcagaggtaaggcactgtgctaggcactaagaataaagaagggaagagaaaagattttatgctctgtaataggaaaaacaaacatttaaacaagtatgaaaggcagtataataccctcctacaagatatctacatcctaattactgaaacctgtcaatatgttagcttctgtgtcaaaaagttttttgcagacgtgattaagttaaagatatcgtgatcagaagagtaccttggattacctaggtgggcccaatgtaatcaccaagatccttataagagaacgagagaggcagaaaatcaatgtgggaaggcaatgtgaaaatagaagcagaggtcagaagacagaaagttaaagatggcctgctgactttgaagatagaggaagggaccacaagccaaagaatacaggtagcctctaaaagctgtaaaagataaagaaattgattatcttgtatatcctccagaaggaaaatggcactgctagcctattttagacttttgagctccagaagtataataaatttgtgctgttttaagcaaaaaaaaattggtgtaatttgttacagaagaaataggaaactaatataataggcataataataaagcatgataggtgttatgataagggaagtacataaatgttgaagtcatatttcagtaggatttactgaaactaatccaaaaatttcaggagggctttctgaggaagtgatatgtaacataagacttgaaggatgggtaggatcaaatagaaaagaggggtgctaaagtgaatctgagagaaaacaaaaatatgtgaagccttagatgtggacaagagcaagttctgctttgaagaactggtgggagttcagtatatctggacaacagaatttgaggatgctgtcaagttatgaggctgcttaacgtactgaggtcagatcatgaatggtcgagtcagttattaaatggttagaggtttgatcttgatcataagggcagtaggacagctttaaaagattttaagtgggagaatatcataactgtattctcataggtgcactgtagacaatagattacaggagagagattttgacgggaaaaaaggccaattaggaagagatggcaaccaatgaggagaaaaaatacatagtattggcttggatctcggtggtggctgtagcaataaagagaaatatccagaaagcaatttgacaatagaaactaaattacttgatgatttactagatgtgagaggtgtcctgggtagatggtagtggaatttctgagatagagaacacaagaggacaattaagtgtggaagtgtggaagaaagataaggagatcatgagtgcatctttgagtgggttagacttcaggggcctatgaaacatccatgtgcagttttagtaaccagctaaatatctaggcaagtatcccaggaaagatgtctgtactgaaggaagagatttgggagtcatcagtttacagattttgaagctttgggagtggacaaacttaccaaaggtttcttggattcatttaataagtcctagagtgaggtggagaaaaagactagaactgagccttgaaggtcatcaatattttaagtgagagtagataaaaggagtgttcagaggaaaaaaagagaagctggtgcggaaggaggcacaccagaagagagttgtaccccaggaggtaagaaaatagagagtcctaaagaaaagttgccaacagtatcaaatgttcccaagaagttaagcaagctagctaaagagtgtctacatttcgcaacatgtaagcttggataacctgtgtgaaagcagggttgttggcatattgcaggaaaaataataatgttgaatgagttgaagaactgggacagaaaatatagataatgccttcaagaattttgaccgtaaaggggtaaggagagaaaaaaaatagtacttgcagaggtagtttgtgttgaaggttgtttactttttattttctattttttaatgctgaaaaaccatgcatgatgaaattctaatgagattcctccagaagtggagaaaatggagatgcaagcaggtggagggtggagaatttacagtatttctaaggaatccagcggggaaggatttcagactgcagatacatggtagatcaattatgtagatggaaagtcaactcttccttgtcccaaaaggacaaaggaaaaggtgtatgctggttgttacttgggcagtgagaagtccaaaagttttcccccagtggttttaagtaatcttctggatctgagggggaagatggatgaactgaagatttgagaagagttaggaagatgtgaaatagtatctgtcaggaatgggaattaagttgggtaatggaaagctaataggattctcaggcactgttgagagcctgggtaagattagcaatcatgaatgtatattggcaccaatctgccactttttgcgacattttgtagcagtgtttagcaaagtttagcaaccgtggtgcatgcataagaaaaaatctcactgtgaggaattttctaggcacaaatggacaaaggccaatatggcatagaatagtcagatattggcaagaaaatagttgaagatcttctaaatgctgggccttgttgttttcttctttgaaaatgctgaatcccttatcatgttatcctgctactcttttaggattcaagacaaaaaaaaatcttaaaatgaaatgcatttgaaggctgtactatatattaatgtgctgagtcccatttcataaaggtacaggaaaatttaaacatttagtcaatttaaatatatatatatatgtgtagcttatgcagtaatgttaccattactgttatatgatgtgttacatagtttaccatttagagataaaaatatagtatgatacacaagtatgtatgtatttatctaaaacatattttaaatgtatctataattttgccacagatgtcaatgtacagctgtatctttatcactaggagacataaggagaaacaaggaataccagtattctcattcaggaggctccatgaatctttaaatatttgctcccccaggattgtattttattttgtagttttcacttcttgaattttgttacatctctagcttctcattttaattagaattaaatttaaaaattaaatctctattgctaaactgcctggcttggagcccaaatgagaccacactttctcttctcagcatcttgtgatcactttagcaaataaaatatgagtaaaagaaaaagtgccccatatatgaaaaagaagagttagatctccaattttatctcctgaccactaattcttttcttattaatattactttcaattgacaaatcataattgtctacactacaggtcactatatgatgttttgatatacatatacaatgtgagataatcaaatcaagctaattaacatacctatcacctccacttatcattctttgtggtgagacatttgaaatttacttattctgaaatatacaatacatcatgattgactatagtcaccctgccgtgcaatagagcttaatatattcctcctgtctaaccaaaactttgtatcccttgaccaacagcacttcattccatcccacctgccaccccctgccccatatcccaggctctggtaatcattgttttactctctacttctatgagatcaaatttgttagattctgcatataagtaacgtaagtgagatcatgtggtatttgtctttctgtgcctggtttatttcacttagcataatatcctccaggttcattcatgttgttgaaaatgacagaatttccttcttttcgagccaaatagtatttcattgtgtgtgtatacaacattggtttaatctattatctgttgatggacacagattgattccatatcttggctattgtgaataatgctgcaatgcacatgagcatgcagatatccctttaacatattgttttaattcctttgaatgtatatccagaagtgggtttgctgaatcatatggtagttctatttttagtttttttgaggaatctccatgccattttctataatggcagtactaatttatatttccaccagcaaaagacaagtgttcacttttcaccacatcctcaccaacacttatctttcatctttttcatagaagccattctaacaggtgtgaggtggtatctcatttggttttaattttcattaccctaatgattagtgatactgagcattttttaaatgtacctgttggctatttgtttgtcttcttctgaaaaatgtgttttcaaatcctttgcccatttttaatcaggttatttgttttcttgctattgagttgtttgagttccttatatatttttggcttatcacattaatggtttgcaaatattttctcctgttctgtgagctgtctcttcactttgttaataatttcctttgctatgcagaagcattttagtttgatacaatcccatttgtctatgttttgcttttttatcttgtgctttaggaataatatccacaaaataattgcccagaacaatgttgcagagcttttcctctctaagatttatagttgtagatcttccatttaaatctttaatccattttgagttaatttttataatgatgtgagataaagatacagtgtcattcttctgcatgtggataaccagttttccaacaccactgatggaaaaggctatcccttctctattgtgtgttcttggcacctttgtcaaaaatcaattgcccacaaatgactagatttatttctgggctttctctctggttttgttggtcgatgtgtctgtttctatgccagtgccatgagatttttattacaatcactttgtattttgaaatcatgaagcgtgagcctcctattttattctttttgctcaaatagttttcactgttagggccttttgtagttccatacgaatttaaggatttcggaggttttttatctctgtgaaaaatgacattgaattttggttagggattgtattcaacctgtcgatcacttgaagtagtaatggcattttaacaatattagttcttccaatccatgaacacaggatattattctactgatttgtattttcttttctttctttcttcagtgttttctagttttcagtatacagatctttcacctccatgattaaatttacacctacatattttgttgttgttgctattataaatgagattgttttctataatttttttggatagttcattatacatatatagaaacactactaatttgtggatattgattttatatcctgcaacaatgataagtttgtttgagttctaacagctttatggtggagtcttcagcagatagtctctatttgctatttctctattttttctattcttcatttcctatttcacttcttcattttctattaggtagttcttttgtttctttcccttacctaattactatggctaggaatttgtactgtgttgaaaggaagttgtcaaatttggcattcttgtcttgtccctgaccttaaaggaaaagctttcaagttttcactattgagtgtgaagttagatatagatttatcatgcatagcctttattgtgttgagatacattccttctatactttgtctattagattttattatgaaagagtgttgaattttgtcaaatgctttttccacatgttttgggacgataatttggtttttgttctttgttttgttactgtggtgtatcagatttattgatttgcattatgttgaaccatacttgcgtcccaaggataaatcccacttgatcatggtgaatgattattttaatgtgttgttgaattcagtttgctaatattttactgagtatttttgcatgtatattcatctgcaatattagcctgtaattttttcttttgtagtatctttttctgactttgatactgtggtaatgctggccttataaaatgaaattacaagtattccctccacttcaatttttctgaaagggtttgagaagaaatgtaattagttcttctttattatttttatttatttatttatttattttcgagatggagtctcactctgtcacccaggctggagtgcagtgccacgatctcggctcactacaacctctgcctaccgggttcaagcaattctcccgcctcagcctcctgagaagctgggattacaggcacgtgccaccatgcccagctaatttttgtatttttagtagagacggagttttagcatgttggccaggctgatctcgaactcctgacctcgtgatctgcctgcctcagcatcccaaagtgctgggattacaggcgtgagtctagttcttctttaaatgtttagtagattgttgacgacagtgtggcaattcctcaaagacttagaagcagaaataccagttgacccagcaatcccactacaggtatatagccacatagccaggaatataaataattctgttataaagatacatgtatgttcactgcagcactatttacaacagcaaagtcgtggaatcaacctatatgcccatcaatgatagactggataaagaaaatatggtacatatataccatggaatactatgcagccatgaaaaggaacgagatcacgtcctttgcagggacatggatggacttggaagccattattcttagcaaacacgcaggaacagaaaaccgaacactacatgttcttacttataagtaggagctgactgatgagaacacatgaacacacagtgggaaataacacactgtgggcaactgttggggggtcaggcaagggagagcatcaggaagaatagctagtggatattgggcttaatacctgggtaatgggatgatctgtgtagtaaaccaccgtggcacacgtttacctacgtaacaaacctgcacatcctggacgtgtacaccagaactttaaataaaagttgaaagaaaaaaaaagaaaagggaagaaaataaatgttggttataattcagtggtgaagccatctggtcctgggcttctctttgatgggagaagtttgaatattgattcaatctccttcctcatttttggtctctttagaatttctgttgattcataattcaatcttggtaggttatatgtgtctaggaatttatccatttcttctagactgtccaattttttgacatacagttgttcatagtagtttcttatgatcctttgaatttctgtcttatcagttgtaatgacatttattttttattttatttatttgagtattcttttttcctcattaatctaagagtttattgattttgtttgtcttttcaaaaagctatctcttagttttgttaattttttgtaatttttttctggtctctgtttcatttatctctgctctgaactttgttatttcctttcttctgctaactttggtttggtttgttcttctttttctagttatttaaggtgtaacattatattgtttatttgagatatttcgtcttttctgacataggcatttattgctataaatttctgtctttgggctacttttgctacattccttaagttttcatatgttgtgtttccggccactaattctttatgctgtcacagagtggagattaatagataaatatcattgctatttattcttgtccaaaaaactgaaaatatgtggagaggctttggataaccacttggtagcagagaatgagagtgtggaattgttcctaagaagcaactgcctaggcaggaattacatatttcttatctcctttgaatctagagaggcctcattacttatttacaccagtggaataggaatagaaacgatgagtaacacttaccagccaaattgatcaaaaatcaggtgttgttttcctgtggtttcttccctgatccatcagctaaatggagaagactctaagatttttgacaaggtagaaccctaagatggaaagagtctgggtccacatagaggatgatctaatctggaatacctgattttgattttgatgtgagcaaaaatacatgacgccgctgtgaatcattgaaatggatgtccccaaatctcctcagccatatatttatacataatctcttggtattcctatagacaacttggtctaatcaattatgtgttggctgttaatagttttcaaaaataaatttatttttaagtttgaggtgctttttaattaatatatacttatataaaagtatttttataaatactttttatatatttataaaaaggtgagcaagtatgaatctgcttactttttaaattttggggataatgtaccataaaaacattaacatacatataaatatcttggaaggtagaaaatgggaattttacatgaaaaattaggaagtcagctattatgtattataacattgactaaaggtattttattaggaaataagttttaaagcttgaaaatatattcatggtagtttacaaaaagtatgtcaagatatgtacatatctggcacaaagattgcttttctcagaacccttttaaaacaaaatatttgattctcatagtgcctgtatatctgttttacacctaaataaacaagaactgtgaataaatattgccctgctctgaaacagaggtctaaggctgaaagcataaccctcattgatttgtaggggagctgttatagcctattagtaagaatgaccaagttacaaggtctaagggagtagtaattctgaagtctctgttcaaggaagctaaagcaggaaagaaataaagcaggctccagggaaatgagtgcctgcattattgtacttaaagcaaatgttcaaattttagagtgttctgaacccatcagttcaaattataattactaagataaattagtggttttcaaactatgtccaagtgatatcaccaggactgcagtgttacctcttaccctcacatcaggcatttgatgtaggtcgatgattatccatgaatccaagcaaacattggcccaggcagcacctttatgtgaaacaagcaaacaaaaaaagatttcttccaaggatgaatgtagcccaatgagtaatgtcttcacttagagcatctgggctagaaatttaccatcatactgagaggtcttgcactaataagcaatgttgattatgactccaggttgatttctcaggcacatcaatcaatcttataattctggttaccaatatgtgccacctttgtaggctagagacttatttctgagaacattaatcccaggatctcttgttttgccttcgcctacccctccctcaagtgtaagcatttcttactcttgtattctaggattgctgttcctattaagatagccttgtttgtatgatatgcttattcataatattgagatccaattcatgtacaaagaagacaatctgtgacaggaacacataattttaatttaaaaaatctagttactagatttctacatttaaaaaatgaaaaggccgatacattacccacttctagaatcaaaagagaatgttacccttcaatgcatcttagagcaggcctatatactaaggcaatcgtcatttcgtactacataagaaactgatattgcttctgtgtctcttgatctcgttatttgattttaataccaccctattgcatttctgcattcatcatattgtatctaacaaagcagactttaagaaaacctatgaatctcataatgcaaccagacacaagcacacaagacagaaaataagagttaactctttcagaagtaattacatgcattcaactatagcaaattaaaaaattctacctaataatattttttactggttaaaaatctttacattggtataaaatataggaaatgatttttttaaaaggccacataaacaaaaagtggtttttgtcattttcattgcctacaccagattacactcttcttttacttttctggcttacctgttgctgttttaggagagagcagatgcaaagagctgggacacaggctttagtaacaacgatatatcagtgaggttatgctacaataatgttttataactactatcgactgaagttttggtcccattaaaattcatgtaataatttggggataagtcctttatataaataatttggattaaatgaggtcgtaatggtggagccttgattcaataggttcatatctttatgagaaaagagaccagaaggctagcacttgctctctctctctccctgttttgggaagacacagagagaagacagccctctgcaagccagaaagagagcctacaccaggaaccaaaccctttcagcaactttctcttggacttttctacctcaaaaagtgtgagaaaacaaatgcttgtggtttaagccaccaactccgtggtattttgttatggcaacctaaacagactaagacggtaacaaacaaccacagaatctcagcttattactataaacatatttttttctcattcacaagtctgtaattcattgtggcattaatgttccaggctcaacatcaggtttaggtctttcttttggtctgacggagttgcagctcccaggatcatacatttctcatggatgacagtaagagtgcaagcagacaaatcaagcaccacaaaattctccttggatgttactagatcacgtctactcacattccactggccaaaatacgtgatgctatcttcaatgtcaacagggcagggaagtatattcctccaggaagaatgcaagtgggagtagtgaatatttgcagaacaataacaccatctgcctcactagttaacaacctaaatcagatactttttaatagttcctggtcccttaaaatatcagaaggtctggtctgaggagacaaatttatgtctcctctaccccaaattttattggattttggctgtggaacactgcagtagatgaatgttgatttttctacaaggtaattggctagaaaagtgtatttgaaatttgccacctatttaccaaatatatttcatattagaaagacgtgttttgtagagacctagacactttagctaaagttaacaaaatacacatctttaaatgtatagttaatatcactgtttaccattaataagttaaataaatcacacataactgacaaaattgacattaatttctgtaccttatggcatatggagaaattgacctctcacattttataaatttcataatttttatgtaaatgtttaattccaagccatgtcacatttgagaagaaaaaatatgttatttatcaccttaacactctcagaacatacatcctcacacacatatactcaggcacacacagacctgttatatcgtatacagcgccaagaatgtaagctgattccatcttggctaactataactaccttttaaaaactaaagagtcagtctattttccatccatttagcagttaaagagaatttatatttacttgtttgtttgtttattatggttatagaagctgatgctattgaagaaataataatcaagcttactttaaaactggctgagttacaggtttaattccctccttcacatttcgtgaacgcacaggaggagggtcagtgcccctcctaaccagaatgtcatttatagactaacatgagaattgcaagagaagcatggccaatagtcaagcagcacatagtggtgagaaaattctaaaataaggaatagccagggtttgctactagtgaacaacacacagtggggaggatgtaaatgtgtgtcagtactgggccaaagaaagatacatttgattcttaattcacaagtaaatgtgtgcccctctcatcggttctggttcacgaagattctaatcaagcaatttatctggttcatttctcatatgccctcatcaactgaagtgcaaagtctactcaacagccagaaaagatgaggtcagccttgaaaataagtgttggcccatttgcccaaggcccaaaagaaaccactgggtgacaaatgagatcagcctcttttggactagcctctacagcgccacagcaatattcgaaaggtgaaaattacagtcaagcaattcatttggcaccatttatagccctacctccaccacccaatgataaagttggttgacaacttcgttttctttttttcctgaattctttcttacatatttgtctttaccattaatcttgtatagttattactattaggatcctacagtctgctttaacctgtgtgtgaacatcataatttcccccttgagacttaaaaacaaatcaaggagtgaaagtgttcaatatttcctttagaatttactttcagtgatggaataagggaaaattttacctgggtatacagggcagaatgttgtattacatatattctgaaaataagcagagcatcaggatgagaaatttgaagtcacgggtaatgtctctacatgtgcattcaaatcagatgcctatgaaaaatgccatggctctgatttgccagaaagcttggttaaaggattagacatggagctagttagtattagccagtgcatgcaaatgtgcaagggtgaaccagtgaccagctcttcattcgtacccaatgcaatgacacagaagattccaactcagttatcaagacagaaaagaacaaaatccagtttatttctttttacagaggtctctgctatctgtgttactctcactcatctaactatttataagcaacaaactccaaatcaaattcagtccctaagtgattgaaaaagttactctcacaggtaggtcagaaaacaatgaacacattgttagaaatgacagaccctcctggttcttaacgacacagtgggtgctatcacctaactggcccaggcgtgatctggagcactgcttcatttgcctctttatatcacattgtgatgaaaactgtcacaatgtgcctctttaggcactgagcaatctgtgatttatcaaagtgccatcttgctgatgaactgaaaaacaaaacctgtctcatcaacaaccggagcattttgcattaaaaacgtagtctacaatagcctctaaaattaatcttccaagatgggtttctcaaagaaaataaaaatagagaatatttttcgtaaagtttcctagttggtattcaaccatttcaaatttttaaattctatctcatttaaacatgtttaactctttcatccccaattcttcagaacttcaagtccaatttcatttgtgagatgtcttgcacccatccccagacgcctgcctgcagcctgggggacatcaggagtccactcccacttagaaatagggatctcaacacctctgtgtctgattatgtgatctgtgacccaggttgagttcctgggatctgggaaacctgggaagctaaaggatgtgcaatatcattgcttttgatttgctaagtctggcatgagggagggaaagcagaaacagtaggagcaggagatgcccaaacaaaaacctcagactccccaaaacaattgtcattctgaaggactagaattcattgagatccgaggtaaaagtgcaagagagagtaagaaagtttgaaggggatgatgggaatggaggctagagccattcctacccctaaatatatggtaattatctttgaattgggaggaaatatttaattataatggctgcatagaggtaaagtattagtctagtggtaacatttaaaatgtggactcccacgatcttgtgtgcaaagtgtattcagcaggtacttctatctcaaaaatctttgcttttcttccactaaagtatctctgtggcagaggggcatcaacaggccgccccaaggaaaatttaactgaacttacttgttttatcaaacacacgcatccaaaagttttaccttatgtcatagcatatttgccagtgtttgttttcatataaaaatatagtttcaggccggttgttggctcatgcctgtaatcccagccctttgggaggctgaggcaggtggatggcctgaggtcaggagtttgagaccagcccggccagtgaaactccgtctgtactgaaaatacaaaaattagctgggcatgggggcaggcacctgtaatcccagaggctgaggcaggagaatcacttgaacccagaaggtggagtttgctgagctgaaatcacaccattgcactccagtctgggtgacatagcaagactccatctcaaaaaaatatatatatacatatatatatagtatatattatatatataatatgttacatacatatatattatatataatatattatgtatttttatatatagtttcaattagatgatgaaagctccatgatgtaaaagactgtgcttatactatttatcactatatcccccaaccctacgctagcacaaagcacgtatccttagtaaatatttgctgcatttatattgagacttttggaagatgcagaatgattatattgtggtttctcatacatactccctggaacactaatatcaccctctgatggtaaaaagcacataacaagacatgtccatggttagaataatttcttatggctaggcattacagaaagcaaccttttaagttttcaaaaaacaaggcagctttctggatctgtaatttcaatagcgtcacatgttagggactccggtgacaattgcttaggtgatgggcagcagcacttcttccaaagcaagatattgtcacttgtgtttgtaaaatgggtcttcatgtatactggactacctgtacttagtttcaccagagtttacttttttatactaagctctaagtcctcaggtacttaaatggaaagactatctcatacatgcagactaaggtcaggcattggagttgcctcagtgatacgccctcatgaaggaacagtacagccaggcagctgccagcatccaaatgcctgtcaccccaaggtggaaacagacttgaaatttacaggccaaggcataaagacaagaatgcctttattgactatgttttcatttggaaattctagcaaagaatctaagtgagataactttacttttcatagaaaagtgaaagttgttatcacctacttggattgggatgaagccgggatttttttatctgggtgatttcagtctttcatgaacatgttgctgaagctgattgccagggaacccgtgaactttgtggagtcaccatgcatgcgttgctaaaatggcttctacagaacaccaccaataaattctttcgaagctgatccagaaggcaagtctagtgaataatctgatctgatttatgagagagctctgagtttgttggcaaactgaatcatctttctctgcatatctttgttgccttaccaccaccactacattgcaaatatatgataaataattaataatggcaataacaatagctaacacttttcagtgtgtactatgtgccaagttttagggctacaagccttatgtggattatctcatgtcatccttgcagtaaggctacgaggtagataatgttattattctttatctgatagatagacatgaacctgaggtgagcgataattttataccttgctcaaggttatccaggtgatgctaggactctaacctaaacagtcagactgcggaagctgaactcttaactactccaagacaatctttccatgtctcctaactgaaaataaagttcttcattataagtttacaatgctctttggaaaaccaaatccattgtcagatttgcttactgtctccaaaggcagtattagcctactaagaccatacctctcagttacaatctttatttgtaactgcaccattttgttctagcttttgtaaccatatcattttcttgtttttattaccttaggttttattgtactggtaaatagtactaaaattaaatattcattaatatcctgaaataaatatcactgaatgagaatgcaatggtacattgagctattcgttgtcttagagtggaatgttaaaagccattaaagggttttctttagtgggctttctaaagcaatagcttcacttagagtggattattctattatattttatttttaaatgattagtttttatgcctcctttcatcctcatctgtcctcacagtttcggttctgatggggaccaagcagtctcatcttcaatagtagatgcaaaaatgtcagccatatgggggtgagtacttggtgttcatgacacgtatgtatcaaatgacaggatatcaggattagactcatctacaaaaagaagctgtattttttttctttccgtctgctgaagtcaattttatttccacatataattacaggttgggtttttaactttgtatataaataattgaaacatactatattttcttctgtataaaccaagtgataagccttcttaagtaccactgagattcagcttccaaaaaaaggttgccatgtcatttttctgatttatcaaagctactttgaagtaatttcataaagcctattaaaattaaagtaacctctaaagtaaaacatgcaatttttttttctctagcaaaaactttctctctggaaacaaagggtagtcaccagtgctcgtaattttcttctttatttttgtatgtttttcttgcaaatgcaatacaaaagctaaataaatcataatgcttccatatgcgtattaacctatattttcaaatcatttttgcttattgcattcctaaaacaagccctccaggtgatagtggttctcaagctggagcatgcatcagactcagctgaaaagcttagtaaagcaccaattgctgagtccaccttccacaactgccttcctccataatttctgattctgaatatagagggtgaggccaaagtttctagcaagaaatttcctagtgatgctgattgatattccagatttgggaaaaagactttgaaaaccactactgtagaagggaagcagggagaggggggagggtctcaaacattttctataaagggccaaatagtaaataatttagactttgtgggacatatggtctctgtggcaagcaattgctcaactctgcaattgtaacttgaaagcatccatagacaataggtaaacaaataattatggctgtgttccaagaaagctttattcatggacattaaaatttgaatttcatataatttttacatgatacaacatattattttttaatcactttttaaatgtaaaaaacattcttaactggcaggtcctagtgtagtttgccaacactggacttagaaggagagaataagtagaagcttcagtagtaaaatttatggtaagtgccaaataagggcctcacactaaaataaataaataaatagaataaaaattttaaaaaaagaataacagtattaatcccctcccccaccccaggaaactcatttttactgcaaaaagaacaaattgggagttccagagtcactgtgattactccaaagaatagttttgccaattaatggattggattatttatcattattcaggtttttaggactctgcaaataacagaatctgagactacttctcagattggtaaaccagttttgaaatttatatgatcaaatcatataaaataagaatcattccttttaacaggtctaatctcatacttgtaatgtactaacttattattccaatttggtggtagttaaagtctatctatatacacacactgggttcaagaatttcaaaatctgtccatttttaagaatcaatcagaaaatgtttttaaaaagtcaagtcaaatgttttgggtgaccttattatcactgcagctgctccacgtgtgtttagttattgttgttctaaaggccacctggagttagtaagcactagtagaaatggtccacctatttataaactatgtttcctaaattacctttctatgtctgagggtcatttttattggtaaaaatgtcatgttacttgccaagcatatttctgatcccttataaatgacagttattattgtttttacttatgtcagaaatagtctctaaggctggcctctcattgaaataatcaaatatttttggaacttcaaacacatcttcatttaatcaggtagctattgaatgcaataatctccaaggtcccttcgagctgtgaaataaattagttgtgaggctctgttcatggtgactataagccctaatcaaaaaaagaaaaacgacaaccaccacaaaatcctattacactggtgctcaaattttagtgtacataagaataacctggggtttttattaaaaggcagactcctgagcctcacatcagagaccctaattgaagaagtctagggccccaaattttgcatttaaaatgataccctatgtaaattttgacatatctggcccataaatcacactttgagaaacactgacttactacaaccaaatatgtaattgagcttgacagtagaattaaatttaaaaaaaaaataacaaatttacttttagccatgcacagcagtgtttaatacaggtactaacgaataaacaatctaaatcatagaattctacaggcatgatattctggatcacttctgttcagcatgagaaattatcacagtggaaaatgtgtatcaaaaccccatttgaagtcacatttgtggtctgatgtcactgaacactcataagtgtaatttttacaaggagagtctgttgagtgggtggagtggacaaagaagtagttaggtcaaagcgccatcaggcacttgtttcccgttcttcatgaaggacatcttcagttagagtgtttttccttgggctgcattggttgatgatacgtgcctatgttaattacctttccttcgatgtgatttgattgttgcaggtttccattgtcaggtatcttttgcctgagggaatcgtagtcaggtactagaacatcctatgaatttgaacaaggaaaaagtatatggccatagtcccaatctctgaccaagatccagttctattctactgtgttccctccttgcttctacacagggcaaagccagctcactccatgtagcccagcttagacatgagggcaattttatctttaccttatttccttcttagatccactccaagaaaacagattcctgttattattggcctagcagctttttaaaattcgggttgggggtgaggagggggtatgttagagtttagtttatatctttttattcttatatttaacttagaaattaaagcattgtgatgaccaggtattcttgactaataaaaaaagaatctcatagtatatattctaaattaaaaggacactcaatatctaaacttaaagatatacaatatacttttctttttttcccctaaggagaataattataagcaataatcaaaggaaattttttgatggcagcttaaacctgctatgaaatactgatctttctagtagcagtggtcccaaagataaatttaggaaacttctagtaatatttaatagtacacataaattatctggtttagctaagttgcatgttaaataaattagaaagtgattcacagtggccaagatagattttgctgcctagcaacacatacttagattcttaaggaaaaacagtatataagccacaactttaacctaattacactagtgtatgttctagaatttaagttatcaggcctatgattttcaatgatattaaattatgcaaatcacaactatcccctttactttgctgatatttgtttaaaagttgcttaataactttcagaatacctttaaactgatacatttcccaagtggtgaggtgatgcagttagactaaaacatgatataaatactttaaagatgcaattaaaatattttctcctaattttaataacaatattgcttttgcggtatgccaaattgccattaaagattttgtttgtttgtttgttttttgggtttttgtgtttgtttttgttttttgtttgtttgtttgttttttgacagagtctcgctctgtcgcctaggttggagtgcaatagtacaatctcacgtcactgcaacctccccctcccaggttcaagtgattctcgtgcttcaacctccggagtagctgggattacaggcgcgtgccaccacacccagctaattttttctatttttagtagagacggggtttcatcatgttagccaggatggtctcgaccttctgacctcgtgatccacccgcctcagcctcccaaagcactaggattacaggcatgggtcaccgcacccggcctaaagaatgttttcaatcacttcaataaatctttaaatgattttaggtaccacttaatgtttccagttgacataaaaaaatgaactatttcggattttattgaaagctctttagtacatgtcagcagactattttggaacagtttcaaaaagtgacaaattgcagtaaatcatctcacagcagctcaacaccactatagccattaccaggtagaatgcagggccttgtaaatgtctgatcacatatcaactcagggttttgtcacagagcagaaatagcaaattcaaatctatcagagtgagatgttccctttcccaatacttcactttatttaacttttttaaatgttgacgtattatatggatctgtaatgaaagaagggaaatactccatccattcgtttatcagacatttggctgtgttgccaagttatcactttaataataaaagaattgatcttagaagaagtgtgcctccattcacagaacatctgctcctagaagggggaaaatacctaaacatctctggatgaatgatcacatgagaaaacctcacaaaacatgtactgaggtattacgtgtaagaggaaatcatttttgcttaattcggatcactaagtacaactggccaagttagtagtttttataatcggttatgttactgtccaaaccataatgattttctacccaagaactggcagtctcaagccttcctctctctgaggatggatgagtcaactgtttattcaaaatgtgtgaccaaattattaggccaattattttttaataacatacaaagtttgtgaatgcctgatgtactaaactctgaacatagagatatttgaagagacccatattgggatgatctcctgtgactgttaattatgccattagaaaacattcggtctttaaaaattactatgattaacatccacattaccatcaatgattttcatcaataattttaatttaaaggggctccctttcaatgcctgatctttacttggaaaagataatagaaggtgataatgagttaaacatttattcaatataacgtagttaacatgattaaataattgtagaaagtggaggcagtgtcagggtgtggaaggaacattgtaataagagtcaaaattgctgaattctaaccactgactgaccagctgtgtgactttaagcaagtaatttcattttctatgtatcaaatccttccattacaaaatgggacaaatattttatagattcggcataaacatcaaatgagatggttgctctgtcagggtctcagagatgaacaaatagcatgctccaatgaggaatttggggagaatttagtaagcagtctatttgcaaaggggagaggagtagaaagaccaagtggtagtgaaatgttaccatccagacgggtgagaggagagaatgggtactgtaacacagagacagaaagctttgtggagagaacgggccattcccaggagctctggccttcctctgaggggtacaggtagggtctttggcaagcactccctctctctgctcctactgtgttccctaggggttgaactcaacaggaagccagaagaccaggaagcccaacaatatggccctgtagattaatcttccaggacacagagccagatgaatgaaaagaatgaactgagaggagcaaatggaaatatacaggacagatggggtatgtgaaaatactttaaaaataaaaaccaccagaaaaatagaattcaattacaggagtcagaaattctgaattctttcctgtcctctgctactgtatagcttcagataaatgtagcagttcctttttatatcaagtgatgtacagaagttacaaacatctctagttaagcttaaacatgcaatgaacactattagaaaatattaaaatacaacaggcaatttaaagactaccaggtgaacataagtcactgctaactttggcaaaatttctaagaattgatttcatcgccaaaggagtaaattaattttgaagttgctgatggcaaccacttacccgtcattgcattaggactaagttcaaagagtgatgaagaaaatatatttgtaagaataaaactcccaagctcattctaaaacctcagctagggagactataactcactgctcattgacccacctctcctgtcccttatgccagtcatcctggtggtcctgttactgggcctctcaggagggaggcatcagagttctctggagatggcgccagcacacctgcttgctgctcttctagggcttctatgggatttgcctctgcggagcttaaatgataatgagcctgcattcaaagagcacctgtccacaacccacacttgttttgcagaactgcagatggtccctacaagcacaaggaacagactggcacattgaattactcagttttatcagcacccagttttaatttcctaatggagctctactaagataatcgctataaggatgaatatgtctatgtagcagtcaaaccacatgccttgcaggcattattattgctctctggtagaaaggggacatgagaaagccaaaactattaatctattaatgataaacctccacgattcccatggcccaccttcatgccccaagcatatattccagaataaatagttgactttcccagaaactttgttaataactattatatagagatatataatatatgaatatgtttatattaatatgcatgagataatatataaatatatgtttacattaggtatataccagataatatatttataatatataaatctatatttatatcagattttttaatgggtgttggtgtgaaagggattcttcattcttcatgatgtgcactgttcccggagatttggtctcaattatgtaaagaggaaacatgggtggctaaggagaacagtataatgtattgaatttatccttttctggaactacattttagtgtagtggaaaaataataaactactttgtggcttattacttccagtgctaataaggttgtctataaaacagaagctaccattctaaagtggtcaaggtaggataaccactataacaaactacccaacaatttcactgcattaaaacaagaaacctttcttaattacctgtgttatggtccagtgcaagtatccaggtgccgtgttccatgaaatgactcaggaacctagggtctgtagtgcctcaggggaatagtcttcccctgaggggagaggaagacggggggaggagagagaagggggagggagggaagcaagcagatggagagagacagagagagagagagaagaggaggggaggggaggatgggagagaagagaggagagaaaaagaagaagaagaggagaaggaagaagagaagggggagcagagagacagagacagagaaaaaaatataagtggaatatttacaggatttaaacaccaagcttgaattccatataattttgtttatatgtctttggcactcaatcatatgaccgaatctaatttctaaccacaggggaaattgagaaaggtagtccagcttcattcccaggaagaaaaagaaatgggagttgttaaagatgtagcactgtttggccgggtacggtggctcacgcctgtaatcccagcactttgggaggctgaggcgggcagatcacgaggtcaggagatcgagaccatcctggctaatacggtgaaaccccgtctctactaaaaacacaaaaaattagccgggcgtggtggcgggcacctgtagtcccagctacttaggaggctgaggcaggagaatggcgtgaacccgggaggcgaagcctgcagtgagccgagatcgcgcctctgcactccagcctgggcgacagagcgagactccgtctcaaaaaaataaaaaaagatgtagcactgtttctgtcacagtggctttccaatccccagcgtcttgaaagagtccagagtcccggttgtcatctgaatgttgctattgcttggactgctgagcttttgaatcttggagaccctcagatatttttcaaaggttatatctgtccttctttagtatttctctctatttgatttggtgttacacaagaagacaagtataaaaaaaatagtggggatttaaatatgtgggtatgtacacatataccaagggttagccaatacaggagaaaataaggtggggtgtatgtaatctatcaagataaaacactgcatttagtcttgctggaaaacagccaaacagggctttttcttttttttctttttctttttctttttttttttccatgcatggatttacatagtgacccaactcctatgaagggactttttctttagttcctaatagtaacttcattccagaaatgttagactcttcttcagtcttacaaactgctcattgactttggtttcctgactataataaatcttttttcaaacaaaataatccattctcttcatcaagaacagcgggaggtatatatacaattatactagatattcccaccatttccgtaatgaatgcaaatcatggacaaccagggtactaggactcttcaaatttatcctttttatatttttacactaattagtctgaaatattaaatatgcatctccctaagggtagaatagttcaatcacaacctcatagaaagccactgttgccggtacagtggttctctcagccgtggttgcactttctgcagtttcaattacctgtggtcaaccatggtctgaaaatactaaatggaaaattacgatagaaatagacaatgcataagttttaatttgcaccattctgagaagcatgatgaaaatcttgtgcagtcccactccttcccacccaggacatgaatccaccctttgtccggcctatttataatttctaagctacccattcctgagtcacttagtagccaccctcgactgtcgcggtatcacagagcatgtgttcaagtaatgcttcttttacttaattgttctattttgttatgagttattgttgctaatctcatactgtgcctaacttataaattaaactctatcatagggatgtaagtacagttaagtcttcagttaatgtcatacataggttattgaaaactgggactataactgaaacaatttataagaaaatcaatttttttcctcatcaacattataaagaaacaattttgaactaaacgatgttatttgaggacctgctgtatgttgttccactttaagtcacatttccaagaacctgtggatgtcattgaggacttactattacagaaaaaaacatagtaaatatagggttcagaattgtctgcagttccaggtattcactaggagtctcagaatgtatcccccacggataaggtgggggcgggggggaggggggctcctgcatagctagtaagaatagatgatacccaaatttggatttgagagtctatcctggctctgctatttagtgtctatatgtttttaagcacataaataagtaaatataataccttaatgaagattactgtaactattattgttattatgctattacttagtgtctagggtagttataataaccaaatataacattaattgtgtaaaaactgtaattttagcctagaatggtagcattatattaaacataaaagggcctaatttgttcattttttaaataaatagatatcaaaaaaatgcttattaatgccaaacattattctagataaacaactctgtgttaaaatacagaactgtttagttctgaattaaaatgtgtagcataaattaaattactgctcataacgttcaatttgtaaaatcaagttaaagaatgtaccttaaaactgtggttattccctccccacacaaacacagatgtcatctttccttggcacaatgaacacactatacttttaaaaagttaaggcatttattaaaagtgaaagaaatgggtaaatggtcacaagtcacctttaaaataattacagaagcatattttgtgatatttcttaatttctggtagagctattctaaaagtaagaacttcctctgattcaagatatgtttgacttttaagtgcaaatagtactcaataatgataataataattgtacataacagtcattgagaacttctttgtgtcaggtacataagctatttcatgtcatataaataattatacttaactctcaccacatctcaatattatatccctatttaggagatgataaagctgatgcagatactgtgtaatataattgattttgctatttctttttatagtcagataaaagagtcacattttgggaagtttttaggtacagtgtttccagaagaaaaaaaaaagatttctttgcctttgatttaacaggtattattcatctgctctggtctatcataggagaaatgtcttgagctttagcatcagacagatctatgtagtatctcagctctatcccttaacatctttatcattttcaacaagtaactaaatatctctgacctgttttctctgctacaaaatgaggtaataatacctgatgcatgaattcttttggggaaagtcaaaatattatataatgaaaacaatggtcgggaaatggaagatgatattatttagacctgaattgggtctggaaataaaataagtaaagaacaactttattccctgctctttgtggcttgtgcaacctcatgagacaaatggatgcaccaggaatccagctgtaatatacaactgtcagagaaacacttttaagcaaagtacaatgtcctgtgagagtacagtaatgattaattttgatttgattaacatttttgcttaataaatttgttatagtaaataaactaatttgtttagaaaacagcaccagtccttgttcaacacatttcataaagaagttcatccatggtttcaatatgcacccttgattattctatggagagttaaataataattttataactttggagatattaagaggggggttatatatctcttcattcagtctcctatatattcagacagaaaaactgaggacaaaataaagcttcttgacaaagtttgccaagcaagttattggtaactttacaacttctcaaacccagtttgatagcatctactcaattaaggttttcaagacagaccaagagaatgatacattaaggcaaaattgtcacacctggtttaaaacaaaatagcccaaggaaggttatacagaaaccttgaggcttaaatataaattattgaaacaataaaaataaaatttcatgtattaaagctgaaatgcagctattataacaagaatcaataattcctcttcaatagcaatttgccttacttgattctgcattccagaaacagtgaaaacatttttctgtgattccattagcaataaattacatcttgagcaagtgaaatcatgtaaagtggggcttttgtgattgttgaaaaagctaatgctttatagttaaagaccaaataataaacaagaagaaaacatcacctttctctcactgcactgccagtggagatctagtttatccctgagcaagccaggcacagagtaaatcccctaccagttgaaggcaatcccaaataggcatttcacccattggaaatacacaactccaatactgatagggtttattttacttccaaaattcttccatagttccattttctttttacatttatgttaaacttgtcatatagacaaagaacataatgattgatgttttgatccttttttcaagaaatttatctacaggggcaaatacatacagataaactgctgccctctttgaaaatcttaaactactacatggaaacactgcagttgaaaaatttttaaccattggactatttgttttactaaaagagaattaatttttgtaaaattaagttactcttgatttcacatattatcatttcacttgctagtctttctctttttaaccttttttctagaatctaagtagtgattatatttgaggtgttccattaattgcgttttttaccacttttatctacatttatgaaaatgagttcagatgatgatttgaaagtgtttgtattttgtttaatgagaatctacagcttttaaaaattaacatatataagtaaataataaagagaaaaatgttttatagaatgctaccaacaccttataataaagtaattaagccatgttaatctaaaaacaaccatgaccaaaagatgttaattagagacttaaaaatcaagttggaatgaaaatacttgagcttctagtgcttgccatttttttctccttaatgtgaacataaactccttaccacagtgaattactcagtattcaacatttgatgaagttgtaaaagctgagaattcacctttctatactatgacggtatgttatgaggttgagatatttcattagcaaaagaaatatgttgttctctcaaattactatgtatgtgtgtgtgcatgtgtgtatgtgcatgaacacatgtgcatgtatataatttataagatgatttcacatgaaaaaataacgttttattgtcatcattaatatttaaatggttgtcataaactaatgagcttattccaaaatgcctgctcaacttttgaagaacaagagggatgacagaaaactgtggggtttttttcaagctgaatatttctagttgtgaccaaatgtagctgctattctatctttaaactattaaaaagtatgtaacaaaataaattgttacaatataacattcatagccaaagttctaacataggatatatgctcacaatattttgacccaaataatcctgcataaagtgagttcagtattggattaatgaattactaagcatttccttagtaattagcttcaaatccaatattttccctctttagtgtctcctatcgcacttagccaccttctgggaatgtaacagaaagcattgaaagccattttctttctctccagcactaactcttgcaatgagaattagtcaacagcaatgtgaagaagtcctggtggcagccatcacagggaaaatgatctcatcatcttcaatcctttaaactctgtgtatacacacatcgatttgggctgttttattcaaaaaattcaatccagaactagggaggttaaatgtttctctgaaccaaaagattacataggaagtgataaatcaagagatattgaatgtatttttctactatgtacaaagtatcatactaggtgccagaggaattgtttgaagtctaaaatcttctgagttgaaagcatacaatcagagtggaaagacatgagtcctctctcagttctgcaaattgaggcaaaatatgatacgtctttaaacttaggtaaagttataattccagacacaactcactaccctttacctcaaggaatttatgatctcattaacatagacatgtgatctcaaattaatgaaattcaaggtaaagcatcataaagcgcatatgagtccatgactgtgtcattgcacagaaagggcctataatcattgattatattgtggaaacgttccttacctctgtctgctaagattacatcctgtgacataactactgatttttatgtaccatttctaaaattattgaacaccttcaatgtacccggcagtgttttaagggctgggaatatagagtgaaaacacacacacacacacacgcactccaaataccagatttcaaggatgatacagtctcttggtaggaatcatgcaataaagaaataagaaagtaaaacacacagcaagtcagatgatgaaaagtgctatgaagacaaaatagccagaggaagcagccatgagtgtcctgggaggagaaagggagagtctccactgggccttgtgggcatttcaaatacctaaatttttactctcgataatttggaaaatcactgaattttgtgtggaaagagatgtggtaccaatttaaaactatcaatttggctaggtgagaatcagagagacctgtttggaggctactgctgtattccagtttagcaagcatagaccaagtggaggtgtgagaaggtaaagccaagagaattgctgatagattaacagatgggaatagaggaaaagagagtcaagaatgattctacgggcgcggtggctcacgcctgtaatcccagcactttgggaggccgaggcgggtggatcatgaggtcaggagatcgagaccatcctggctaacaaggtgaaacctcgtctctactaaaaaatacaaaaaattagccgggcgtggtggcgggcacctgtagtcccagctactcgggaggctgaggcaggagaatggcgtgaacccgggaagcggagcttgcagtgagccgagattgcgccactgcagtccgcagtccagcctgggcgacagagcgagactccgtctcaaaaaaaaaaaaaaaaaaaaaaaaagaatgattctatatgaactattggaaactgcaggtgccaaagactgcaggagtagcagatttggggatggaggtaaggtgtggaatttcacaaatgttaagtctgagagatctattagagtatggaagtcttcttgctcaagctgtatagagtcttacccagttccctttcagtgctgttgtggtctgggtaaattgggactgtgttgatgcccttacgaggaagtgggagcctttctcattctacatgtgcacaggcagctcagcccctgttccctaaagccctgtgctgtttctcctgataaaaaacaattgaaaagtctgtgtgcagcatccttacagactcagtggccatacatgactgcgattgttcagtaaccgaacaatgcttctttcatattccagtgtgatccaatagtgattttgacacagtactcacatctaaaatccctatgtatccatgtcttcaaaagtgagtttttttataacaactcatttaaaaagcttcccttgccatgcacacattactttgtttatgaaatatttctagaaattcccttttgcttttctttcagtgtatacactctaattcttaatttcttaaaatgaattgaccatcttatattaaatggatactgaatccatattatttatttgaagataatgttgattaatatttagagagctccaagttatgcaaaataaatgtccccggggagcaggttattaaaataaattttaggaaacttgccaagcctggaacatcgtaagaataacctaggaaggagtctttaaatattcagacaacatcaccatctatctgccagccaacacctgccctacctctgtgtaattctcttccaatggttttaggataggccctggaatctgtacttaacatgcattcatttgttctgattagccaaatacagaaaccactagaaaaggaattcctttacatctgtaaaaataaccctgattgcatgatatgaaatagatgagaaataatattattaaaatatcttctattgaaatcactacccttagagtaacttaaaaaatgaaaaaagaaaaactaatgtcttttgtttcctgcattggactttatctgatatgcaaatgaatataacttaatattatatatgccatccctattctcagcatcaacacattctccttcttttatatagcacttaatcatatattactctttgattttaaaaacaaagtgagtatctagccctatgtattttgcacacaagtattagtgttgtgtagtccattcattccctatagcatgggaagaagatttggaatctgcaacattgcctacagttcatttaattatgattgcatatttggttagggacaaagtaaattgaatgaagcattaaaatcaaacatccttttaattaaattagaaagagactgacttcttcttattgtttatttttattaatagaatgagaatactatgtctccaaagaaggtgtcataattcctttgaaataaagatacttttttccagctccattgtctaaaagcttgaatttgacccatgtttcatctagtttaatatttaataatttcctctgcaagaagactttcaatgcataaaatgttgtataaattattattggtactgatgtactttatgtagtaatttgcacatttgcagattaggtacagatggactttacccaaatcatgcaagatttaggaaaattcacaaccttcaaaactagtggccaggcctggcatggtggctcacgcctgtaatcccagcaatttgggaggccgaagcgggcggatcacaaggtcaggagatcgagactatcctggctaacacggtgaaaccccctctctaccaaaaaaatacaaaaaattagccaggtatggtggcgggcgcctgtagccccagctactcgggaggctgaggcaggagaacggcgtgaacccgggaggcggagcttacagtgagcctagatcgtgccactgcactccagcctgggcaacagagacagactccgtctcaaaacaaacaaacaaacaaacaaacaaaaaactagtggcccttacttaggctcagtagactaaacaattccccctcaaatgaaagaaatagtacatctgtctttaaaattcattacaacaaagcatgaaaagccttatttcactgatacctctgccaaattttaaaaattttaatgttgttttaagaaacatattttactacatgaaccactacgtacattcatctccatattatcgaactctcataattaagtcaccaatctcttatggtaaatatttgaattggctattcatatatgatatttacaattgagattttttatacagagaaactctttgggcatatactgatatttcaattaattaagaatagcattacatgcttttccatacttaagcaaagtccaagtaactattactatgtgtacttctctgtaaaatgacaattttatttatggagggaaattctttgacaaatagaatatattatggcaaatagaatatatatagcatggtgtggagtttttacaatggtaatagcgaactgctacaatctgttccatgggatattattatttgaactccgctatttataaacaatatttctgacatatctgttagctgatttattcatacaaatttgtataggctgtgaaaagtccattgtttctagtcataggttgtcttattgctactggacatgcattcttcaaaatgatatttttgttcctccacaaatactaaaagttttcatactaaaatctgaaagaaaacagttaaattgaaatcagacttaatttgcatcaacgtgtaagtagagcagagacaatgcaaaggaaagaaggcatcaaaagcaccagtatttttggagtttgccctaagtatcattttttattctctcaactttttactcctaacttcaacttttctatttcccttttccttcccaactattttttcagacttttccatcctacaaaagcaccggatttgtttttttattcttttaaaaaaatcttgtattagaaaagaaaaatgacaaaattaaaatttgtaccaggaaatgaagatagaattagttattttactaaagggttcgtcataggatccattaaaaacaacggcttttaaatggacatttgattcgtaagtaattttggaatctgttcctgatatacgatgctaaccatcctaaaaaactggtacccctgaggccagctaggtgaaatgactaccccaaaatagctcagcaacctaataaatacactcaatcaaagatttccattcaatcgttatccatacgcaacacccaggtaatcacaattcaggaaggtcagtaggaaccaaataatattacatacatatgtagagattcagtctttaaaatgattcccctcactttgaggtaagtctcaataagagaacaataaatagatgaaagagaatatataaacactttttatgcaggattcctactttcattcctagatattgattgttttctggaatttactgtaacactttgtccccacaaaatatatatgacctctgttttacacaagttgtagactattaaattagtaacacagtgaaacagaaagatgggtgtctaaaattgttaagaaggattctgtttacgtgacttggaattccaatgaaacttaactggagaaactctttaattttacttaaaattttgatgttttattataaatagatgaaaagtaaatgcccaaattttcatagtaatcatttattttcatcatccatcattaaattagtttccctatattttgggtaaatatttcaagatctggacttactcctgtcaaaccactcattattctgaaattacctgtcttgtttgtacattgcccaagcccccctgaaaataccttcagtgcaggaatagctttttcagaaatctatccctagtacttaacataagatagacaagcatatcttaataattaaaatgatagcaatgtataacattaagagcctattatatgtcaggcactcttaagtgcttaatatatcttaactcataccctcagatattgttgttacacctattttacaaataatctcaagcagagagaaattacataacttgcccagaataaaaaaactggtaagtggaaaaactgaacttctggggagtctgtactcctcaatactatgctgtcatgccttgagtataaataaatccatggtaaatattttctggttggacaaataactacaatgtcaatatgtatgtgggatgtagtcaaacagtatattccagttaaataataaagggaaaaaaatctggctagtgactaactcaaacaattgattcagagacaaggtatttgttagatgtaaggtatcttatagttttgttggagtggcacagctaccacttaaggggtagcatattacctatagtgatataaaatttgtaaatctggtcattaattgaacgatgtatcagctgtcagaagctaaaaggaccaagacttcctatggttctattaggaaagtaagggtggaagataataactaaataaatacgtaaataagaaaggaggaagggaaatcagctgagttacacgaatcgaatatttaattctcttatttatttatttatttattgagacggagtctctgttgcccaggctggagtgcagtggcacaatcttggctcactgcaacctctgcctcctgggttccagtgattctcatgcctcagcctcccaagtagctgggattacagccgcccgctaccatgcctggctaattttggtatttttagtagagatgggtttttgccctgttggccaggtgggtctcaaactcctgacctcaggtgatcaacccgcctcggcctcccaaagtgctgggattacaggcgtgagccactgcgcccggcctaattcgttattagataaagccttgtgttaggactgcttgtaagagcagtactctcactaaatgtggttgatgtggacatctgtggaagaatgaaatacagctttatatttcccaaatagaatcttctatagtttgcttgctaagtattcatttattatgactttcataagtccatttggaatgagaaaaatgatgttacatttaacatttgtttagacttaagattcataattttaaaattatgctcagaccacagtgaaaaatactgctattctttgtatactacgctaacttctctgctctgctgtgggcagcgttagccacaggaacacagctgcaactacaatttatttagtcttttacacgaaacctaaactccacttttatctaatcatactgagttctccaaaatatttgataggcatgaatgtcatcacaagtattgtatacatgaacactcaaaaagtcgtatgatattcagaaagctgatatatttttaaagcaactacatgtatagactattatacttacagcccccaaatctgtttgtgctagctaacttcctggtcatgttagccttgtatcatttagccacaaaataagtgagataatgggccatgatgttattatgcatacgtgtataattgaatatatgttttgtatagtatgcaatagaatgtaggttttgacatatactcctgaattatcatcagtcatctgtttactaatacttggacagtatgtgcatgtatatgtgtttgtatatgtgtgtttatgtttctgtgcgcaaatgtatgagttcggaaggttaaaggagagctaatgacctaaatattttgaaatatagatatacatacctcatatttagaaagacctattaacaatggtaaatattatgagttttattttttaaattaaatagccaaagcatcatggtcacacacatgctttaagctgatgatccagcatctatgttgttcatgtagtaaaaccatctggcctcaactaaatgcatataaaaatacttgtcatgcccacatcttttttaaaaaagtacagtattggtaagtttatgaatttattttagagcctaaataaaattggcagccaatttggaaggtatcaaggttaatagaggcaaaagaagtaggaggacagagagcttggggtaccttgtagaccagatattctagtagtggcaaattctggcaaagttagaagatatacgaaattcaaacagggtgcttccttttcttccttttgctaaattcctgtctgtaggcatcacctctttttttccttcatattttattttttctgaacttattttctttactctttcccgaggtaatctcttccagacattcgatgaaagactgatacatgtatatataaatttacacctcccgtcttgaccactacctttggctcaaatatgaaagctcattcccttatttagcatatatctgaatgtggtatagacatctaactttatcatgttaaaaacagaactttggactagtctttactaaagtggaatagacatccattatcattgattgctcaagtcaaacctttcagttttgtttaccaaacatttctcccttgcctaaggaccccttctgtctaaattatctgcaagtcttgtcagttatagcttcccagtatattttatatcaattcatttctcttcatacttacactgtccacctagttcatactaccattatctctcactgtttgttatgaggttaactaactacagcagttctcaaatcatgtcattttgttcaacgttgtttcattataacattgatgagaaaagcaatcaattcccagctgggtcactgtctatgtggagtttgcacattttccccatgttggtgtggattttttccaggtattctcgttttcccatacatcccaaagaagtgcacatgaggtgagtcagcatgtgtacatggtcccagcctgagtgtgtgtgtgggtacctgtgtgtgtatgtgtgtgtgagtgtgctttgcaatgggatggcaacctgttctgggtttgttccttgtgcatgtgtacatggtcccagcctgagtgtgtgtgtgtgtacctgtgtgtgtatgtgtgtgtgtgaatgtgctctgcgatgggatggcatcctgttctgggtttgttccttgtgctcttagatgctaggatgggctccagccacctgcattcctaaactggaataaatgggttaaagagtgaatgcatgaatgaacgaatacaaattattgtcaaataaaaatgtgtaggattacaataatcttacaaatgcacaacaacaaatgaagcagtacaaaagcattcagtgattgtctttgagctgtgagacaatagcaagaacttcttaaaattttcactttaccatcaattatttcctgatttaccttactaccactacaactaccatcactcagtgattcaccaaaaattgagtgactatcttgttttcattaatctttcttaaatgtatatataactcacattaatttcactgtttaatatttgaaatgttttgaatctttatttagaagtttttctaactttttgtgacaataagtatgccatagaaattttaatcttgtttatatcagttaacctatggtaaaatcagtttcattgtatgtcgtttcacttaaagtcacaatttctaaaaagctatccttgatataggtgaggacttactgtattcagcttatattcaaatattatggcctattggacagtgttccttctgaccggttggcaacttttctgattgataaatgccaaaggctataggaattgctaaatgttttgaatcctgcccctaattcctctgtcgttagcttcagtgtattttctgcatcactgaccaagacattatcgatctaaaataaattgtggcttatatccccctcctgcttaaaatcctacaaagagtttccattgctcctaaaataaaagcctaactcctagctttcctttaaaagctctgtataatctggcaccaccaacagggtaaatctcatctcttactattcttccctggttggcaatgctgtaggcatgataccctccattctgtacctggagcaccctaagctcttactcatcttaacacaactgtcccttctgcctggaccattcaccccttgctgttcacttggctggctccatttctttcatgtttcagctcaaaggtcacctcctcagtaaagtcatcacagcctaaaacaactttaccccattgagtctttatttgatgatactctttatttgttgtttgtgtgttgtatgtcccctctcttggagtatatatagttctatgagggcatggattttttatttctgccacacataattgtacctagtgcttgaaacatagtacatactcagtaaatattagctgaattgtttagatcagtgattctcacctgggaggctatgttttctaatgaaattattcaagaagtatttcttgagcacctattttgtgccagatatcttgctacctgttgtgaaactaatataaaaggtaaagtccttgccctgaaggctcatagtctgaagtgggagatactgcttttctcagacaattgcagcactgtgagggaaatgctaaccgagaggtaagcacaggtactgtgggaagaaagaaagtcaaactgcaactgaatggtaatggagtgagagagcaaattagagaaagccttcacacaaggtaattctcacagtatgtcttgacaccaagttgaaatggctttaatggtagaaatatcagcccttctctggcagcgaggtgctcccatgacaggaagtttggctaggtaatataaagtcaagcagggatttgttagactctctgaccatactgcttaggagtggcccactctgctaagtaaggagccagttctgctaaggatagctgctctactgttgagaaatccaggctcagataaatttatattgtcatgggtttttttctttttacatttgtctttttctgttagactgagaagcttaagggagcatacagatgatactagaaaatggatagacagtggatgaagggagggatggcaggaagacagaaaaggaaggtagggagaggaaccagttgctcaatacagcagtctcttgttataacgagttaacaaaatagtgactggaattttcattgtttggattatttcctgctgtcaagtatgtccagtggttggcaacttttgcaacaattttaacatctgtgtaatatagggaaaattgcccagatttgtgacttctttgtggttttcctcctgtaacatttttggtacaaacataaagccttataaactggcaaacaatgcaacaaggctgaatggaaactggctgacttcaactttattatttgaggtcaaaaagaaatgaggcttgaaatagcagccaccaggtctgaactcaccgggaatcaaatgaagcagatttggtatgagctgaacagttcggttttgttagttctttgtatttttttaaaggcaattttagagctgagagtctataattgcttgattgtttttagtcttataattgtcttgaaagcaattatggccattttgtcatttcttctctggtctaatttcagtctgtctttgaccaaccatattagaaatgcatcagtaaatatattgattatatggtggtatttttgcatctattttaagatagttatttagataaatctaggaattctcattttggcacaaggaaatgattagatagatagatagttagaaagaatcttactaatatatgtaagtaacacttaatgagaattatcttaaaagctactttttccagtatttgttactatccaatacctctcccaggaaaatgtctactgttgcatcaaaggcatctatggcataatactttataatgtgtgacatatacttaaagttgatatgactgatgttcttgtttccttacacagatatgtagataaaaggtaattatatccatgattgcttgatgccttgcttactagtggtattaacttcctaggcagtttaccaaaactacttaacctccctcccccaccccaccttttagacaatatgcctacataaaccaatagctgcccactggtcaatttactttttctgaggtgtgctttagcttagatattctctttgtctcctattcatctgatatgacatcatgatttcccactcacacaatgtggttgactgtgattcattgtggctattcctgttgacccctcatcaaaataatttttgatattctaaatttgcatgtgatgactttggaatctacctttcaacaaatgttgtcttcctttcattctggaaatattttctcgtataatttgatgtaaagtaaagcaagctacacccttttgttctgaaatacccaaggtttcactcgagaaagtataattgctttttaacctctaagatataatatgttcagtttttatcagtctatgggctggttactttgctaacaacatgtggctttcttgatgccattggaaaaaaaaaatgtttctctgtacatatctgattgtatgtagctgaggcagcagagttctgtattctctttctaatctggactacaataagcctggtgattttccatagcatgtagctgtcagtctactgatagttaatatgcgacttattgtactgaggagttaaattaaaaatactctttttatatcatgcctaaggagaactggaaaggacacacacagcttgctgaaggggaaatggtgctagcatttcagagaaatgtcctagctccaacacctgggtttccaataccagaattgcatttttgtacctgagttggagtgacatggcacagatggcatgaggccatgactgcatgactgaccctaaatctaaccgcaaatgaaaatattagtgtttcagtgttcatcaaatggcagacacttttccaccaaaaatggaggattctgctgcacaaacagagcagtcctgcttcggttctcatttctccttctgtccaaagatatcaggcttgctaaaacaaacaaacaacaacaacaacaacaaaaacagtgaatttaagtgccttgtggatatagcaatgccattttccccatgtcacaaactctatttctttttaaataaatggtgtaactgtattaatagtggtaggttaccctttttgtacaaagattatttttaatcatcactggaaatgggattgggtttgtactgtttatccagggaggagatgagttttcccagaattgttcatacccttgcacgttactccatgcactggcataaacattagatgagagtatgggtatagtccatatctgtaaaacagaacgtagctaaatgagaaacacaggatttcaatccaaggttatctggacttctgagccaaatcaccatatgttcatgtcatgtactgcggcaagtgtcatagcatttcaagatgggaggacacttagaaatagtgaagcttaaaatcctcttaaacatttagctaaaattatgttaggaatgaagaggagtccaaaataaaacccaagatggagatctgactaaaaaggaaaaaaatagagcaatgccttctgatggttttcagatttaggctaattctgcattcataaatttaggacatttgctgactcatccatttctatcatatattaagattcttctttgaaatattatatatctttgattttttgtagttatgtagatagaaataaacaaaataaaatagaaattcttgttttaaaaggcaaaggatcctcccatataggtgtgtctttccaaagacaagatactgaataagtgttgcttctcttaatcagcaaagctagaaataatatctgatgagtaacaataactcttttgtaacacatcatttcactgtaagatctcaggaaaccagatatcactgaggaacatatgaagtctgctactgttaatcatgaatcacttttcaaggatctactttttttgttttctatcataaatggctagtaccttttatgggtggagtagagagggagtctcccctcatgtaacaaattctgggaacattaaataaatagtgatagcaaatatcttgatgctcattaaacttttcttgggcttgtagactacaaaactctttagagagattcctacattgaataatattgttcagaacatgagccaaaatatatctgatcaagtttttttacaagaatggagattttctttattttattttatttttccataagttattgggatacaggtggtatttggttacatgagtaagttatttagtggagatttgtgagaacctgatgcacccatcacctgagcagtatacactgcaccatatctgttgtcttttatccctcgcccccctcccacacttcccaccaagtccccaaagtccattgtatccttcttaggcttctgcgtcctcatagcttagctcccacaaatcagtgagaacatacaatgtttggttttccattcttgagttacttcacttagaataatagtctctaaactcatccaggtcattgcaaatgctgttaattcattcctttgtatggctgagtagtattctatcgtgtatatatatatataccaaagtttctttgttgattgatgggcatttggattggttccacaattttcctattgtgacttgtgctgctataaacatgcgtgtgcaagtatctttttcgaataataacttcttttcctctgggtagatacccagtagtgtcattgctcaatcaattggcagttctacttttagttcttcaaggaatctccacactgttttccacagcagctgtattagtttacattacaagaatggagattttcaaataaaaatactttttgtcacatttccataaatagttggtgactatgacagcatctatgccatgtttcttatgttctgtttactacaagagaaattatcctgactttcaataagtatttgaactgaaaattggactcctggaggtgttatataacctctgtacgttttcttttcctcaccgctaaaagcagataataataatatcttcattacagcattgttgtgacagttaaacaaaataattcctgagagtgattagtgtattgcttagcacttagtaagcaatgagaaagtgatagttcttagttgcattttagattcaagcaaggaagagtttctaacagtgataccaacccttggaaacgtttagacttagctgtcacaatctatggaaatgttgtacacatgatccttggaaaatctggcctagaccagtagttcccaaatttggctatataaaagaatacctgaaggaaatttaaagttatgaatatacaggtgctacttcaaatctactcagtcagactcaccggtgctgggacctgagaagatgaatttttaccctcctctccagatgatctgcttcatgattgagaaccacttacgcaggtagcttatagaataccacctaactcaggaactctgcaaatgtttgactaaatctaaagaggtagcttttatatgcaatggaggcatgcacagctttcatatttgacagacttttccatagctccatatgtcacgtatgtatacaggagtcaatgataattgatggtaatgaggcagattgcctgagtgctgcagagttccttggaggttctttttagagctttctaaagcaccacaagtgcctgatggcatatatcatcacggtctccatgtaattactgattcagcatttcccaagctgatgctcccccatacactgttctgcaagatgttattaataagcacttaaatgacatctttcttcaaataaatttggtgaacagatttcttcagtctagtacttctctatgacttccaaaagccttcaagatgccaatgtgcactgtgaatttccagtagatgaaatataatcaggcacatcatttgctatttagaccatgggctctttacttgatgtctacctgttggcatctttcaaggaaaaatgttttacagaacacagtttagaaaatggtatgcattcaaccattatgtcccaaacacaaatttctttttatttgtgcaaatgtatggagtgcatgagaatttttttaatgtatataatgcatagcgatctagtcagagtagttagggtgtccatctcccaagtacaatacactttcatgtgtagtcatctttctctgtgagattaaaaaaaaaaaaaatcacagaatctggcaaggcatggtggcttactcctgtaatcctagcactttgggaggctgaggccagtggatcatctgagctcagaagttcgagaccaccctgggcaacatggtgaaaccccgtctctactaaaatacaaaaaatcagccaggtgtggtggcacgcgcctgtagtcccagctactcaggaggctgaggcaggagaatcgcttgaacctgggaggttgcagtgagccgagattgtgccactgcactccagcttgggctacagactgagacttcttaaaaaaaaaaaaaatcacagaatctgaattggtagtcatctaatcttgcaaagtaaatatttttgcaggaatgtttctgagattctgattctgtgcctggatttcaatatgaatctctttaattttgtccagaaaatagagtttcatgtaaatatatcacaacccaaagagttatctcctcaccctcaccatttttgctaaatcagatttctgagacattggaaggaaggctcatttttttgttattgttaaaaagcaatagatagaaactaggccagctggttttaggaaaacaactaactggtttctgcaataacttagactggtgactaacatggtaaacctataaaatgataaggagtcataataagataaactcaacaaggttaaaccaattcacttcacttctgcagagaacccagcaggacatactaaagaacatacaagtttgttagcatatttttcatgttgctgaagaaaagattacatttgtccccattaatttggctgtcttggtctttccatatgacatggaaatatattatccttagtatatttttaggtgaataatgtccatgtccgctactacaactttaggccctctaacttccctttgtaattgtggagtaaaatgtggtgtgatttcatgtgcatcacttttgttagaaataatgggagtgttgggtttctattctgttaaaaaataaaatgctcttattatttactttaaggtagaataagtacttcatccttcactgatcatttggaattgaaattataaaaataaaaagggcagggtatattgagctcactgctttttagtcaccttatttgttcaattatcagctgtctatgcttgcaagtaactttcaggccaccagcaaaaccctgtcgtctcaatagaggaaagctgcatctttatacatataagaactttattttcattttttaagggaggagatgtatgagtaatgctggaagattccagtctgtttccattatgcaggctactagaatagctatttagattcttgacataaagaataaaaacagaccttcctaaaaagtagataggaagccagtgtgtgactaaaaagttgctgggtactaaatcactgtgcatgtagtgtgaaattgggcaggatttttctattcccactataacttctgcagaaaatggtcagttaagtggggctaaatggatcatatctgttcactccgcttgtgaatctatacaggtttgggatcaagcttaccatgtattctcaggtagatcctgctaataattgagacagtatttttacttgcatattattttgatagcttgccatacctaaaagcatatttaaatacttttatagtgttatgcatctttcaaatcctgcagagccacagtcaaaagttgtagcaattgtttaggtaatgcaatgatcaaaaacccaagtgtgggtgtttctctgtccaacctgccagaagctgatttggcctgaagccagggagtttatgcttcagttgtgcttcaggtccctcacttgcatgtccctgtctaagaacgtgtagttaaatttatagttgtaattttaaaatttatttttccaaaaaaacagcatcaacatcgtgtaaacttcagatgccacaaaacctggatccatcccttcatttttttttttaaattttctttgcctctaccatacattcaaggtaatgcatcagtttggtttttcaagcaatgggacaaatgacaggttcattgtttccaaaaataccacccatgattttacagttggttttatcttctgaaatattttttttcttggcatattaacattaaaataaagcttcctaagttcagtttattctaggaaagactagggattcattcttttatttattcttttctttatttagtaaactttcattcagtaatgaggttgctgcatggctcttggcatgtacaaagataaagtgataaagagaaaaataaaagatcttgttcctcagttggcctaccaactttacatttggagtgtccaaagtatttagtgaaattttcaattataaaatgattttaaaatagctgcatatatagtgtcttgtggggtatcaccatttcatgtgcattatctcatttgaatcactttcctatgcttaagtacaacaagtgttttaagttattaaaatggtaggttagtaagtaaaacaagatgtcaatgaaagtattaaggcacaatggagctatgttttacaaatctaacagtgcttttgtactcacgaattaattacttgggtataagttaatcataccctgaaagtacaaaaaaaaaaaaaaacttaatttcctgagctctctgctggaaaaagatactaattttagatcagattccagttaaaacatgctaaaaattcaacaagctcaaaaattacttcagagtttctattcagtgtccagatagcatccttctgctttcaggagtcaccttcctttaatatatttgggaaggagtaaagcctgtatctgtcctgtttctcccatctcacgctcttctccccaactgtgacacacacacaccctgagcatttatcatttattggacaaatatgtatccatactatgggtcaggcatggtaacaagcattggaaagccaatagtgagaaaacaatgctctggattaattgaataattacatacatttaattacaaactgtggcaagcactaggaatgaaaagcacaaggtatctggaggagataataattgaagaacttgatcctctgcatgtagaggagcattttctgtgcaaggaagatttaaggtaagatctgaaagattgcttgaaaataaccatctctttcccttcccccccaagaaaaacaataagtaaataaaaggtttttgggtgcatgagactttgctaaaatgcatttaagaaaaattcaacagctttagggatacaaatggttttgggttacatggatgaattgtatagtggtgaagtctgggcttttagtgtacccatcacccaaatagtgtacatcataatcagtaggtaacttttcatccctcagcccctcctaccctccccacttctgactctctcatgtccattataccaccctgtatgcatgtgcatactcagctgagctctcacttatgagtgagaacatgtggtatttggttttccattcctgaattactttgcttaggataatggcctccagcaccatccaagttgctgcaaaagacattattttgtctgtatttatggctgaatagtattccatagtaagtatatatttatatacacaccacattttcttattttttaaataatttcaacttttattttagattcagggagtacatgagcagtttgttacgtgagtatattgtgtgatgttgaggtttcagatatgaatgatcccgttacccaggtagtgagcatagtacccaataggtcatttttcaacccttcccctccttccagtcaccctctcagtgtctgttgttcccatcttcatgtccatgtgtatccaatgtttagctcacttataagtgacaacatgcagtatttgattttctgttcctgtgctaattatcttaggataagggcctccagctatacacatgttgctgcaaaggatataatttcattctttttatggctgtgtagtattccatgatgggtatatacattttctatatcaaatccactattgatggacacctaagttgattccatgactttgctattctgagtagtgctttgatgaacatacacatgcaaccacattttctttatccactcatcagttgatgagcattagattggattctgtgtctttaaaactgaattgtgttgtgataaacataggcatgcaggtgtcttttttataaaatgagttattttcttttgggtagatacataccagtgggattgctagattgaatgatagatcttctttcagttctttgagaaatctacatattgttttccatagaggctgtagtaatttacattcccaccaacagtgtataagcattgccttttcacttcattcatgcaagcgtctattgttttttactttttagtaaaagccattctggctggggtaaggtggtctctccttgcggttttattttgtattttcctgatgattagtgatggtgaacattttttcctatgtttgtcggccatttgtttatcttcttttgagaaatgtctgttcatgtcatggaaataattatcctctatgtaagattattttcaaaacgtaagtaaaaagcatcccaaatgaaaccctctacaattaggaacataccccaatctctgaacttgcttccctgccctgtaggcttccttcttcaaacctcttcccttcagagaatctgcgaaatagaataaccaccagaaatacctttaccaaagtaaaaaattattctacctccaacaacaccgtagactagagtgtaagtaaagtgatctttctgagctccagttcaggacagccacccaagctttgtttggataccttatacacggtcctctctaaaatctgcgcacaaccatgaaatgtagataaccattgtatatgcagagtctcctaagaacaacactgattcttgagctcagcacagtttaaattcaaattcaagagaacgtttccctaaatgtcctataatctgcatgggagcttccacctagaataacgtatcttctagataatgcccaaggcccatagatgcatacgaactgggacccgtttcaaagccatctccccctaatgccggccatctgcttaactatagaaagaggaggcaaaagggttacattgatttttttccttattttttggagcttgtaaaatttttgttcagggagtatcttgaaatctttgtcgggggaagggaggcagtccaagcatcttttatcctcaggaccataaagtccccaggaatgaataagagattgctatgacatatacactgggtctcaggagaatgtcaatattcatgttgatgtggttaaaaagtgttagccaagatgaaatcagcttacctccctcccttattcagataccttcagattgtgcccacctacaggaccaaatgatcccactgaggttttacatgttgtacaagccctgaataggattttccgagtgtaaggggcctttcctaggctaaggcctctaaaaacgattcttatcattttacaattcagcacattcattgtttcattatggagatataacaggatacatacacagacataagtgccctcgtttcaactgtatggccatcaatacccatccctgtttgcacccgaactaccctgtagaaacctgagtaattggaatcagaccttaaaggcaacatgattggcctgcagtcttcttgttttgtttgcattgactaaactttaaatgatagtttttctgtttgaaaattcaggtcaaaaggatatggtttatagctcttctgtttgttctcttatagtgattctcaccactttattcaacttgccagaaacagcccacttgtcaaatatagagtaaacctggaaaagaaacctgctagctccttccatcaacagaccattcttctcatactcttttgctccaaatatcagagcattttttggtgaatactaagccagttgataccttactatagcatattgctatctataaagagaactgagtttttattttctttcattttacatttttggtcagaattcttcaaagtgtaataaaatggctacactactttgtgaatattcttggaaaatcctttgatatgccttgctgagaccctggcagcactagtaagaatcttgtagcatcatcctacatgttacccctaacccagagtaacagatgcagaggtatgattgacaccgcttttagttcacagaagcctgtttaactaactactaattacacaaatctgggactggagttctagatgtcaccacttcaaaaaacatcccttttctcaccatgttttgtttctcttaatgccatagaaatgattgaatcagagaaaagactgactttgattattttagcttcccctagttttctggcctaactcagaatgactccatcagtctttactataatactggaaactcctttaggacaacactctccccctttatttgttagtaccttgtgtgtggtcactgcatagtaaatatcgaatatacttaatataagcatcagatggaaagatggatgcaatagataatttcatgtataaaaatgaagtatggctgggcatggtggctcacacttgtaattgtagcacctcggggggctgaagcagaaggataacttcagcccaggatttgagaccagtctgggcaacatagtgagaccccatctctaaaaaataatatatatatattttttaattagccgggcatggtggtacacatccatagttctagccacttgggaggctgagggaggaggatcacttgggtccaggtgtttgaggctgcagtgagctataattgagcccctgcactgaagcctaggtgacagaaagagactctgtctcaaacaaaaaaaaaagaaaaaaataggagctcagatttctaaaagtttgtcctattgtgatcttatcagagaaagaaaaacacatttttttcctcatcaaaggtttgtaatcgaaacacctgctaaagtaattcaagagatacgaaacatatttgctatggtcccatgaattttatctgcttttatgttatctcattggaaataggattcagaaccctgatttcccataatttctctcacaattttgttaagactaaaattctatgtgattttaagcctgcacatttattctctttcttaaaagcttttcattttgccatttgatgaatattggaagtgagtggattatctggataaagagaattagtcgaggtttgcatcagtcaagagagtaaagccaccagaggctttcagggagtgccttacaatataaatagtcctaatctccttcaagcattgacttctaagaaagagaattttctcaaggccagtgtttttaatcagctagatctgcaacatgattgaaagtaatgctggtgataaccaaagcaggctgtgcaggaaaaaaagcagcgagcagtcagtgatctgattcatgaggaatgttagaggctggagaggaggggaaaattaagaagtgtctcagatcccctaactacttctacctctaaaacagtcatccagagacatccctgcctgaagtgaaaatgtaccatttggatgggagcaagttattagctagaggagggcacccagtgagatgctggaaatgtagacagtgctttcacggtcccagtgtttccatttttcatgccaaaaaggatcagtgccagctacaaaacaggtggaattattctagcatggctttgtagacaggaaagagaatgaatatgtgttttacctgagatgttggggcagcagtaaaagcagaggaggttacagcaaaatgagaagaaaaatggctctagccacaaattgttggagcctggactccccatggcaatggcctggacccccatttttgcaccttcttttctcctaggagaaagaaagaaagtgcctatgaagcagtcgtccttaatgagcagaggaaaggttttcttgttttgttttgtatcatgcagtggaaatagagaaaaaagtaaaggaagtaaattcttctataattatttcagatatattttcttgagtttttttaaaaaatgttttcctcaagcgtctccacaaaaaggaaaagaattttcactaggaaaaaaataaatatgtggccaaaataatttcagatcttgtgtataatttgcctctgaaaacatttgagcaaaaggccacagacccttgggcaaaactgttacaccagtactcttctatccaggtcacttttaccagatgtaaaatgcaatctgatagttactacttttggcaattcccaaagtgtgtattggccttgcaggaagcaatttgtttagagtcttaatgtgggttgtttggggtgctcgaaagtggtgttccagtgctacctgaatcacgactgaccacatccaaagtgaggactcacccagcaggcacagaaaaaccatctaggaaggcggcgatcagaagattccggttctaaagacttagactcactggattttataaggtgatcattgaacagtcagctaggttaaaaaatcagaatgtactgaggattagactaagagctgagagaagctatcaaaaaaaaaaaaaaaaggtatttccactggtttgaacacttttcttttttttttttttctttatctaatgaatttctatttatcctttgaaactcagcttcacctcactttccctggaaatcctttctggttccccatagtgtaggtcagatgttcctgacctagataactagatagctcactttaacttctgatcttccctgttggactgtcagctccatgaggatgtagatggcatctttctctccagtacccagtgccaatcacagagatcggtaaagcttttctgtacaggaccagatagtaaagattaatttagatattgtgggccatacagtctctgtcacaactactctgttgcagtgaaacaaacacacacaaaagccacaggtgatatgaaaatgaatgattgtggctacattctagtaaaatcttatttacaaaaacaggcataagctggatttgtcttgccatctatagttgctgactctggcttaacaaaatgcctggcacaaaatagtggttcagagaagactttccaaagtacaggctgagttgatggtggtctgtgggcagggagataagaggatatatttgagagctatttggtgatttgataatttggagattttatttgatgggtgggtaagaagtagagtagaaattcaagtttctgacttgagcctctggtcttaaggaggaaatatttttgtaaaaacagtgggactgggtatggttagcaagagtggagaagaagaggtgagtcacatttggagcatactgaatatgagaaatatgtgatatactctgtaacaatttggctctcagactttgtgtgcaacagagtcaccaagaggacttgttgaaaacacagattcctgggcctcacacccaaagtttctgattctgaggtggggctcaagaatttgcatatctataatgctcccagatgatgttgaagttgctggtctggggactattctttgagaaaaactgacctaaagacgtgtgctggggtttttatttgggtgtcaccagtattaaaagtaagtgaaatggagagagaaccaagcaaaatcttgagaatgccatagtagcagtatacatactactatcctttaaacaaataatgaagtcctttgagactacaatacgattccttttcttctccccatgccataacattttctgtgaaaggagccatgaagtcattcctgtccccatctaagccttgacttctgtagtgtctctttggagctcctggtttggtgccaagctcatttcgttgagtacccccagatctacctcatattgcttttcctctgtccctgtgacccttatagaaatgtctccctcatcttcagtctacatatcgattttcaaaatctaagctttccttctattgacccagtattcctggcacatccccagactctccaactcagaccaagaaggccaccatatctaggcagaatcaaaaagaaaataaatgttgatattaaacaactctatttcattcgcagaaagatggaaaaatattagaaagatatcatccaagaagaatataagaggaggcctcaaaccttcttgcaaatatttccactactaaaatcagggccatctcctagacctccacccagactgagctctttgtggctctcttctcctactctctgcagtataactgttatgattattagtattaacaattatattgatggccactattcgttgatgcttgccactaaatgctttgggtacattttcttatttcatcctcacaactactgctgaggtaggtctttgcatcttcattttagagcaatacagatgccaatgaacttattcaagatcaaacagttcataggcaacagtgagagaaatttcatctcagagcttactgacaccatagcctctcttcatgaccattcttcagcaccccagatttcccttctccttactgtagtcctgaaagaaaaatgcacagatgctacatttttaaaggctttgctgctaatctctacatagatatagatagagtataacaagcttagcaaggtttaaaagttgagaaactattttaaagctctcaagatcctaatccatagcaggatacaatcttataaatatggaggtactgttggaattcttccctcatggtttattgctaaggaaggaactcatcaaaacttcaccaccccatccccatatcattttatttattcttgcctaaaggagaggaacaggctgactactttataaacgaatagcactttgcaaagagtgggggagagggaaattgggttcagttgaatgagatgccagtcgtatctctaagtggaaatgccagttaattaaaaggataactctgaatgacagaggcatgctaattgtaactatttagttgcattccattgctcccccgaccagactgagtggagttggtgccagagggcctcagcagttacacagtgcttgctctaggaaagcactaggcagagatgattactgctcacctggtatttatagtccccttgcagttaggcagtcattggtgacttggtctggtcaatgtgctgtaaaaagaagtaatttgtattactcttgggtaaagcatttaagatctggtagataactttccaactgtttttttccattgcttcggttaccataaaagccaagtgttataagtggcataagcccaagataaaagcagcctggatccgtgagtcactacatagaggagagtcaacctggagagtccctcaaccttgggtggactttgtaagagtgagaaagaatttgttgtataaatttgtttagtaaatttgttaccatggattgtttttcattgcagcatagcacagcctacctaaactaatgcaaccgctcatgttaatactaaatttatttcctctgctgggtcaaatgaaggtttctgttggttctacaatgtatcttcaccccttgttgaaacagattatagctacatttaaagaagaaaatgaaaacaaaaggtagggagaaaaattcaagaaatgccattctggggagagaatacttaattcatacagacaaacgtaaataatataagttttacaggaaaaactgtaacttaagaaaactatgatgctgcaggcttggaaatagtattccgtgatatgagccctaagggttttaagaagtatttatgacactgtttactaaatggttttctgatttcaaagacatgaggaagaagcatggcaacattagaagaaaggaagaaagcaatattaatgaaaattttgagggagaaaagtggcttgaacatttgtcatgtgtaaaaagtaaaaggaagaacatttaaaccagatttttccatgaaatatacacaacacaggctttcaaagaacaaataaaggcatgtaagttggcatggtagtctgaaggagagtgcttttgagtcatcaatcctgaaggtgacaggggtatgaacaactgtagttaagtgtatatcataaagaatgtgctatcatctctgtagcaaaagacaaatggcctgatcactgtaagaaattcaggagaatttgtggatgaaaaactttccaaccaaaggggacaaggacaagtaagtccatatataaacagttggcagcctgattctctcacctacttcctcccttttatttcacttttctcctgtgtgtgtgtatgtgcatgtgtgtgcacacacagactcctgccacaatctgatctaaggcaatggatcattcacaactagtaggttccaagtggtaaataaaagtttcaatagtagagtcaggtaaaggttataagtctcttcctacaaccacattatagtaaaaacaaggctggtagatgaaatttggtcacacatacaaacacttattggcaatcaagcatgcagcttgttcggtacattcttagtgttttaacgccagcagtgtgacaaatttgcttgaaggaaatgcaaccaatattctagcagcagaatttagtgtggcagcaagtatcttcagaatcaatgggtgtatactagattatttcaaagtctggcttttggcctccttctaaaagatacaggccacctagtctctagattcttacactctattcctacaatacttccattactcatatcctcatgtgagtaacaaaaaaataatttctaatatatctgttatgctaatccataaaacctctgatgttaatcagacataaaaatcttaaagataaagatagctgaagagcatacttttagaaagtgggcttcagattagaagttttaaaatgctagctgtccttggagactgttctcccaattaggccaactgatctcccatagaaggtagattaagttatcacaaacacatacagacattatgtcacactgtctatgctgaggtatattcaaggataataagagatagaacaaaacaattccaatccatggaggtggataagggatagatttcattaaaaaatacatggagaaagaacaactatcatgtattgaaattttttaaatgagcatttaaatcaccaactacagagtttgctcaatatttcttaaattctattggcaaattatacacctattaaacttaggtaggagcctgcagatgaaacctttttttttttttttttttttttgcctatggaatataggttaacagcaaatataaacacccctccatcggctgccttttgtgggagcttctctgtagtatggtggtatttctatgtgacctctaaagtcggatcgcctggttccaaactcttgctcttttacttattaactttaggcatatttaactatagcttataattttaaagtgaggatcataactcttatggatgctggaaagattaaataaattaacatattaagtattaatatttataagaatccctaaaacacaaatggtacatgcctattgttattattgtattaatattattgatattattattataaccttcatttccaaatcctgtgtacttccctccactgcagatgtgactgagatgcatggggagaataggggctgtttcataggattcaacatagattaaatgaaactatgtacctgaagccctataacacagtgacccactaagtggataacaaaaatgatgagtaaggtttcctacgaagctcttgctatgttgtagttgtagttgccatgttcaacctttggaaattcttccaggtatctcagccatcgacccccccttttctaattatgatgtcctagagaaaagcacaataactctaagaccctgcaggtctacagagattctgccttaggaagttgaatgcttccctccacttcccaaccctgaatgtaccaaaaagagcactgggtggagtcgtagctaagtaaagagtgtggattcttttctttacagttaaaatagcaggaagtcagaaatataaaagttcagaccccaaaatggtactgacacttaagcaaagccacatcaatttcactttcattgaatggatttgaaaagctacactgataatcccctgaacattttcagtgtgtagctctctcattcagtatgtttaatccactctcctagatcattatacaagtgttttgttttgtgccatgggaaattctgatcttagttgatgaagtactcagtcacctctaatcttgtgagagccacaaatgacgataatttcaatttatggagtaacctggaatgaagaagacaatatgctgagtctgagagctgaggtagttgtgtttttacttcagatcagcagaaaattttttaaagggaacatcctttgtgcattagttccaactgcattttctcaatttttatcaactatagtcactaaggaatcactgaagaaaaggtaagagctctgaaagttgacttagagaatctgcatagaaaagagagaatcaacaaaatcaacaatgcataatcattgaaaagctatggaagaggtatgaaaggcttagtgaaaacaatgctgagttggcactgaagagctttggagttgaataaggccacctctcaagagctggatgaccttgaacttctcacttctctcagggccactttttcctcatcagttaaaatttgagaattcaaagaagttattattaggatgtctttcatccctaaaattctgtctgtgaaagatgcagaaaattgctacaatgttgcataaataaataggatatgtattatctgaggctgttggcaggaagaattctcttcttttaatgtcctaaacggatttgtttctctgaagtcttcattttactttctgtgttgtgcacagcatccgttctcttttgtggcaattatcttttcctatctcacacttatcacactggaatccagccaccagtttgtttgtctcactcgtggctattatcaattcttgcagttcaggaatcacgtcgaactcccctgtttcccgagtgcataggaaagtgcttagcattgaatgtggagcgatagaatgaacaaagaaatgacaaaatgactaggtggatgaatgcatagcttaatatcagcgaggcaggaagtaaacaaagagacactgagcaccaagtaattcaatacaattcatcatgagaacttatctttaagctcctgtttcatgaggttagatactgtccaacatggttcttacagcacttgttttagctgacagcactggcattcagtgaaaattacagtgggcttgagtatctttggaaataacggttttgcaaatttgattaccattaaacagcctttataaaacacctacctgagtaggaatggagtatatatgttagccaagacttaattattcatctcaggaattggcacactatctgttggctaaagccatcttcctgtctacttaccttatctgtttttatagagcccatattctaaaaatgatttttacatttttatatgtttggggaaaaaaattcaaaagaatgatacatgataattacatgaattttgaatttttttgcccaccaacgaagttttattggaacacagccacacttatgtgattactattgtctgaatgctttgatgccacaacagcagagttgagtagtcacaaaagactggatagcccacaaagcctaaagtatctactatttagtcctatacagaaaaatttgccaagccaggctatatctgatggtcctttttgataatggtattatcaaaatcaatttataaacagaaattactgtgtgtttggaagaactgcttcatcttttttatttatttattaattttttgagacagggtcttgctctatggcccaggctggggtgcagtggcaacatcttggctcgctgcaacctctgcctcccaaggctccagcgatcttctcacctcagcctccagggtatctgggaatacaggtgcacatcaccacgcccagctaattttttgtattttttgtagagacagggtttcatcgtgttgcccaagctggtctcaaactcctgggcttaaggtatccacccatcttggcctccaaaagggctggtattacaggcatgagccaccattcccagccaaattgctccacttttaatggaaaggtgaggtacttgcaaaaattggagaaagttcattgtcacctctttgatttttttttttcttatggaagcaaaggatacgctaaagaaggaaaggatatgctaaatttttttctttagatttttgcaacattgaaaccaagaactagtgtgagcaattgctttctttaaaataatacattctcatttaacatatataagttcatcatatatttacttgtttattccacattttgttttactccataattacttacgaaaattttttcatgctaactcaagcagagatctgatcttttttaaaaaagacatttggcttgagacatttataaagtatcattatgctgtctgtaaagttggtgcaatggaaaaaaaaacaaacaaaaactatttcctaatgacattaggtgactaaaggagttcccttaatccctttttctcaaattgtgtctggaagtaagacattagaaaataatattaattagacttttaaaaaatacattggctaacccacccaaataaaaagttataacttggaataccagcactgttaagacaagtacaaaagagctaggaagttctaaataggaaaatcactactgaaaaagaaaatttaatttaaaactgtttgattactacatgcttccacaaataagagccaggacaatgcagtatcaaagacacagagaccataaaaactgaccaaagacacaaataaatcaatacctgctttagttttctatttgcaagaaaacaaaatcactctgctcaaattatagcgttaattcattctattggaaactagcaattcacaaattttgcttttgttgttattttgtttttgttttcttattttttcccaagtgtcatgtttcaaaattgagaaaaaatctctaccagtttaatttcctgaaaatattaatttgtacagtgaaatcagggtcacttataacagtaacctccgtgaatgatcacatcgtaaaacaattgtagtctgtatatttaagaaaatgttgtcattggtaaatgtttttccacatgggctaaattatctacgtaatcagccaccctggtgggaaagcgaatctttcagctccaattcaatgcgagggcgagttgttatctttctgattgatggtgattaggctcttggagcaaatctggcttacatgcttctgaacgccaaatggctgaaggccacctctctctacccccttggctggcagttatctttggatgacttggaagaagccacagttcccgcagcgtgattctggttcaatggctcaaactggccattttcttctgtttagatcatcacccctactcaggcactacctgttggtggccatagaatggtaaattcaaaagagaatagacacatcataattgcctctttcttgccctcatatatggatgacagaaaatactcttattgtaagaatattttctttctcaaaaatgaaaagctattaaaaataatggagcagctacaacctacatatttataaaacatatgaaataaaatctctggctgttgtcttcaataattacataaaagacgaagccaatatttacatttaaaagaagagtctgtatgcttaccaatgaagcactggttatattcttatcttgacagatggtccatttttgatcatttatgttaagcactaagtcaaattagccccaaaaaagttgtgtgtgttttttaaattccatgcaaatatagccaagaggtatcattatttacttcacatcaataactcaggatagtcaatttttaaaaaatacggattaaaattttaagtaatcctagaattctggaataattgaaataagattttctatatgtatgattaaggaataattttctcccacatcttttcttaaagtaaaaatattctcaattactatacatgtgggttaatcatatgggtatttgggaataactcagtggggtaacatgcataagtgacaggcacacatcatgtctcaagtctttagctcctcaagttgtctgtggataatgacatggtttttaacgcttgagaattctttttttaatcaggtgctacaaaagataataattctcttattagttttcctattttgtaaatgtcagtcatgacaatcttgagcaagcactttggttttatcatcacactctgctctgctacctcattaatgcatcaagaatatattcagaatcaccttccatccccattcttgatttcatgggaggtgaggatgctaatcgtatctgtacaggtgtatttttatagagctgccagaaaaatcgtactgttcattcaagaacatcatctgtctataattaatgttctgtcttcttaaaaataagaaactactatctacctaatatcccaaatttcttccagcaatgaatccctaagcatctattaaagctcagatctttctgaaagatctttttttatatctataatgagcatttttttttgtttgtttgtttcgggtttgttttgttttgttttgctgatcattattgttcatttgctaaagcttctggtctcctgctctctactctctctctctctctgttttacattggccaattggttcagatttcatatttacatcttgtatgtgctgatttttaaacatttttatcttctttattctttccaaatgatcaggtatgataaaaattaacaaaataaatctgctttcacaacaaaatatctatagttatatgaaatccaatttacgcattataaattcttaagcaatcaaatttctgtttatgattatacacacagtatgaatgagaatttggaaatcaatgttaataatataatatgagatcaggaactccttaaaattaggtactatatattacatcactgtgagatttttatatctagattctaatactaagatttccaatacataattttgaaggtggaaatggacctgcctagaaatattcctgagacaggaacattcccttcggaatgtggctactgttttctcaggacttttacctataaagatgcttacatctgtttgtgtcattaaatttttgttttgttttgtttcattttctggtaaaaacaaacaaatgataaatgtggctatgatctgcttgaacaatgttctgtctacctgatcataccaacagaattgtcttctgggtcatgtcatcctgttccatcatagaagaagaaatgtgggggtggtgttccccaaaataaacagtagcatttgaatcaaacccagctatttaccctactctgtgtcactacagatacattttcaaagcacttctcagaaatcagtatatcttaggacatcatgctcttttctataaattctgatgccaaaatggaagagctacagggttgcaggcatatttgggagcagatggtaatacctactgctgtgtccaaataggctggtaggcatatttatctgatatgtttttgaattatggtaagaagccaactatctctctttattcactacccaggaacacatgctttcaagtaaagataccccattctgtagagcctgcttgccagttaaaaataaataaataatctactttctgaatttttatattcttttaattataatcatcacaaaaagaggatattttgtatgactcttttaatgttttcttttagaagtatttctttaaagcacttttatataaataagaccattgcatattaacgtcacacactaattggaacagattttcccctgagttgcttaaaatatagacttttcaaatctgcagtgcttcctcacccttcagtgtagctctctccaactctaattaattcacattgcaaaagcaatgagtttgatctcagctgtagatgtcacagtgacttatcctttcaatgaggtgataattggtgtctggttaattctattcatagaaaccatgggccataaaaaagtaatcctcacttccattacacagcgtgacgctttcagtaacacctatgtagtttcctagtatggaatatttttattcttaaaaacataattacaattgtagaaatgcatcctataagcaaatatctgctacctgcccggtagtaactcaagtagatattgttctcctactttgcacatagttatatgggctttgacactgaagaagatgatgttacttacctccaaaacctgcaacacacccaggcaggcataaaaagtatcgccttgtaaaataatctctaaatcctaagactgatacagtccacagacacttattcaagacaaacatgattagcaatacacaaggcagtttcgtatattccatttttagtgtgtaatattttgacacatgtgagagacacattctctctgtatatatttatagataatgagacaaataagaaaatgaataattatgaaccagcacccaactgaagaactagaatatcaccaacatagttttaatctacgtggattgctttttacctctcccatcacctgttgctaataaatgtgtacatggcctgctctgtgtttaccactgtattgtctttttaaaggttttatcacatttgtaaacatatgcacaattttattttcatttttataaaattcttatcaaaatgtcattgtactcacttgctttttccaatcaatattgtgtttccaagaattacccattcaattttatcagaccacattttttctttttcactgtcacctaaatactcagtaatgtgactataccacaatgtctgtattcatttctttatctagagatatcacagttgttttcagaattttacaaatatagacaataccactgtgaatatgttcatgtaattctcctggtgaacatgtgtaagagtctctctaggaatagaatttctgccttgtattacatacaaatgatgaattttacaaaatatacctaatttttccccaaaatgttgtatccatttgtattttctccaatagcgtgtaagatccacatagttgccaagagtttatgtaagtcgatgggtacatgataaacatacttgtaatgattattcttttcatcgttagtaactttgcagattatattacagacactcaaattgtaataataataaatgtaaataataactaaaaagaaataacaggccaggcatggtggctcatgcctataatcccagcactttgggaggctgaggctggtggatcatttgaggtcaggagttcgacaccagactggccaacatggtgaaaccctgtctctactaaaaattagccaggtgtggtggtgcatgcctgtagtcccagctacttggaaggctgaggcaggagaatcacttgaacccagtagacggaggctgcagtgagccaacagcacaccactgcacttcagcccgggaaacaacaacaacaaaaatgatactgaaaataataaatctatttatggacaaaagaataggagtcaaaaataggaggcaagagagcacactggaatttggggaaaaagaaagaaaggcaatttttggagcaagaatcatcattaatgtgtgtgatttgaggtgatacatggttaatgaacatttgctaattttttataattacacaaaatccatataaatatatttactttgattatatataaatatattaatattgttaaaaaattaaaacacttctaataaacaaaatcccttgaccactgagttatcacatcccaattccaggtccctctctggatcttttatgatggtcagcaagcatgcctgccagacgagccaaagggaaacatctttattgtattggatagtacacaaacccaatgtttactccttaggaaaacaccatctctatctttcaaggctcttcactatacaagcatccgtgaaaaatagttcgtaacaaagacaggtcttctgctcacaagatctgtagaaacatgagacccatagagaattgtctcccaacaatttccttcagagaggatttgcacttgattgcatcaagagccatggtatcctagcactttgggaggccgaggcgggcagatcacgaggtcaagagattgagaccatcctggctgacacggtgaaaccctgtctctactaaaaatacaaaaaaaattagcctggcatggtggcaggtgcctgtagtcccagctgcttgggaggctgaggaaggagaatggcttgaatccgggcggcagagcttgcagtgagctgagattgcgccactgcattccagcctgggtgacagagcgagactccatctcaaaagaaaaagaaaaaaaaaaaaagagccatggtgtgctactaacctgtggcctctttaaacccttcctccagtccttagcttaattcatgagtatgaggtttagtaccccaaaaacctttgctttaggccccaaccagaatctcctcattatagtgctgatactgcatttgttttcaggacagattttctcaagtccttcgcccacatgcagggatcaagaaaacataatgcctgctatgcttgcaaatcagaagagtatgcctcttatgcctaggaatcagcccctgctgagatccagctaactgttgccctgcttgtatgcaaaccaaatgttgccttatattctgatgtttcaagagaagagtgaaatgtgtattttgatgataaaacacctgaatttcaagtgttgctgtttagttcaagctgattaataatattttcagaaatatgaaatgcaacacaaaacttagggggtaggggagataaaagcagtgacttcagcatttgggaggtccttggtgacctcactcatcaaagtgtacctcagatatcatcttacagtgaaggcatccctgacatgcagtcctacatgccaattatggcctcattcatgaagcctccatagcattatataaacctcatttactttagcacaacacataatcataatacttttttgctaatttaattgaaatgtgtttactgttctaaaggcaattagactgaaactattgtgattaatctgtatctatatcatctgggtaaaggatatatgagtattatttgttctattctgataatctctatgtaaccttgaaattatgacaaaatatttttaaaaaaaagaaatcatctatatcttcacctggaaaatataatctatatcttatatagttttctacaggttaacatctaattgtaaaaagagtcatggaacacaaaaatgtctaatcagtatacaaattaatgcttggaaataattttcagtgctggagtttaaccaaaatgtcgcattccattcgtgagattgacaattgtttcttggggacttttgtttgtttgctttgataaattgtattgcgtatatttaaggtctacaacatgatgttatgggatacttatagatagtaaaaagattactatattgaagcaaattaacatatccagcaactcacagttatccattttgtggcaacggtggctaaaatctactcatttggcatgaatctcatgtcaaatacaattttattacctatagtcctcatgttgcacatgaaatctctagacttggtcatcctacatatctgctactttgtatcctttgacctacatctccccatttcctgttgttctctagctctgtgtatttgaaatgcattatttttgttccatgtataggtagaataacgcaatattttctttctgagtctggcttatttcacttagcctaatatcctccaaggttatctttgttatggcaaatggcaagatctcgttcttttgtgggactgaataatattccattgtatatatgtaccacaggggtttttaatccatttgttcatcaatggacaggttgtttccatatcttggctattgagaacaatactgcaaggaacatgggaatgaaaatatcttaacaaagtgatgatttatttcctttgggtatatgctcagaagagggattactgagtcatatggtagttctatttttaatttattttgaaacctccatactgttttccataatggttctcccaatctacattcctacatgagtgtattaaagactgtccaaaccaggtgtggtggctcgtctataattccaacactttgggtgactgaggcaggaggattacttgaggccaagagttggagacaagtcccaggagacttcctaaggccctgcctgtcaacagatatatatttttaatatactacaaatgtgttgattccacagctcaatctggagaaaattgacattgaaacaactgaaatacatttgatttttgtatgttgactttgtattctgcaaccctagttcaaatagcctttttatagatttcttcagattttctatgtagacagtcatattggctgtgaataaaggtcattttatttttttctttctatttatatgccttttattatagttgttgtgctgttgttatacaagctaagacttgcagtatgttgggtgggagtggtgaaaatagacctcttgccttgttcctgattttaggaagaaaatcttccgtttttaaacattaagtgtgaaattagctatagggtttttttaatatatataattaccacctattagcaagcatgttttttaatgcctatcttgctgcaagtttttaccatgaatggatgttgatatcagttgttggttgatttttcaaatgttgggctagacattcttgagataatctccatttggtcatgaagtattatcacttttgtctatttgctagatttgatttgctattaggtttttgagaatttgtgcatctatgatcatgaaggacactggtttaaagatttattttcctgtgatgtctttgcctgatttgggtgtcgggataatgctagcctcgtaaagttttccctcctcttctgctttttgtaatagtttgtatggaaattgtatgttgttgttgtcgttgtttgttgttgttaaatattttatgaaatttattagggaagccatctgggcctaaagttttctttctttattttagttttttattccaatagtttttggtgtacaggtggttttttgttacatggataagttcttccattgtgatttctgagattttggtgcacttgtcacctgagcagtgtacactgtacccactatgtagtgtttgatccttcagtccctcccaactttcccccaaccgtaagtccccaaagtctgttatatcattcttatgcctttgtgtcctcctagcttagctcccacttataagtgggaacatacgatttttggttttcctttcctgaattatttcacttagaataatcatctccagctccatccaagctgctgcaaaatacactatttggttcctttttatggctgagtggcaatcgatgtcttatatatattatttatccactcattggttgatggacacttaggttggttccaaacctttgcaattgagagttgtggctgctataaatatgcgtgtgcatgtgtctttctcacgtaatgactttctaacgttttctttgcttgaagacttcaacttcaaattcaattcatttaattaatgtaggactattcaggtgaccatttccacttgagtgagcattggtactttgtttcttaaaaagaattattccatttcatttaagttgttgaacttatgtatgttaataaagttgagcttaatattctcttattacatttttaatatctgtattgaggtcctatatcccttttcattcttgatgttgtgcctttttttttctttctacttggtcactctggctagaagtttatcaattttactgatctttttatagaactgttttttgtttcattgccttctgtattgtatttctgtttttcatattatttatgtccgctctttattttcttccttctgcttgctcttccctttctagtttcttaaatagaaggctagatcattaacttgagaactttttccttttctaatagaagcagttaatgctataaattttcctctatatgcctgtttagctacatccgcccccccgcccaaattttaacaggttgtgtttttaattttataaaattaaaaatgcttataatttcccatgtgacttgcctttttacccatgaattacttagaaagttctgtgttatttaatttccagatattggggaattttctagattgtttattactaatttctgcttgaatatgttataaccagaaaacattatttacataattttaattctcttaaattttgtaagacttgttttatggcctggaatatggtttatcatggtgaatatttcttgggcatttgaataaactatgtagtctgccgttattggatagagggttctatcaatactaattacatcaagttgactactagtgttattcgtatttcctgtgtcattactgattttcagtttaattgttttatcaattgctgagcaaagaattttgaagcctctaactataattatggatttgcttaattctccttttagttctattagtttgtgtttctagtatttggaagttccgttgttagatgtatatatatttaagattgttatgtgttctaggttgattagcccatttatcactatgcaatgtccctccatatccctgttctgaagcctactttattttagtatagccgtttctgctttttttgattggtgtttgcattttctttcgtactgcattagtttcttttgtacttttcatttgaacctagctatgtccatgtatttacagcaggtttcttgtcaatagcatataatagagtattgggtttttttaagtaaaatctgaaaatttctgtattttaatttgtgtgtttagaacatttacacatgatgaaattattggtatggttgatgatcataattttttatttgtctttctaaatttctacactattaatcatctttatatttaaagcacattgcacataacatgaacacaatagatgtttattaagtttgtatatcttaaatgatagtggtttcagatccattgtctatttcagtcaactgtggatttgtcctaaatagacaaattttcaagtcatattttcaagtcataactttttcatgtgttataagtgaatagaataacttttcaagtcataactttttcatatgttataagtgaatagaataactattacacttaatttgtaaatcacatcttatttattcactttatgaatacacttcccttgtccatgaagcataagagtaatatagtagctgttcctcaatctgtgaatattcaattatttaccattaatatgtttactgcatgtgatatttataacaataataatatgaatcagttgaagaagaaatgaaaacagcatacctttataaataccttggtatagaaatcagtaccaggatacagtcatgaatgaagaatcacctattcaatatctgtgtctactttagtttccagtagtattatctgtagagaactttgccctataatagacaatatgtttaacatttgaaaatggtgcattatttctaagaagagaacatgaaaatgagttaacagtagcatgttggtaacaatagtgagcctagtgttttattaccatccagtacattataaaccttcaccatgtcaaatgaaagtttaagagtgaatcttctaaagtggcatgactttctctctggagaagaaccccaaagataaactgagagaaaagaaaatggcagagacacttaaaaaccattgtctaatcctggcagatagaaggtgacattagtgagataagaattttttgttaattaggttttcaaaggtcttattcccacactcaacacaaaacccaattgagttttaagcatgatggtaatagtacctagatgaaacctgagagtaaacagtatcccatttgccccaacctgaaagttcaattcttcaatggagtacagactttactatattggctggttctgttaggttttgtttagtttccttgtgattgggaattttagcaaatatagtacttgttacaggcagatatatgtccaagtcattctctgtgactgttcacttacttctcattccacaaatacttactgagtgtgttaggcactgtccaaagtgctgaataggcttattactatgaaaaggagttttaagagttgatactggaaatggggactattactaattgctgtaggacaaatgtccatattgaagctacctagaattcctataagcctactgaagtcttgggaaacaatctgcaagactaacaaggtattttttaaaggaataaaactttagtaagaaccagagtcataaggtgattggagatttacagaaatgtacagttccagaaaaatacgcagctatttaaagaaattttttttttaaagtacaatttccattttatttttctccagagaatagcctgtcttcagtctttaagaactcagctccttacatgggctttggtgggggacgtggggcagcacccgcaggtctaaatcggggtgggggtgttcggtccttgcggacttcacgagatcgattcctgactactttgctgtgaattgcacaactcacacagtaatgtagcttcacatacagcttgggaagcacataggcatcgaagacgctcgcttcagaaatgtccctgactgctgcggcctccactatgtttcgaatgacgaatttcttaatggccttgtccttgggcatgcatcgggcacagttagtgcagcgaataggctgcacgtggccgcagccctttttggcacgaccattgttccttcttttctttgtcatcttggaggcacggaccggagacagctatttaaagaaatttttaacctgtcatcattgtcaatggaataagatatcattgagatgtcattaagagttatttgaagaatgcagcaactcagctaaagaggatgcaacttgaaatcactgatgttttgagtaaggacattgtctttgttcaagagtcatcattagttttacctcacttaggaagatgaaaatgttttttaagtttgtatgaaagtgccaggctgccaactattattgttatctgaagcttctgcccttcatccaaaaataggcttataaaaattgcaataatggccactgaagacctaataacgctgacatattcactactcaatctgtggaaatactagaatgattataaatatataatatctaacaagccattacccatgtggtacaatctcagaatgatgttctgattaaagacacacagctcacaataaaaagcaattcaataatcttcaaccatcaaaaaataataaatcctgtcatttgcaccaatatagatggaactggaggtcattatgttaattgaaataagccaggcatagacagacaaatattgcgtgttctcacttatatgtgggggctaaaaaagtgtaccttatagaggtagagaatagaatgattgctaccagaggctgagaagggtatggagggccagggagatgaagagaggtaggttaatgggtacaaacatacaacataggaattccagtgttcaatagcacagtaaggtgactgtagttaacaacaatatattgtatatttcaaaatagctagaagggaatatttaaaatgttcccaatgcaaaggaataaatgttcaatgtgatgaatatcataaatacctgaatttgatcattacacatgtatgcatgtatcaaaatatcacatataccccataaatatggacaaacattatgtatcaataaaaaataaaaactggaaaagatttcaaaataaacttgtctcttttcatttttcaaacacagtgaaaggagtaaatatggcagagcattactactttttttaccttctgctttccccacatattataggtgtttccttatttcttactttggaaaccttcacaaaactattttccccagccctgacaagtatgttgacattacccttctacaccaacccttcgttcttactctgcattataaaatctcaaaatcaacagtcaggaaaaattggagaggagaacctaaataggcaagcaggattttatttagaagaaatagaggaaagtttaggaaccttaatagaatagtgatagttttgctacatggaatcaatttgtaggcccttgcatactatgagttagtagagtcataaagaagcttcatggagcatttattctaactcatgaatgaaaaactttggtcagaaaggttaaatggcctgccgcagatcaaatattaatattcgtactgaatctggggagcaattgtcccagctacatactcattatttgagcactgtgcccatagtagcagtcagcaaactgtagaccttggatcaaatctggcccactgcctgtttttgccaataaagtattattaggacacacttatttctttacctattatttgtgactatggctcataaggcctaaaatatttattctctaaacatttacagaaagcccttttaaaagtaagatagctgtcaactgtgtcaagtccttcaacacaagaatatcttacatatgccaccccactcaacacacacacacacttaaacacagccacattaaagggttttgttgacttttttagcaagtcacaaattatttgagaaagaccttctttttactagggggtaaaaataggagtaatgttgagtgaaaaacccttgtgttcccttcaaaatagctcatatttattgagtgcttatcattgttctggcacagtcctaggtgttttacaatatttactcatttaatacagaaaatctataattacctattataacacattgaggaaacagagactacagacattaagtaacttgctaaactatagctatgaagtgacagggtcaagtttcaaatccagacactgactccagagctcacaggcataagttctttcagagcctccacaaatactaagaaaacctttgtcttctgcaatctcagcaagctaggcaaggctctatttgaatatccagggctaatatggagtactctgtgttaatatttgtaaagtatgaaggtcctttgagaccatctactgcaagccagacttcttttttttttttttttttttttttttttctgagactaagtctcactctgtcgcccaggctggagtgcagtggcacaatctcagctcactgcaaccccgacctcctgggttcaaacaaatctcatgcctcatcctcccgagtagctgggattataggtgcctgccaccatgcccagctaatttttatattttttgtagagacagggtttcaccatgttggtcaggctagtctcaacctcaggtgatccagctgcctcggcctcccaaagtgctgggaccacaggcgtgagccaccgcacccggcccagatttcattttattagttcaagattgtcccttccttaacagcttttaaaatttagaagaactttcttttctggcaggttcaagggaagaatgaggacacaagaatcaaaagtttagggctctggccgggtgcagtggctcacgcctgtaatcctagcactttggaaggctgaggcgagcagatcacttcaggtcaggagttcaagaccagcctggacaacttggtgaaaccccgtgtctactaaaaatacaaaaatcagccaggcatggtggtgcacgcttgtaattccagctactcaggaggctggggcaagagaatctcttgaacctggaaggtggaggtttcagtgagctaatgccactgcactctagcctaggcaacagagtgagactctgtctcaaaaaaaaaaaaaaaaaaaaaaaaaagagtttagggctctggtggaaaataagattattatgttctatttgacatcaagcgattgtgttgagtgaagagcaggcatattgtgaaaatgaaaggaatgtggattttaaagccagaaaataatgactttgaatttaaaatttaactttggaaaaattactacaagctccctgagccttgactttcttattttggtagtttgggatattcacttccccatgttttccataaggttaagtgagattatgtatgtgatgaactctagcacaatgtaagtaacttatctggcactcagaattctctgtattttccttgaaatcacttctctgtatgtttctcatatttcaatcctggttcttagttctttttcctccttgaaatgccacctacatttctttatggaaggacaatgcctcttcagtatgcaggagtacagtggctgccttccggaccttctcacagtttttctcattcttgaacttatcggtaaaccactgaaaaatggtcacacatgggtaataggtataattataattttattatttgtgatttatcttctctattacattcatctatgcacattctatttctgactatgaaaacaccaactcttcagggccaaggaccaaatctctgctttggtaactggggaaatctgtagatgtttcacacgtttatagtaataaaatattttagaggactcactaagtttaccttaagtaatgttggaaaaacaacagagagaaaaatccaagagagaaaaaaaagccaactcagagacaatggaaatcagtgttttctgtgtgtgtatttgcttttctaggagcaagaattagagctctgacataattaggaaaattcagcttgtgtgtgtcactctgtatatcacttcagccatgatgactgtttttcattatttctcttttcttctcttccccatggcatctgtttctttggcttttgctattgtatggtacctacacactatcattcctttgtatctcttagtttcagcttgctatggtcaacttttttgtttcactggcccaattccccagaagtctgtgactcacctaaccagtcatctttgttcacattttaaaaaagcatttgcccaagccacaccagatgcttttatccagcccaaatattatcctcttaaaatagatgtccattgttagtcacttcagctgggaccaagggaatggcatcctgatgtacagaattcagccacctatatttcctaggaacaatttaagcccactttccacagctgcagggaggggtgaggacaagatggttgtggctaaatgattgaaaaggcagccaagaattgagaatccaatctagggcttataatggtttataaaggtgataataatccaatgtgggaaacaagcaaatcagtatataaagggtgatgtgagacagaaatcagtctttaggctcctagccttcttaagagggacagcttttctcttcatttcccccagtaactgtcccaaagtgtggcatgacacaataggctgcccataatgaacagcatgcgttctagattaaaccaaacatctccatatcaaaactaaaactactatgcttctcactctcagtgaattagtctcaatgaatagtaccagtcagaaggaggttcagtattctatacccatagatttagaatattttcaaaagtcatctttagtgaaaaatgtatagaggtcacacttcaattcgatttggtgccgttctggaagtgatccttacttaaaaagaaaattgaagtccaagttatgtgagttagttaatcattaacagaatcaccttgaaaatttatttactttcctatatatcagtaaattatatgtgtaagttgcatatgtattcacttttgtaaggctagcccaaaatgttttcactggtggagaaagcaaaaccacaagcatctgctaaaaagtgagcagcttagggttggacacaagtaactgataatccttcctggggacaatttcagcctgagcggaagacttctctagattcgagaggcttaaattaatatagagcttggaaaggtctggtagtacacaatatataaaacatttaaaacatttggactttatatcttatggcaatgtgaaaggaaagagatgcatttgaccctgtatatggcaatgaggtggcaaaccgacaattaagcagaaaaatctgaaggccaaatgtcaaaaaaaaaaagagcattaaccctgagtagtgacattttaaaaatgtccttggctcacaatgaagtataagtgctaatgtgaccatttatttgtctatttataagagggaaaaaaagccctgagtttctaaactgtttggaaatggatcttattcttcctgaaaaataataaggcgctgttattttcaccctaagggtcaaaaataggaagaaatgtccattagtacccgtcaaagcttacatatgcactattcgcatcttgaaagaagaatttgcatgctgtagattttccttggcaaaaaccaacattttctctgagagagaaggaagtaattattataaaatgttcacacttaatggtaaaagtagaatatttattctaggaatcctaaataggtagttataaaataattaaaaggtgatatgttcttgtgtctatctttcttttcagtcttgatctttttatcacaatgccattaaaatgacagaaagagaaagtcactttaagtgttgaccaaaaaaatcactaaatatatatttatcaggcttgtgagcagccacaaaaattgttttgtaatgaaataatgataaaattacagaatcatacattataatcaatatctccttttgtgcttaactatacagtagcaaagatagaagttttaaaggaatattttcagggaaaaataatctttccctgtctgtgctaaaaatggttgatgaaaagttttcttcattttatagtcttaaaaatacatatgagaaagtggctaagaaatatttaaacattagagaaaataaaatgttgatattttgataaatgtagagatctgtttggatggctcttttgatgagagatcaaaacaacagtccgtgaactatgaagcaatctactcttcctctttcaagtgtccttctctaagcaccttgcccacattttgctatagtgtgtgtcatttggagtatatttttactaccattgttagggacagaggccagtacattacctctgcttaaaaataacactctcagatcccattcatttacagtcctttaaatacattgactttggctcccagaaatgtgtgtcagtgggaacttttttactattattatactttaattctgggatacatgtgcaaaacatgcaggtttgttacataggtatacacatgccctggtggtttgctgaacccatcaacctgtcatctgcaatagttatttccgctaatactatccctccctagacccccaacccctgacaggccctggtgtgtgtgatgttcccctccctgtgtccatatgttctcattgttcaactcccacttatgagtgagaacatgcggtgtttggttttctgttcctgtattagtttgctgagaatgatggtttctagcttcatccatgtccctgcaaagggcatgaactcatcctttttcatggctgcatagtattccatggtgtaaatgtgccacattttctttatccagtctatcattgatgggcatttgggttggttccaagtctttgctattgtgatagtgctgcaataaacatacatgtgcatgtgtctttatagtagaatgatttataatcctttgggtatatacccagaaatgggattgctgggtcaaacggtatttctggttctaggtcctcgaggaatcaccacactgtcttccacaatggttgaactaatttacactcccaccaacagtgtaaaagtgttcctatttctccacatcctctctagcatctgttgtttcctgactttttaatgatcaccattctaactggtgtgagatggtgtcttgttgtggttttgatttgcattactgtaataaccagtgatgatgagctttttttcatatgttttttggctgcataaatgtcttcttttgagaagtgtctattcaaatctttagcccacttttaatgaggttgtttattttttttcttgtaaatttgtttaagttccttataggttctggatattagccctttgtcagatggatagattgcaaagattttctcccattctgtaggttgcctgttcactctgatgatagtttcttttgctgtgcaaaagctctttagcttaattagatcccatctgtcaattttggcttttgttgctattgctttgatgttttagtcatgaagccttagcccatgcctatgtcctgaatggtattgcctaggttttcttctaggagatttatagtatggggtcttacattgaagtctttaatccatctttagttaatttttgtattaggtataaagaagaggtccagtttcagttttctgcatatagctagacagttttcccaacaccaggattattaaatagggaatcctttccccattcttgtttttctcaagtttgtcaaagctcagatggttgtagatgtgtggtgttatttctgcggcctgggttctgttccattgttctatatatctgttttggtaccagtatcatgctgttttggttactgtagccttgtagtgtagtttgaagtcaggcaatgtgatgcctccggctttgttctttttgcttaggattgtcttgactatacaggttcttttctggttccatatgaaatttaaggtagttttttctaattctgtgaagaaagtcaatggtagcttaatgggaatagcattgaatctataaattactttgggcagtatggccattttcatgatattgattcttcctatccatgagcatggaatgtttttccattcgtttgtatcctctctgttttccttgagcagtggtttgtagttctccttgaagaggtccttcacatcctttgcaagttatattcctaggtattttattctttttgtagcaattatgaatgggagttcactcatgatttggctctctgtttgtctattattggtgtgtaggaatgcttgtgatttttgcatgttgattttgtatcctgagactttgctgaagttgcttctcagcttaaggaaatttggggctgatacgatggggttttctaaatatacaatcatgtcatccgcaaagaaagacaatttgacttcctcttttctaattgaataccctttatttctttctcttgcctgatttccctggccggaacttccaataccaggttgaataggagtggtgagagagggcacccttgtcttgtgtcttaggtttgtcataaatacctcttattgttttaaaatacattccatcaatacctagtttattgagagtttttagcatgaagcggtgttgaattttattgaaggccttttctgtatctgttgagacaaacgtgatttttgtcattggttctgtttgtgatggattatgtctattgattggcatatgttgaaccacccttgtgtcccagggatgaagctaacttggtcgtggtggataagctttttgatgtgctgctggattcggtttgccagtattttattgaggatttttgcatcgatgttcattggggtggcctgaaattttctttttttgttgtgtctctgccaggttttggtatcaggatgatgctggcctcataaaatgagttagggaggagtccgtctttttctattgtttgtaatagtttcagaaggattggtaccagctcctctttgtacctctggtagaatttggctgtgaatctgtctggtcttgggctttttttggttggtagtctattaattactgcctcagttgcagaacttgttatggtctattcagggatttgactaagacccacctcacgtgcaaagacacacatacgctcaaaataaaggcatggaggaatatttaccaagcaaatggaaagcaaaaaaaaaaaaaagcaggagttgcaatcctagtctctgataaaacggactttaaaccaacaaagatcaaaaaagacaaagaagggcactacataatggtaaaggaatcattgcaacaagaagagctaactctcctaaatatatatgcacccaatacaggagcacccagattcataaagcaagttcttagagacctacaaagagacttagactcccacacaataatactgggagactttaacaccccactgtcagtattagatagatcaacgagacagaaaattaacaaggatattcaggacttgtactcggctctggaagaagaagacctagtagacatctacagaattctccacccaaaatcaacagaatatacattcttctcaggagtgcatcacacttattctaaaattgaccacataattggaagtaaaacactcctcagcaaatgcaaaagaatggaaatcataacaaacagtctctcagaccacagtgcaatcaaattagaactcaagattaagaaattcactcaaaatcgaacaactacatggaaactgaacaacctgttcctgaatgactactgggtaaataatgaaattaaggcagaaataaataagttatttaaaaccaatgagaacaaacatacaatgtaccagaatctctgggacacagctaaagcagtgtttagagggaaatttatagcactaaatgcccacaggagaaagcaggaaagatctaaaatcaacaccctaacatcacaattaaaagaagtagagaagcaagagcaaacaaattcaaaagctagcagaagaaaagaaataactaagatcaaagcagaactgaaggagatagagacatgaaaaaccctttaaaaaaatcagtgaatccaggagctgtttttttgaaaagattaacaaaatagaccgctagccagatgagtaaagaagaaaagagagaagaaccaaatagatgcaataaaaaatgataaaggggatatcaccactgatcccacagaaatacaaactaccatcagagaatattgtaaacacctctatgcaaataaactagaaattctagaaaaaatggataaattcctgaacacatacaccctcccaagggaacatttgctttttaaaacaatgtagtacacagtttagaatcccacttctggttaagtgggatagacccagaagagagatagagctttgtgattaagtgggaagctctggagtcagactgcaggagtcacatgctatctctactgcctgtagctatgtaatcttgggaattacctaaccctatttgtatattattttaccaacctcaaaaaagaggataataagatgataggatatcatttctaaagttgtaaagggtctattcaagtaaagtgcttcaaacaatatgtggcacatagtagtagcaagcgacttttattataaaatcagtattcacatacagctttttgtcacctttttgagcacaaccgttttaaattacttttccatgtattttgaaggatttaaaaatgtcattctagagtggcaacatggtaaattggcagagaaaaagtctttggaatcaaagatatttggtcatctcttacaccatgtgtaaacttggataagttgtataaactctctagacatcagctttctatttttaacatgggagatgtaaattgagaaatgagtaatataatgcattcagggatctagtacagtgatagatgctcaatagacaataactatgggttatgatttgactaaattagattaaacccagaattctacatgatcacataaaataccaataactgaatttagaatgttcgggatgtcattgaacatttaatattgtattggtagcttcatcaagcatactgtgcacacttaaatattaaacatcagtagaaactaagggcacccttattccagcaacacatcatcaccaatgtattaatctggtaaactcatgaactggatgaaatcctagctctccttaatctacctttgtcataaccacagcatatgggctgaattttggtgtgagaaatctaatactccttaaagtacataagtgcatacatattgtgatcctctgtgtcctgatcccctccctaaagtgtttctgtcagctgtcaagagctgcctgccaaaggttatgtcacctcccagaggagatatgagaccgacagctaactaattcagggactcagaggccccagtccaattgtaaactagtgcaaccactatggagaacagtatgaaggttcctcaaacaactacaaatgcaactacatattgtccagcaatccccctactgagaatctatccaaagcaaagaagatcgaagagacatctgcatctcacatctactgcagctctattcacaatagccaagatatggaattaacatatacaaaatggaatattattcagccataaaaatgaataaaatcctgtcatgtatggcaacatagatggaactgaaggatattaagtgaaataagccagaaacaaaaagttaaatgctgtgtgctctcacccatatgtggaagctaaaaaaaatttgatctaatgtaagtaaacagtagaacagaggatattagaggctgggaagggtgggggaaaggaggaataaggagagatttgttaaaggatacaaaattacatctagatagcaagaataagttatagtgttctgtggcactgtaggatgaccatagttaacagtaatatatagtttcaaataactagaaggagaatactgaacattaccaacacaaataaatgataaatatttgagatgatggatatgctgattaccctgatctgatcactatacatcatgagtattgaaacatggctatgctaattaccctgatctgatcactcaacattatgagtattgaaatatgctaattaccctgatctgatcactatatattgagtattgaaactattgtactttataaatatgtacagttattatttttcaattacaaataaataaagtcccatcccactgccccaatattttggcacaattctgaagggccatcccagctccagagctcactgcaggatcgactgggtcctctgttgcaaccatattgctgatagtttttgcctttgccatccatactttcctgcagctgtatctcctgagaacactccccagtaaaaaaaaccttctaaacacaactcctttcccagagactgcttctggagaacacaatctaaggcttcccctagtttgaaaggttttataataaaaaagtggaacatgagccaagtatttctttcttatctatcatggcacagcaagcaatggaagaattcaaagtggagctgttttaagaacttggtcagccctttcgaagccacagcatgcctcataacaaacatatgaaagcacacccacattcaacattaattatttactgcaaaattctggaaaggaatgttgtaattttgtttttgaaattatttaactatgatataattaaggatgggccatgatttttcagcagaactcagaaattcttgcgaagtggaaaaaatatatccagcaaactgttttcaaattcaataaaacttttatgaatactaaatttaataattaatgacgtttacataatgttatgtcttgcagacatttaattaaacatttattcattttgattttatgggttcttttttgtattccaaagccaataaatttgatttcaaggactcaaatgttatatgaaggtcttagaatatctcataagccattgaaaatgtcaaggcccttgaaaatatctgtatagaaatctagcatacatttacaaaatacaaagcgtaaactttttcctttttcttattcactcttatttctaggctatggtcaggtagataaatgctcaatggcttcaatgtaaatagatatttattttagagctcattcaagtttgagagaaaggagaaaatgtacacagagggactatttgaatacaaaactgactcaggttaagctggggtcattccctttcacatttccaaggaaatgttccatgtgcttcatctttatcttgtataggtaggcatagctgtgtgtttaactgtggaccatcatatgtgactactcctccctcccccagtaaagtgatatttcacaaggctctcccaatcagggtgcattaagctataagtatacacatttagtcacaaatctttgcatgacactctccgctattagttttagaaaactggctcttcacatcaatttttgtggatctctataaacataaaaaaggagtaatagattctggcatgtgtatgtattttaatccagatgaaccaaccacatcttatattgactttgtttaataataaaaatcaccaaagttagcaatggaaaagacttactacattaggaaatagatccattaagcttattcaagataataacattttcagtcacctgaattcatccccattctgcttctatgaactatggagaaatatacacccatggtattttttcattaataaaaccatctttgaaacattcaacatagtgaagagacaacccacagaatggaagaaaatatttgtaaactgtacatcacatctcatgaagggttaaaaaccagaatatataaggagctcaaccaactctacagaaaaaaaaaaaaaactaataatctgattttaaaatgggcaaaacgatgtgaatagacatttttcaaaagaagacatacaaatggcaaacaggtatatgaaaaggtgctcaacatcattgaccatcagagaaatgcaaatcaaaactgcaataagatcaccttatcccagttaaaatggcttttattcaaaagacaggcaacagcaaattctaccaaggatgtgcagaaaagggaacccttgtacactgttggtaggaatgtaaattagtacaatcactatggagaacagtttggaatttcctcaaaaaactaaaaatagagctaccatatgttccagcaatcccacagctaggtatataaccaaaaaaaaaaaaaaggaaattatcatattgaagagatatctgcacttccatgtttattgcaacactattcacaatagccaagattttgaggcaacctaatgtccatcctcagatgaatggataaagaaaatgtacattcacacagtggagtactattcagctatgaaaaagaatgagatcctgtcatttgcaacaacagagatggaactgaaggacattatattatgtgaaataatgcaggcacagaaagacgaacattatatgttctcacttacttgtggaagctaaaaatgaaaataattgaactcatggagatagcgagtagaatgatacttaccagaggctgggaggagtactagacaggggagcaaaggggacggttaatgggtacaaaaataacacttacactaattaaactaaagagcttctgcacagcaaaagaaactgccatcagagtggacaggcaacctacagaacgggggaaaatttttgcaatctccccgtctgacaaagggctaatatccagaatctacaaagaacttaaacaaatttacaagaaaaaatcaaacaaccccatcaaaaagtggatgaagtctcgaagacatttatgcagccaacagacacatgaaaaaatgctcatcatcactggacatcagagaaattcaaatcaagaccacagtgagataccatctcataccagttagaatggtgatcactaaaaagtctggaaacaacaggtgctggagaggatgtagagaaataggaacacttttacactgttggtgggactataaactagttcaaccattgtggaagacagtatggcgatttctctaggatctagaactagacataccatttgacccagccatcccattactgggtatatacccaaaggattataaatcatgctgctataaagacacatgcacacgtatgtttattgcggcactattcacaatagcaaagacttggaaagaagccaaatttccatcaatgaaagactgaattaagaaaatgtggcacatatacatcatggaatactatgcagccataaaaaaggatgagttcaggtccttggtagggacatggatgaagctgcaaaccatcattctaagcaaaccatcacaaggacagaaaagcaaacaccgcatgttctcactcacaggtgggaattgaacaatgagaacacttggacacagagtggggaacatcacacatcagggcctgttgtggggtgggggatgggggagggatagcattaggagatatatctaatgtaaatgacgagttaatggttgcagcacatcaacatgacacatgtatacatatgtaacaaacctgcacgttgtgcacatgtaccctagaacttaaagtataataaaaataaaaataaataataccgatatcgaatgaataatatctagtatttgaaagtacaacggggtgattacagtcaacaaaaatttattatacttttaaaaataactgagtataatggtattgtttgtaacaaaaggaaaggataaatgtttgaggtgatgggatatacccatttaccctgttgtaattattatgcatcatatgcctggatcaaaatatctcatgtaccctaaaaatatatacacctactatgtatgcacaaaaattaaaaattaaaaatttttaaacacagattatcaaaagcaaaataattataataatttcataggaaagtacaataagcatttgaccattatctttttgtagggaatttttgttttcttctctttttgtacaattataattaaagttgcaataaacattaaacaaataaaataaacaagaccatctttgttctatattgtcagtgatctgtgataaggtacatgataggataatataggacttttttttttttgcccaaaatacctcccaaactaaattgtaatttcttttcctcagaatgaaacctaaatttgttctaaaactgattattttacatgttatattttacatatatatggtagaaaatatttgcaaaccgtacatctcatgagggattaataatcagaatatacaaggagctcaaacaactctacagaaaaaaaaagtaatcatctgatttaaaaatgggcaaaagctctgaatagacatttctcaaaagaagacatacaaatggcaaacaggcacatgaaaggtgcttaacatcactgatcatcttttatatatataataaaatatgagccagatttaaaatatttacatagtcttggtctatatttcactcccaaattctaccaaatccataaaacataaggtggaaagaaattacaagtctcaattttgatcacttctcagaattctacaataatcccagtgtcaaccctgactgctaaatgttgaaaatctgttttagtgagtgttccaccaaaatttgcgtatatgtgaatcaatcctaaagcattttcattatcaatgatcatttttacaaattgtgttttacttgttttataccctgtgctactccttatctcttttcaattattcttcatgtaaacttcagtatttcagccatcagcacatttatcccattgaagatcaataaaactcaggaaaaaggaagctatattcagaaaagtaaccatcatttcactgtcaaaataagtggcttaatatcctaagagctatttaaacttctctcagctttagttttttcatctctaaataatatttttttgtgggattattttaaggataacaaaacagcttctatttaatgaaatcttaggtgtgtcaggcactatgctacccacttgacatctcacataattcccacttttctggaaggttatactataattagtccttattttacaggtggggaaactgttgagaccaatattacacagactagatgcttaattacatttagtatattatatatggattatcacatataatataaaaatgaggatttttaatggattttggagaattagaactggcatttagttcagctggcatatgtattagtcagggtttttcagaaaaacaggcacaataggatatacatatatacagagatttattttaagaaattgatttacataattgtgggagctgacaagtccaaaattaatagggcaagccgacaggctggaggtgcagttaagagtcttgcatctgaaggctcgaaactaaggtagaatttctatgttgcagtctgcaggtaaaatttcttctttttggggaaacctcagtcttggccttcagcaaatttaatgagacccattcatattatggaggattgtctgctttacttaactggtggtaaatgttaatcgcaactgaaaaatagtcttagagtaacatctacacaagtgtttgaccaaacaactgagtaccatgatctagccatattgacacataaaattattcataaccaaatatttgattttttaaaaaaagaagtcccatattgtcctatttgcataccatctcagatatattattgaaagccagatcatctgattcgagagtccacaagcttatgactctgataatcactagaaaacatgtaacaatgccttgcacagtgcttgtacaaaatgaacagtaaataaatcttcgttgaatctgagttcaagttagattctgggtggtttccaagaggaacctcaaccatgttattactaattagtgtttccctcaacattctctcgtctttctttacccctttttatttctccactgatttcttccattggtttcaccattatattattgaaaagctgtcctttaagttttattctgaacttccatgtttgagatcctcaaatcgaaaatctctctcaaatatgctgtcagtagagatctgttcaagatggcacgtaattttttatatgccttcatacttgtcttatatcctgttttccatgaaatgctcattcagttttctagattaatctatgtgtgaaatcaatatggacaaaaaggaatatacacaaggcaaaatgtgactccatgtaacattctaacatagtgtttaaaagtgtgggctaaataacttaagatcacttcactttcgtcaagtccctgctacgtaagatttcccatgtgcaaaatgacgattatcatagtaatacaaatcacaggactctaatgaagactcagtgacatgatagatactgactatgtagaatagtatgtggcaaataagaggtgctctgtagatgaagaaatatttttataaaagtataattagtggggtataaaaagacagcttgtacatttctagttcactccttcataaaagcatcttaatcttgaaagatagtaagcagcctgaacgaagtagcagaggatgccatctgctctacccagtggtttttaaaacaacttcttacaacattggcttccaaatgacattgtgtatagtctggtagcaatctgtgacaatgctctgtttattctggtcaatggcaaaatgggaatattaaggagtgtgtgtgtgtgtgtgtgtgtgtgtgtgtgtgtgtgtgtgtaagttgccagctctttgttcgtgagaaagactcttttctttctgagattctaaccctactaagctttttggtattatattttggtttttaatgataaaataattatatagtagctggtgtttttaaaatgttgttatgcagttaatttaaagtttggtaacactatgtctgtggccaaaacattttttaaaattatcctgctttgcaaaatcaaacatctgcaaatcactgcctgaggaaacaatcacttcttcggtctggcaggagctctgatatgactgtgcagtgatgaggaaggggtgtgatgtgtgaagcaagactgcaaaacagcagaccatttctatgtgttatacacaaacaggttaaaagcatattttactctcaagtatgacggggaaatactccacttacaaagcgctttacttttctatattagagtaacaaattaccacaaaattagcagcttaaaataacacacacttgttttctcccagtttttatgaatcaagagcccagttatagcttatctgggccctctctttgagatcttacatggtcatgtattatcagccgggttgcattttcatctgtaggtttgattggggaaaatttttcttctagtttcattcaagttgttgtcagaattaatattgctttggtctgtgtggatgaaagcccccaccctttgctgattggaggctagaggctgacctcagggaccagaggccatccatagttcccaggggctactcacagttccctgcaacttaggcttcctcaacctgactgcttgcatcaccaagccagcaagaagactctctcctatgtaaaatctctaacttcagagaaggcctagttctttttgtaagggcttttacctgattcagtcaggcccacccaggataatttccctcttgactaactcaaaatcaacctatttggcatctaaattgcatatctgcaatagcccttcacctttgccatatttactaatgagaagttgtgtgccttgtccaaactcaaggggagagcattgattacacagggaatgaatataaaagttcagggtagaggcgaaagggtcatgcaagccactccaagttttacgtgccacagaaagaattaaatgtgttttactgggtatttaaaggtagcactggcaacatagggagaccctgtctctacaaaaaaattaaaagattagctgggtatggtggtgcatgcctgtggtcccaatcactcagcaggcagaggtgggaggatcacttgggcccagaaattcgaggctgcagtgagctgggggaggcactgcactacagcctgcactccagccctggaggcagagtgagatcctgtctcaataataatcataataaaggtagtgctagtggggacactagcagtagcaactaaggtactctggattctagccttgactgccacttattagttacttaaactagacacactgcttagcacattgagtgttttacttataaagtgtgataaatgtaaatcctgaactaaaaaattattaagatttccatacaatgccaaagtgcagtgattataggatcttcaaatgaggcttcagtacataagaacaggtagtgtgttcttatggctgaatacaaagattaagttaaaagtgcttattgcttttattttaaaataatttaaaagactgtaactaatcaagaaaaactgtatagagccttatgggttttgtccccttttttcaaatgggcaaaatgtgaaggaatgtgcccttgattttcaacttcaggcatattattctcttcaaaatttggataaagttgaatgggtcaacttaaagtctttgaatcatttggatcgatgttgctacctatgctcaaagaaaaatgagaatgggaacatatattaatttattataactgtttttctatatttctataatggaatgaaaggaaaatagcatatttcttgtagaattacaagacgccttatgtaaaactggctttgtgaaaatcacattgatttactccttgacaagttggcgtctttgaattgcataaattccttctccaacctctgtgtaagtctagagaatcaagtgacaccaagacagaatctagctaatttaagtcaatatttccttgtgaataaataaaatgctaagagttatgaagctcagctgttctcctaagctctgctgacacttgaaatacatgactgattcctcaaggactttgtccatagaggaaacaactagggaaatattttccagtgaagtgttgatttactttaaactctgttctctcacagacacctaggagaaagcctttttttcttttaattttataggttctttttctccactggtgaaataataagcaatagatgatcctcaagctaacattacacaatagctagatgattcaatctggcactgctttagtgaactcatttttatactgctcctcttccagtgctgctaggattggttttgtataatacctgaggtttccatattaaattaagaggtatacatgtttccttcatctttacattctaacactgccttcataaactcaattcacaatggttaagtttagaaggtgctgagtcaggcacgacactggtcactacaagaaactaaataattggcatttaataaaagagtttataactttgctggcttgaaggcctcaatacaaggctggagccagcaatctaaggttgttactgaacagttaaggtagcatcatgataactcttcttgctttgagtctgtgctcactacattctgtcagtaatgctttaagtttacagtcctttcactttaatcccatttcttaaaattaaccacttttctctcttcccaaaccagctcattctagtcacaaagacgtttaagtcatgaatgtatgaaagccagttttttgtgtgtgaatactactgtggctaattttattttcttctttatactttttttgtatttactgctcttttaataagcattgacttataaataaagatactttttcgattttggaaaaattaatttggggctattttcatttagcaatggtatttaaatgtcttaatatgtcactaaattagttcttgtcttgggaatttaaagttccaccttgagaaacctttaagtatagcaatatctttagaacttccgtcaggttttctcatacactgtagtcttattgaataaaagcatattcttaatttgttttttcttaagtgggtgctttttattttcctttgtatatatgaaatcttactacagaattgaagacaatgaagatatttgcctattacccggaaattatttttcagatgtccaaatattttcccataaagaaatttttgtaggccgagagccgtgcctcacacctgtaatccaaatactttggggggtcaaggagggaagatcacaaggtcaggagatcgagaccatcctggccaacatagtgaaaccccatctctgctaaaaatacaaaaattagctaggtatggtgacacgcgcctgtaatcccagctactagggaggctgaggcaggagaattgctggaaccagggagacggagactgcagtgagctgagagtgcgccactgcactccagcctggggacaagtgagactccatctcaaaagaaaaaagaaaattttttgtaaaacatcagttgcaagataaagatgagaaagactttaatgtggtgtcctagcaattaagtgttaaaagtgacacaaaagcagttattaaaatactagatgatagtgaatgtcagaaactaaaagaaatccaaagattgcatatgcattgttggtggaaagtaaaatggcatagcttctcaaagaagcatcagtttcttataaaagtaaacaagcaattactatgcaaccagtaattgcattcatgggcatttatcctgggagggggaaacctatgttaacacagacctgtacataaatgttcaaagaaattttatttctagtagctaaacactgtaagcagcccagatgtccacttcaatgggtaaatggataaaaaactgtgatacaccatttcatgggctagcactcagtaataaaaaggacaaaaagaaatcaatacactcaacaatttggatgaatctcgagaaaattatgctaagtaaaagctaaaagagagagaaaaaaatctaaaaaaggttaaatattaaatgtatttatgtatataattttttaatgacaaaattatagatgtggagaacagagcagtgttgccagagattaggaactggtagccgggagaggtggggaagagaaaagtgaatgtggttaaaaggacaacatgagggacacttgaggtaatggaacagttctgtgtcttcattctagtttaaatacacaaatctacatgtgataaaattgcatagaactaaataaactcacatataaacacagacacaagtacaaatacaactaaaaaaatctagacaagatcaatagattgtattgatgtcaatattctggttctgagattgtgttacaggtttgtaagatgttaccactgagagaaactggataaagcctatttgatgtctctctgtgttatttcttacaaccatatgcaaatctatattataacaaaataaagaggttaattttgaaaattcaaaagttttacagtaaataaccaaaagactaatttaaaatgtccttgcaaaccttgaagtataagaatatatagaagataagtacctgccaagaagaggaggagaaaagcttgagaggaagaggtacacttgaatagagctcacaatatactcataccttagaaacatggtacactattatgacacacacaatgtgaaaaataagcaaatattaacaaaaaaagtcaatgacttagaaaggcataaacgtaaatacacaaagaattcaaacataagcattaatgtttcaaaaacttagctattaacttctgtaataaacacaaaaatacagttgaaaattcttacagtattaagacaagtttttttgtttgtttgtttgtctgtttgtttttgagacggagtctcactcttattgcccaggctggagtgcaatggtgctatctaggctcactgtaacctccacctcccaggttcaagcgattctcctgagtaaccagaattacagtcatgtgccaccacgagggctaaatttttttatttgtagtagagatagggttttgccatgttggtcaggctggtctccaactcctgacctcaggtgatccgcccacctcagcctcccaaagtgctgggattacaggcatgagccatggcgcccagccaggacaagttttaatagggattaccacataatccttttgatgaattaaaacaacagaaatttattctctcacagttcttgaatttctggccagaagaacaaaatcagagtcactgggtcaaaattaaggtgtcagctagatcacactgcttcgcaaagttctgcgagaaagcccgtcccgtttatcttccagctttggatagctaccccatggtcgggcttatggctgtatcatttcaatctctgcctttgtggtcctgtcttttctttctgtctctgaaatcttcgtctgcctctctcttacaagcatatctgagatcacatttagggtccactcaagaacccagaataatctcccccctctcaagttccttaatttagtcacatctgcaaaactttttgttgttgttgttgttggtcatatgaggtcacattcataatttccaggattaagacatgactatcttttgggagaccatttttttagcctactaaataactaagaaattttattccaattaatttgaaaatttaattaaaagatggccaaatttttagaaaaacacagactaccaaaatgaacacaagaaaagataggaaatatgacttgtcatttcttttagaggttaaatatgttttttaaaacattctcatgaaaaaaaaatgcctggccaaggtgactttaccccagtgatttcttccaaacataagaagtaacaccgatcctacacaaaatcttccagggaataaaaaaaggacccatcctaattgattttatgagagtaggataacattaatatcaaaattttagtacacatacaaaagaaataaatattaacttcagtcattttcatgaatgcagttgcaacaaccataaatgaaatatttacaaactgaatccctccaatgatatatattgtcattggagatgacaatcacatgtataacaacagctaaaatgtactgaaaatttactttatattatataacaatggtgttatgctttacatgcatattcttgtataatttttaccattaagttatgaattaggcactgtatttaaacccatttagcaaataagacaactgagattggtgaggttaaatggattacatttatacattacattaattaatggcataaatagattccactaaagagaactactggaaaaactctggaagccttccagagacattaatgtatcatttcaaggaagagaatttgacttgagagggaaagtttgtagtctaaaactctgatctaagccatcatcatctcactcctaaccaactatccttcttccatcatagcttgtaatcccataatgtattttctcccatggtgagaagagtaagtctgtacattataactcagatattgtcacttttctgctgaaaacccctgtcagcttcacattgcacttgaatgcctttatgatggtttacaaggtcctacacacttgaccgtgtatcttactcccacttccctatgtcatcacactgcagccacactgacctccttggtgttcctcacacatgctagtacagtccagcctccttgcctatgcactggctatttaatctgcacagaacatgcttcccactgatgttgtagatctccctcccaatggaaccttatcaatttctaccattgtcacttttcagcaaagcgtaccctgatctctctatttcaaacataatcccccaagtccaaggcaccccttttcaccctatccttatttgtttccatagcactatcacttcctaatacactttttaattaatttgcttaatatgtttattacctatctctgccattagacctgaaagtccaaaagggaagagatttttgtcaaatgtatatattgttatatccccagctcctatgggaatgcctatttcatgtaaatactcagtggatatttgtgatgaattcttcagccaaaagttcaggcatatgaaaaatgaatctgtatttgagactgattgttcagaggacaggaaattcaatgactcctccatagttctgtccatttgttttaaaatttgaaattggataacattgtattgtatcttcatgactgctgtctagacccataagctatttgcttatttcagtattaatttcttccaaatcctatattgaagtcgcttttctgaacacaaatctctagtttcttaatgaagcattattaccgtgatgatttttatcaatctgaccgaatgtccatactaactgtgcaacttcataccacagattgctgtcaactgaaatcattggcctaacagtattcagttcggagtctcagtcatctttaaagaaagcgatggaaatgtatttggtgtgggacagttcttgaatataatggacttttttatcccttgatgttgtatgccatgttcatcagtgtcacacagaaagagtctgaccttgaaatgtttggtccaggtgccatggatatactgaatcagatcaatcaaatggctgattggatcattgtgtgacaatcagttatcaagatgacccaagaaaagacatcatgggacaatgatttctctgactacataaaatataactatagattaaccttataaagaaatcctgatgacctatatacaaattacccaacagactattctatgatagagtgttctggagcaatgcagatgacatccatatttttaatcctgctaaacatagtatctttaaaaatagacacacacaataaatagcaataacaaacaatatacatgttgaaactacagatgctgagaaaacatgtaaaatacatttcttatgctttaagttttgtaaagctcagttatataaattatttttctacaacatgatatataacaatttgtatattatggtatattattagcacaatatgaaactgattaaagcactcagctgatatcttttgctaaaatttgcatctaacttgagtatatattaaaaccatgccacagtaaataaaagtaatactctaggattcagcaaagctttcactgaattaatgccatgtcatataaaatagaagactactctctttgaattattgcaaaaccattatcatacgtaagctatgtacttatctaatgacctggcaaaagtgatttagactgggaaaactgccggatactttctattgatctgattccagcacaccttttctttcagtgtatctgaggaaaacagtcttccgcatactagtgttcattaaacatctttcttttaaacatatctagtcatatgctacactaagctaaatggttttgatatgcatttggtttttcactcactgtatgtttttgagccctgctacatgctaggtgtttgttctggatgctaagaattcagcagtaaacaagatagcctaaattatattagaggagaaaatgttttttaaaatgaaaataaaattacagattatagtgagttggaagaaatgagtaagattacatactacagtacttggaaacaagctttgataggataagggaagccttttctcttatcctaagtcacctgtgagggctaaatcctaattagttgatgagggtaggcatttcagtgaaggtagaactttaacttctaaatcatcattctgctatttactttcaaaaacaattttttaccttcttaggcatgaaggattagcatgaactacagaattacagaatgttagtactggaagccatcttcaagtttatctactgtttttttctatctcatattaaagatgagatacctaatgcctagaaagtagagttttatgaaaatttgccaatgctagtctgaagtagagccatgacaaatgttgggatctcttgactcccagctcaatgttcattcctctcacacacaatctaggtatccaggctagcattccatcaataggaaaaccttagacatactgcccagataagtgttaggctaagaatgaccatgtttagcccctacccactgtgatattacatttctcatacatggtaccttttctctgatgaattcaaatactttctggcaagtgatcacatttatattactacttaaaacacccctgtgacataagcggaagttatttatttctgaagtttacgagctgcctgggatggcaaaataggccacatggtgcctattaaaatcaagtcaggaaattcactgtagataaaggtagaaaccaaatgatagatataagcagccatatgatatttacacagtaacatgatgttttaaagtgttcaggctattttcactattggtataattatttacccactgaaacatacattcaactcttcctgcttaatcagctaaattttggaccttattttctcaagcataaatagttagatagatggtaggtaggtagatagatagatagatagatagataatatatggagagatgcagagatagaaaagatagatagagaaaagataatgcctgtttttctgtgtgggtgagatccatggggatacaaggaaaacttgtgatgactgaaaaggaattgagaaacatactcacaaatcttgaagaaattattaatttcttccatcagccacaaggtatgtatatgaattattagttgcaccagttatttatggttaatcagttgcttactaattagtcgtgtccatgcagtgtcaacttgtgtcttatcagctgtttaatatttttatatctctcctggttattaaaatgaaggtcaaactgtgctttgacatgtaattctacttgttttgtcttatgttttggtaacactatattcaagaccatttatgtgattggaaaacagtgtaagtaaaattttatgctgctaagtaaacttgaacttcaactattggaatataaaatgaggggatgagagcataagggattggggttaattttatgagaaagggcattggatgagggagtaatatttgtaaagatgcttggtttattaaggtttcatgttcagaggcatcttttaatttctactcccacagtcggttcttggtggccattatcccccagagcagtggggtttggcatgttttctttgaacttgccagggattctgtttgaaggggattatttgagtttgacaactgggagcaaccctgcctctctacaggaggatagaagagctgtttatttgaccagctgagagaaatgtacacagaggcaaacctgctagtgccactgggtcccaaggccctcggtaggatacagaataacagctgtttgctacagtgaacagatcagaggattttcatttaataaatttgtgctcttcttttattaatatttttaatggagtctggctacatgtcctgctgtgaccctttccacttacatttttaggggtagtcaaactggccaataatctaagccatgagttgacaaccttggggtgtattagaaatattagaaggctcaggctatatatgggcaaagagaaaaggaggaaggcagctacagtaactgctctgaagctaaagaatcataatatattcaatagtgtagtttttaccgagtcttcattaccttgtttgttgtcattagttttaagcaagattctaaaatctaaggctacatatccatgaaaggttagtcattgaaacagaaatgggaaattgcgttacaaatgtattgtattatgaatgcaagaaatacactgtcaacaattccattcacatgctttgtctgttttcttttgtgttgcagtataacgcatagaaaaacacacaaaacaaatttacaaccaaaggaatttttccaaaatgaatagcccaggtaaccatgatgaaaatagccggtaccctgacagtctcccttttgtcctcttcctattagtaaccctgcccttactccctagaagtaaccgctgtcctaaaggctaacaccaaacttcagttatgcttgcttttgaaatgtatagaaatgaagttatttaagtatgtatgcttttgtatttggctttattaagcattctgattgtgagattccacagtgctgcaagtagctgtcagtcatttgcttttttaaaaaaaatttattgctgaataggattctatcataggactattctgaaaaatttgttttgtctattataatattgttagacattttaattatgccacatactaacacatgtgacacatgacactgttgataactttgattttaaccattatagtgagtaggttacgacactcggtgaatgccttttctcattaataatcagagaaacagtctctctgattaaatacctagtcaaatatcctgctcttttttttctattggattggcttttttctaagttattcctaggatatcactatatactatctgtttattatatatgtgaaaaatatcttctcttagtctgtatctttcctctttgtctttcctagtttctttcattgaacagaagttcatattactacaacataattagtatcattttaaattaatctaattttttatgtttaatgtattttgtgtctattgcagaaatttttcttctgtcccaagattctaaaattattctcatgttattttctaaatttgttttacctataacattatgttgtaaaattcttctagaagtgattgttttatgatgtgagataagagtcaaattcacttattaagagttttcatttcctactgctctgatgcacactcttgtcataaatcaactctctatgtttgcatgggtctcctactggcctctgctgtgttacactggtcatttttcctatgcgtaaaccaatgtcagttttagttaatgtagctttaaattaatccttgatatctgaaaaagtgagtctttcccctagctcccttattctatgtcaagaatagtttagctattcttagcatttgcaaataaattttaaagtcaacttatcaagtgccaacaatacatacaaacaaacaaaaatttacattttattggaattgcattaaatttaaaaaataacttgcagagagtttacatcattacaatattgaatctttccactgataaatatggggtaaccctccatttatttaagtattctgtttctcttcaaaatgatgtatattttatttgtaggggtcctatacatttttaatgtatttattttgtgcatttaaaaatatttgctgtaagttatttgctatttcattttctaatatttgtgaaaaatataatttatttttatatatttaccttgtatctaagaaccttgctaaattcatttattgatatttcatctttgtatatacaaaattatatattctttatttaataatatgtttctatctttttggcatcattaatttctaacttttactaacaaatgtgcttaaggacatacattttcttccaggaatggtttcagcagcactggatgagttttgatacatggcatttttcaattttcttctgtttctaactgtgtccattcatggttccttatgcctgggttattttctggttttttcttctttttgtttttgatttctatatacttattctttgtctatatccttaacctgaactggcctctgccttgagggttcccatttcttgtaatacccttcactggcctcatgagccctgagaatttttctggtgtcatttatttcttatctggtctgagccatattatgggccatttcaatgctgtacacattaggttcttgtagttggctgtctgccagccctgtgctacctgtaccacatgtttttcctcttgaatagtcctaacggaaaatgtattgactctactatgatttctgacttcatctgggtcctcagtgctgcccagcatgctttctgttctctccttatatttttttcatgtggtatgactcactgcctctgttccaaactttcagttcttgagccaccaagtctttctccttctcttctccctaagtataagacctaccctgttctactgggcagattaaagttctccagcttaaattccttcaaatctcctcttcttcagctgagatgttttgggcactcacctaaattccactataaatgtattataatcagtcctcattatctgttcctttgctccatcttcagaggaattacattaccttattttcccaaagctaaccttgccgtcatacgttactttatgacatgttttttcacaacctctctaactttaagattttcttttcctttgcttaaaaaaaaaccctcggccgggcgcggtggctcacgcctgtagtcccagcactttgggaggccgaggcgggcggatcacgaggtcaggagatcgagaccatcctggctaacacggtgaaaccccgtctctactaaaaatacaaaaaattagccgggcgaggtggcgggagcctgtagtcccagctactcgggaggctgaggcaggagaatggcgtgaaccccagggggcggaggctgcagtgagccgagatcgcgcctctgcactccagcctgggcgacagcgagactccgtctcaaaaaaaaaaaaaaaaaaaaaaaaaaccctcataatatttctctcaccaatattgctattatacatagaatttatcttctaagccagctcttcaggggatttagccagtccagtccaatccaaattcacacaaatcagaagcaaaacagattatcactgctccttttatgcttcatgggttgtgacattgcataagacactgctttattccaacttacttctctcggttgataggtgaaattgtgactccatcataggctgtgttgctaaaaaacctagtcgtaagtacaagccctaattccctctttatattctgtcttcaatatttaaatacttatttatttggaagacttctctttccaaacatggtcaagtaaataagtgtttaaggagtcctgtgaattattttttcctataatctcattttagaattgcctttctaaacaatagagtattgaaatcgttataaatatcaggaaatcctataacaaaagaaggtgtgaatagtaaaagctgtttatttcttcttaatgattgtagcctatgattatttttatataatatttatacttctaattatgtcttgtgctaatattataattattttccattctttgcacataccttgactgataacagctactcagaagcatgcttagtggcagtaggaaaatgttggaattaaagatctaaattatgcacaaaaagctcatagataaccaagaattgggaatctcattgatgttttctacattctcagcagctttactcaccctcacacctttctcatattacttgataatggccatatatcttatttatgtggatgtactttacgagaaattattacggtaacatgtcagatctacccatcaactttctctctgaatcctttttcattcatcatttaacaaaaaatccttaggaaatgtgattcttattcttaaatctaaaatttcaggcttcatttttgtcatagtggaatctaaatccattttaacatatagttttcaaagtaaaatccatttaaaccacccaaaaagttttaatttatgttcataatacattttacattatgataaaatggagatgggtggggcttgagggcattgaattggatattctccaaggcccctttcagctcaaatatacttcgattcttagaaaaaaaatatatcattgccaagactgacagtccctagaaagaatagactgcttttaattgtgtggcagagtaatcttttgaatgtattttaacttgttcattgatttactgagtgaaaaataatctttatatattagagaaggtgatcttctgtttcctgcaatcagattattatctataatgccaactatttaatatgtttgtatagctatttaaggtttatgaagagcttctcatgggcatttaatcatcacaaccaccctataacagatcccccctgaggaaagagaaaaaaattaagatgagactgcaaaagcataaatgatctagcaagatcatcaagttcctaattggtagagttggtgcacagagaactttctgaaaaatattattgcagtctcaatgtaagcatcatcctgatggattcttttttctatccctaatatgcataccagaaatgtgttcacttaaaaataatctgatataaatatgatttaataaatatattttccgtgccaaataatagtgaagaaagaaatgcagcaaagtgtacaggcctacgccaaacatggaagacttggtggtagagaagattagtgtcgttgaatggcttataagcacaaccttattcagcctaaaatcccaaaaaaccattactgcccagtaagaaagtgaaatggtcctaggaagtcttaaaccactcttttcttatgagattaaaatgctcattggcacaaatttaccatcaacgtcaatttaatccacattaagaagaaactggagaataaacttcgagaatgaccatgctaatcattcccttgatcagatgaggaattcaaaactgcaggttaggtggtcagcacttacttcacactgatcaggtctgtgctatgcgggttactgcagggctgatcatctaggtcaagcataactatctcaaaatgttttttatggcttctttgcttcatttgaggatgcaggttaagatgttttatgtacttctcctgattaagcacctgatgtttctgatcatccataaatgtattaatagatgttcatcttttctcacatacgcattattccttgtaaagttagctctcctgtagtcaatgcagtggtagactcaacagatgattttgtcttcttcgtagattgttctaaatactgaggtctagaagtctagaaaacaactaatagtctagaaaacaacaataatgttcacttggtactatcaaaattagtcttttttgtggcaagtccagaactactctagtatattctgccagacattatgaaccaaaactgttcaccagaacataaaacaaatgacatagagaagtccagcagaataaaccatgtgcagaatatctttggaatgagctgatgagaactcattgagaataccagactagtgttcatagcacatatataacatatataatgcatatgtattttatataatacataaatacattaaatatattaaatatttaatctagttaaatataaaatatattaatagatagtatgttgcatttatatattgttagttataaaatacatctaaaatacataaaatatatataaaatatttatgtgtacatatgcacaaatttctcacattttaaagtcactgttgaatcaactcaaattaacaaatatatactcaacttttactacgttttgaggccctgaattggagcctgaattattgcaaccatttttattaactagtctcctgtgtctactcttgtgatagctaattttatgtgccaagttggctgggccatagtgctgggatatttagtcaaacattattcttggtattttcacgagggcacttttggatgagactggcattacgtatatatttttaactggcaaagatgtatgtactgaccatgttcaacatagtttttgaagtatatgtgcattgtgaaatgactaaatctaactaattaacatattcattacctcacatggttatcatttttgtggtgagcacactttatatccactctcagtatttttcaagaacataaaatattgttaactataatcatcatgtttttttctgatggtggctcttataagcaatgctgcaatgaatacctttatacatgttttcttgtatatcatatgagggtttgtctaggtttacatctagaaaatattgtcacttatttgtattagcagttttactggatattgccaaattactcttccatatagctgcaccaatatctactgtcaccagcaatgtatgacaagtttcagtccttgcaaatatgtaactccttaattttcagatttttgtgactggtagatggggttgaatatcatgttatatagacatcccgatcatatatcaagactcaggttggggattagctctctcaggacatttttgccagtcttcttctttgtgttcccttgcacaacactagcagagaatataaaacagtattttgaaatcatttgttttctctcctacttgacctacaggactgtgatctcatcaagggttgatatctattcttgtttgccttcgagttaccaaatcacacaacaatggcaaacacaccagtatatgatcaatgaatgtttgtttaagtgagcaaaaatataatagtgaatagttccaagctcaaaacaggtttggagcacatttcatggagatttttgagtaacagggcataagagaatctcagaattgaccctcacacccttggccttgtgtggtcctggccatagcacagactgtttccatgtatttccaaagaggcttgaccttagcaagtcatgaaggtctagatgtaggaatcatcataaatattactggtaaacgtcatgataattttatatctactatttcaatgtttcatttattcaggaagaagcactcactgaataataccaaaaaattttaagctttccagagaagtctcagatgttttgaaacaaattttggctaaactcttaaaacatgaacaagacgcaagtgtctcaatatattgaattcctcatttattcgtgacaatgagaacttcgtggtgatgagaatgtgatttaactattctgagtcccaattttgcactatgtaaaattgagatggttgagatggtaacagaacttgccttataggattgttgtgaggattacatgcaatgatgcaggcaaatgcttcacacaatgtctgagacatttggtgcatggaccaggagctcaatacatgatatgggactttaattgttatcattgttattgttgtttgactttaatcttaaagggaaaaaattgtctcctttctcactcatattaccaaattggtccttaatttagggggaatcttttaataggaaaattaacaaaagatattttcttatctcatgttctttttgaaaattgtctagttatccatttagattttggcttcaatccataacaaaagattgtaccataagtgcattagaattactttctaaacctaatctgccaaaaaacctagcctgctaatcaacattttcaataacatccaattttcactcacactacaacccaggctaatatttttatttgacaacatttatttaaatatatactaatttcctagagctattgtaaaaagtaccacagacttggtcacttaaagcaacagaaatttaataatttaatatctcacagttctggagtcaagaagtcaaaaatcaaggtgtccaccaggctgtgctctctgaaggctctatggtaggatccttcctaagctaattttgtataagtatcttcttttttctacagtcattgtattcaggaaattcaaaatacatcagctcttcaaacccattgactcaaccgtgatgggttatttgtatagagcagacatcatcaataatatcatcatcatcatcatcatcatcattggccatcataacaactagcatttttcagcactcatatgactaacaaaaggattcaaaatttttaatgattatttcttaatagccctattaatatcatgtgatattcctaagtggtagaactaaacttggactctgagccctctgtgaacagatcccataatgtaaaccactatgttatactattatgttaaacattatgaaactgctgatattcaaacattttgcaaacattcaacctaatacatgttactatttttcaggaagcaaaaatgaatatgcttaggttatacccctatatctaagatataaagcttattgttctataggaaaaaattctgatactatatttttccaattggaaattgtcattcaccatctaaaactacttcagaggacatttagctcatcacatgagtaagttagccagaatgtttcagtacgtaaaattatttgctgtagatagttagtggaaagatgacaggcacattcagttggctaggatgcccccattcactttcaatgctactttattctgcctagaagattttattttgtattgccatgaaaaaaacaagtgcctcaagtgacataaaattcctaatgcagcttacaaactgtaaagttatccattgggaatcagtgacttctttacagctttgtacttatgtggacagtataatccagtgaattggaacatcaacaattgcctttgattgttgagacgctatgtaacagaatgggagagggaaagtccatggttcaagtccaggccttataattttctcttaactgtatgacttaccatttctgaacttcactgccttcttcattttccttcattgcactaacatacctttcagtgttatgaccctatagttttactcatacattgaacaacactttacctcaaggaactaatgttaaaggaaggatgtatgggacacaaaggaatgggttctgatcttgtattcaatctactattagggtcacagataagtcatttagccttactggattccaatattcttattcatacaatgatgttatgaataaatctttatgttccccaaattcatatattgaaattccaacacccaagatgttgatattaggaggtgggggcctttgggaagtgattagataataagggcagaaccctcatgaatggattgtatcctaataaaatagaccctagtgagctcccttgccccttctgccatgtgggagcacagcgagaaggtgccatctgtgaaccaggaaggcggctgtaacaacaccacaccacactgagtctgtgtggctccttgatcttaaacatcccagcctccagaactatgagaaataaatgtttgttgtttaagccatccagtctatggtatttttgttatagcaatccagatggatgaagataagtaaaacagttgccttaaatcccatgcccagatttcaaatttgctgcatttattttagattcattatgatgttgttttgtagcaatagagcaatgagactaggaatatagaattttgaccaggcaggattagaaattttccctgaacaatttgatttaaatgaatttggtataagcaccttagtcagtcctacaactgggtgaaataaaaacctaaagcctttgcctttctcttacctttaaattctgtgtgaacatggtctacagaagctatcaaaccttcttttttaatgaccatgtcacaacctaacattaacttattttatacctgcaaaaatgctttctaaatggcttaggcatatgaatttaaaatgttctacctcatttttgcaagtttttcctgaaattgctgttgatttctggatttctatgttaaaaaatgaagaaagaatgctcctaaattttcatagctgaatgtaacactaaatgacaccaaggttggatttcacatttaactacatttgcatttagatcaatgcatgtagagatatgcaatattctgtatactttcacctgaataaataggttgtactgcataatgaaacatttcaggcaatgcatgttggccaatttgaaagtatcacatttaataaaatgggcctactttaaataaccaccttcaggtttaaaaacaaacaaaactggtaagctgcatattcataatattttataatttttttagattttttaattgacagatgtaattgtaaatatttgtggtgtacatgattttttaaaatctataattttatttattgctcacttatattgttaaatatagaatatgtacagagaatgactgatagctggaagactatataatagcctagaaaaattccctacttaggaagcagaaggctacattatctttgttggaaaaaattaaaaagtaatgctcacaaattaactatacgtaattgatctaatttttgttttagtacagtagttattcatgggggatactttccaagaccccagtggatgcctgacactgtggatagtaccaaaccctatatctattgtgttttttcctatacatatatacctaggattaagcttaccttatatattaggcacagtaagagattaacaataataaatgataataaaatagaacaattataacaacgaactttaataaagataaaatgagtgcttgaacacaagcgttataatagtgcaacagtgaacgtaataacctagacagctactaagaggtaggtagcatgtatagcatggatgcatcatgtcacaggtaggaaggagcaagactgtctgagatttcatcactctactcagagtgatgcaatttaaaatgtatacaatttttattgctagattttttcatttaatatgttcaaactgcaggtgacttcagctaacacaagccacagtaagtgaaacctcagataagtggagactactgcattttaaaagggtgaggtttttatacttggcatgtagggacagggaacacattgtctttgattgttgagagaccatgtaatataatggggaaagggaaacgtccatggttcaaatccatgccctatcgttttctccatgccttatggtgtaacatttctgaactttactgccttcatcttccttcattgcattgcatacttttcagtgtcatgactagttttatcgactagttttatcagtacattgaacaatgctttaattcaataaaataatgttaaagggaaaaagtattctaatgtattttgtcatttatgcctctgtcctgtggcaggacaatatttttatagcctttggagataagaaaacagaggtttcgtgcggcaataaattgcatgggcaataaattgcacaagcacacatagatgataagtaatggagctagggcaggaaaccatgtcttctgctcccagttcagtgtgactaccttcccattgcaaagactcacaccacaccttgctacctcatagatcaaaatgggaagtgactcaggaaccattaatgtcactgtggctttacaaacttgtttctaatctcaaagttggggtctttttcattttattgaaatggaggtaatgttaatgattggtagtcatgatttctaacaataagatggttgttttaaattcatccagggcaggactcaaatcattacagagtgctctgaaatatgaatgcagccactcagtattattagatgttctcctactactgtggtatagggcctgcatgtaagttcctgaggtatagacctaaaaccccacaacctctacactgctattcaaatgcccactcctcatagtcataactacctacaaataaacatcggaacgttttgctaaaaaaaaatgactttttgaaaatatgctattccccttagcaacctccacatcccataagctcaactctatagtcatgttttctacatttactatctctgttaaatctagcgaaatggcaaatctgtgaaccagaagtgaaagacaaatatttatatttattttgtcctgtcttcaaataaagaggttggttaacttgagccactacaaactacaccaaaactgcactttttgcaattcagtttttataaagcacctattcttggattttccaactagggttccatgagaaaattaagccttacagaaatgacttgataacatttttctcagttcttccattctagaggcacaggatgaaaattccctattccttccactgaatgccttaaggcttaactcttcagtagaatgttccttgagaaggtctgctagaccttaggttttacaaggaagcaaaaaacttaaaatgtcttgaagacagtgataatgactagtgttgctttccagatcattggatgcttggtatatagcaagggatggcaagtgctggcctgtgggccatgtatttttgtaaacatatttatttttatttttgtataggtgactttaaaattttgttaacttttaattttctgggtacatagtagatgcatatatttatggggtacatgagatgttttgatacagacatgcaatgtgtaataatcacatcatggaaaatggggtatctataccctcaagcatttatcctttgtgttacaaacaattctattacactccttaagttatttttaaatttacagttattattgattatagtcaccctgttgtgctatcaaatagcaggtcttattcattctttctactctgtttaaaatagaccatccctacctccccacctgccccactgccactgcccactacctttcctagcccccggtaaccattcttctactctctatgttcatgatttcaactgttttgatgtttaggtcccacaaataagtgagaacatacgatgttagtctttctgtgtctggcttatttcatgtatcataataatctccagttccatccacgttttcacaaatcacaagatctcatttgtttttatggctgaatagtactccattgtgtgtatgtcttacattttatttatccatccatctggtgatggacacttaggttgcttttaaatcttagctgttgtaaatggtgctacaataaaaataggagtgcagatatctcttcaatacactgatttcctttcttttgggtatataccccagcagcaggattgctggatcatgtgttagctctatttttagttttttgaggaacctccaaactgctctctgtaatgattgtactaatttacagttccaccaaaagtgtacacgggttccattttattcacatcctcaccagtatttgttattgcctgtcttttggatatcagcccttctaactagggctgagaagatatcacattgtagttttaatttgcatttctctgatgatcagtgatgtcaagcaccttttcttatgcctgtttgccatgtgtatgcattttttgagaaatgtctattcaaatattttgcccatttttgattgggcaaatattttctcccattctgtgaggtttcttttcacttttttgattgtttcctttgctttgagaatggtttttaacctgaggtgatccaatttgtccatttctgctttgtttgcttggtttgtgggtattcctcaaaaaatttttgcccagaccaatgtcctgcagagcttctccaatgttttcttttagtagttttatagtgtgaggtcttagatttaagtcatgattttcatatatgattggagatatgggtctagattaattcttctgcatatggatatccagttttcccagcaccatttattgaagagactgtcttttccccagtatatgttcttggcatctttgtcaaaaatgagttcactgtaggttttcagatttgtttctggattctctattctgttgcattggtctatgtgtctgtttttatgccagtactatgatggttactatagctctgtagtatagtctgaaatcagataatatgattctgtcagttttattctttttgcttaggatagctttgactattctggttcctttgtggttccaaagaaattttaggattatttttctatttatataaaaaatgtcattggtattttgatagagattgcattgaatctatagattgctttgggtagtatgcgcattttaagagtattgattcttccaatccataaacatggaatattttttcattgtttggtgtcttcttcaatttctttcatcagtgttttatagttttcattatagagatttttcacttgtttggttaattcctaggtatttaattttatttgtggctattataaacagtatttttttatttctttttcagattgtacactgttggcataaagaaatgctaccgatttttaatgttaattttatattctgcaactttactgaatttatcagttttaatagctttttgtggaatctgtaggtttttccaaatataagatcataccatctgcaagcaaggattatttgactttttccattccaatttggatgccttttatttctttctcttgtctgattgctctagctaagacttccagtgctatgttgagtaacagtggtaaaattgagcatccttgtcatgttacagatcttagaagaaaggctttcagtttttcccattcagtatgatactagctaagggtatgttgtaaacagatatactgatacatatcaacgctcatgctttatgtattgcctatggttgctttcccaaatacaataacaaaattgcctgcatgattacagaagagatttcatgtcttgcaaagcctaaaatatttactatctattcctttaataaaaaagttatatgacccctatcatagagtaatatcacctatttgactggttttcattcctccctaaaaattatcaataaaaggaataggaagacgttagtaacaaaatgtgcataaatgctcttctttttaaactatttggagtgtagatatgctttgtctttccagatatatcctgaattaagtctccaaatggaaacagaacttattcagttcacgataacagctaccaatttttaaagaaaattttataaaaacaattgagcatccttcccaatataatcaccacatcttccactttaacctattgtttaaatcacatgttgctggatatcttctaagatggcaagagactggagttttagttaagtaattatctgtaatttgtataaactatgtctttataaaacttctaattataacaactagctttcctgtggagttgaggcatgaagtgtgcattcaagcaattagaaagacattatcaagtgacttccaccttcttttggaagctgaaagatatagataataaagtttctgacattttacataaaaataaagcatgagtgttatgttaagataattatatctttgtccatatttttcagcttggagtttatcctttctctagcacataacaaacaaaactggattagtttacaaactgtgcagaaccgaggcagctgagaagcatctggataaaccgatctcagcagagtgttcagcagaggaatgattgatggaagcctaatcatttcttttatgcaggtcaaatattcacaaccctaaaaagtctgcatatctcaagcattttgcagtttttacagctttctgatcatctacttttttttcctccttaacataaaatgtttccaggacccaacagctggtgcttgctggctgaaggaatgaacaggaagacaatgtgttcacaggattatggaacagtctgagaggagaatttatgcagagttttataagcttagtcaggcagaaaatagattggggtgcacagaggaaataatgtgtcattcaaagctcagcttacagacacagccttcataacatagaagcaaccatgggctgttcttgctcctgcaacttcaactgttaccttgaagtttgggtgaaatagcagaaacaggctgcactgaggtcttactcttcaatagcttttattgtttgcctgtcaaaatcaaaccacaacccccgacccttcacccaccttacccccaccctcccacatgctcacgacttagaaactttcagtaatggccaacactcaagcactgtgataactgagaagtgctaaagagaaatggttcatccataagaatgaagagcatcctctaatcaacatgactgacccttgaagcctttttgaaaaaagctctgatttccagcaagctctctgggcattcataacgtcaccttcctttaatgagctcccatatgtcacttgtaattcatctaagtgctctaaaatcccctaggttgtaaagtgtatttcatgctcctaatttgaaccataacagaacacgtctagttagttggttggaaatgacaatcatgtttctttaacatcatatttttgaatggtttagctgagtttctgtcatcaagaaccttaatttgattcatttgtttcttgtttctgttgattatcttgattctgttttataagcaaaattattgtcctaagtgcttctcagcaaatggcctgactagtgctgtcttgggttgtgcttctagacacaccattatgacagtatattcaaggtaactatttcattggttctctcaaggctcaaaaatacctgtcattccttctaaatggtaattaatttccagaaaaataaatggaaaaaaggtaaaagggaagaagttgggagaaaatgtttaaagggtaattactgcatattctccttaagcagaaaatgactcaagttcccagcatagtcagtttgtattgacttgataggtcctgataaattccaagttaggatgtgctttctctaaagtgcagcttttatttaacagtgtcattgttatttagttagacagccactctttttacacttgcccctgccatggaagaaacagaaatgcctaaactagttagtgttcacaaaatgagcaagcaaccaacacatctatggttcatgtattgctaggaggcagtgaggaatctcatattactgagtttgctgcaaaagtgtcctcagtaggacctgcccaagcagcatgtttaaatatttgtagcagattaacatgggccactcacagtggtcaatcacatctatccatagcaaatatgtgtatatgtgttcttttttgaaacaaacaaagctcagagaagataaattcataaaacctttggtgacatgttgagtgttttcagatgatatttagccttaacacttttctgccattccttagcaatgcaagtctaaattttattttccatctgaatctgtaaaaacagaatggaagttcatgttgtcatataaaaataactttttccaacttaattgtctttgtggaagtttaaggtacacagttataacactaatacatcagacttcctaagagtaacattagctcttatttaaattgaatgctgacttggcattaaaagtctatcactgaagttttagtttttctattttattttactttcattttattttattttattttattttattttattttattttattttattttatttttgagacagggtctcactctgtcacccaggctggagtacagtggtgcgatctcagctggttgcaacctccgcctcccaagttcaagcgattctcctgcttcagcctcctgggtagctgggactacaggcacaaaccaccacctccagctaatttttgaattcttagtagagtcagggtttcatcatcttggcaaggctggtgtcaaacatctggcctcacgtgatccgcctgccttggcctcacaaagtgctgggattacaggtgtgagccactgtgcccagcctagtttttctacttactcattttcctttcattttctaaggcattcaaagtcagaccatttttcttttaaagatagagtggcaccttctccatgatggtttagttgaaagtgaactatttattggcgtctttcccttagcagaactgaaggacaaaacagaaaaggttatggtgacctcgaggtcatcctgataatgaaatactagacaaatattgaaccctgtattgtttaataatggtgacacctatctacaggtaggtggtatagactaacaaaggtgctcttaaaattctttaatgtgggttgatgtagcatcaggtattaaaaatgacctacagttaatataagacaagatgttaatcaaaacttcttaaagaggagatgtactaattaagttttccaacaacacagaatgatgccagagctttcctctgctaggatacagaagtatgtaaaatttatgtatctttgttgtgagccacagacactaactcactctagattgattaagcagagaactaatttgttgtaaatttattgggagttcatggtatcaccaagagaactataaagaaccaagttttaaaatgtgcaggagcaaatgaagtttggtaacagataagattgccttcagcttcaaactacaagtccagtcctgttagaacactgctgttgctgcccatgagtgtcggatacccaacttacactactgctgctgttgccaccccagaccagatactgcagctaccattgcctatgaactgaatattggtatcaataatccctgactcaaagtccaggaaatcagctgagtctaggtcatgttcctgtgccctacttacaaaggaggctgggaaaccaagtatctggcattttcaacttctttagaatatggtcagtagaaaatggattatgtctgccaccagaggtcataagatacatgattccctaaaagcctcctaaggaggctcagatgttgaatagaccaaaaaaaaaaaaaaagaaaagaaaaaaaagaaaaaatgctaagtggctagtattttctctcagggcaaaacaagtcttaagtgactctaatttctcatctggcacctgctgttttccctgcctggcacatcttttctcctttctctggtgacaaccccaattttcggggagacctgcatctctcatacttcaaatgtgactccaaggtgacctgccagtctaactgttctcctgcctcctggcacgtgatcccagttggaattgtcctagtcccaatcttgcagccatagtggttgacctagagatgtttatttgatcttgccggaacccatccacatttcccctcaggattttcttcagtaaaactggtagggaagcattttctttcttctttaggtatgaggtagtaagaatgacacctagagttacctaaagctctggttgcagactcacagagacaaccggtcagagagaataaaaccagtgtataagaatacataaagaagagagttgtggaaagagagaacctaatggcatttcagtttctaggtctagtcacaatagccagaccatgcatagttcagttaaaggaaccaataaactccttttcatgctcaagccagaatgaattggatttatgtcacatcatcacccttctaagaaatatattgtccgttttctgccaagacaaaggagacctaaattaacttcttgtgttttagagacttcttgttcaaataattctaagggaaatgtaaacttttatttttcctagatagccagtacagttgagtaggagattagctgggatttaggagtcctagttgttccttccagctcgagcatgtcactggacgtttctaagatttatgtactccatttggatcatgggttgagttaggtggttttagagatgccttccagtgctaactttctgtgagtagaattttccaaataattcctaattgtgaatgtatttactcatttgagttcacgcctcctcagggtatagttctgtttccttattaaagaaaatgaagggtgaaactaagaaaaggaattcttactatgcagccatcaaaaagaatgagatcatatcctttgaagcaacatggttggagctagaggccattatccttagcaaactaacccaggaacagaaaatcaaataccgcatgttcctacttataagtaggagctaaatggtgagaacacatggacacatagaggggaacaacacacactggagcctatcagagcgtggagggtggaaagaggcagaggatcaggaaaaataactaatgggtactaggcttaatacctgagtgacaaaataatctgtacagtaaacccccatgacacaagtttacctgcataacaaacccgcacctgtacccctgagcttaaaataaaagttaaagaaaaagggaagtctttatgaatgagagttatatttttttaatattttcatatatattcccccatttataatttttgttaaagttctatcttataacaatataatacatcagcaaatatttttatgaaacagtcatagcatttacatagcagtaaattcagtgccatcaacctacaatttgtcatctgaaagttttcagtgtagttaagacaagaagtgcactcaggtagaacacttacaaatcaagctcagggcagtgcacaagtcattgtgtgagaaggtaggaccagttctgtttctaaaagctggggaatttcttctttagcactgaaaaaataataaacaaaagcttttcaaaggctctaaactcctaaagaatgggccccagcaagcaacattagctgcaagtctacaatctattttgtgttgaaatttgagtttggcttgaagggaatatttaattctcttcagcattttattttaaacagatattatgactgtgattatgctcatgttatagataaccttccattctgttcagcttttagaaattctaaaatatgttcttgctacaatgatttcaaagtacaacatttaaatcacttcaagtacaaaaccagttatgaaaaaaaaaattcttcgggaactgttatttatgaacacaggctgtggtggcaccaatttctctatgcaagagtgcggttgaatatgtaaattagttggctaagattctacactccaatataaatgtgcagaatttgttttaaaattctacacctttaaaatctctaggattttctaacttaattcatgtttactaaagaacaacagtacaccttggtgggaggaaaagaccaaggcatatggtgttgctttcttaagcccatcaccagaagactctgccaggcagtatatgtcatgtgaaaataccatagtgtaaaagtatctgaatctgagcacctgctttcaaatcctgattttgctaacaaattactgtggtcttaccttttccaagcctccaattccacatcagtgaaagcataaacttgagtttcatagccctttccccttgcatgggcttgtaaagattaaatggcattacttaaggaacatctgtgagcctagcacagagtagatcctcaataaatattagttttatttttcctttctctgaattgtagcttcctcatctgtaaagtaggaattttttaaatgctgccagaaaaaaaaaaatgcacaggaagttccaacattacacagagaaaataggctgacctccaaacaggcccaggtgacaatacattgggggtaggcaccacagtcaacaggtcagcccaccagctttgagctcagatattgtaattgttagtctacacagaaggtctaccatcacttaaaaagatacaactttcaatatattggcttattactgttctgcaagctcttactttcccagtacaaaatattctcaggaataaacaaacaacattgagtcaaaatattgttgggtgagcatgaaatcaaggcaagttggctgaattatcaggggtcaataactacttctgtaaagggacagatagtaaatatttttggctttatagaccaggcagtttctattacaactgtgtctgatcaactcttgtagcagaaaggtgtagacagcatgtaaacaaatggcaatggttgtgttccacaaaaaaccttatttacaaaagcaggatggtgggctggatttggtcccactggccttagtttgtaggcctctgtgttcgatgattagagtcatcgagataagtatgtggagtacacctaccttcactgcagatctaattagctgcagaattagatctgcagatggatttcatacctgggttctaaagctagtgaacccatcccttaaatggggtaggaattcctccgctaccaatgtttgtttctcagcatctcatatttccattgctagctaacagtccttctgattgacaagttctcttcataaatacaaataacttcaattatattccaggtttggccttagcctggaggtcattcttcctgtttaaggtatagctttgtatagctatccatgtgtatagcttgttgtatgaaatgtatacagctatgcttaaattctttttttgtttcatagcttaactctgaaaacacaaccttgttttattttctactttaatattttgtgggagataggggtgctcaccaccaccctatgctatttacaagtaatactcatgaaaatacagcaaaagcttttacaaaagtaagtggtactcagtatatcaaacaacaaaaaaccttcctgggagggaaaaatttttaaattaaaaaaaaatagttatctgctgggcggggtggctcacgcctgtaatgccaacactgtgggagtccgaggcggactgatcacttgaggtcaggagttcaagaccagcctggccaacatggtgaaatcccatctctactaaaaatacaaaaaaattagctgggcgtggtggtaggcatctgtaatcccagctacttgggaggttgagtcaggagaagcacttgaacccagaggcggaggtttcagtgagccaagatcacaccactgatttccagcctgggcaacaagagcgaaactccatctcaaaaaaaaaaaaaaaaaaaccgttatcacaaacattgaacatatattaaattagccccccacttaaagtgaagaattgtgtttgtgtacatgctcagtttgtgtacatgtttgtatacatgttcgtgtacatgttcagtattatcagcctctgttatttctatgtgggggtgtttagaagtacagcgaagtggggggaattttgctgaagaaagtaaaatgaatacatctgagacgaaggaaaggcgatggaccagccagcctagaccaaactgtcctgtggtaggtcccagctgcccatctgggctcatgctccttaacgtgctatcaaacatacattgccttctcagtttctccccacctgctcacccacaatcttttttttgatttcttattcagcttacattgtgtgactatttggaaatatatatacatcctagaggattttgaatccagacatggaagagagagtaggaatgtagaaaggggaaaggaacaaatctgtagttagcatttgctgtaggttttcaatattttatttattttattaatttcactcttctacccaactctgtgaagttattctcattttatagatgatgaactaaatttcaaaaaagttaattagttttcccagagttgcatggctcaaaccagatgctaaaccacacattcctgcttcccaagtccctgctcacgtagtcagcacagtgaaaatcagtggctttcactgtgcttccaggtgccctgaaataagaccctccaacaatctggccctggtgaaaagcctactttttccactcttcctagcttacttaaatgcttaatcctatgatgatctgtggatttccctgtggccatttttgctggacacctttctgtaccatctgataaatcttgtaaagaagggaaagacaaagagaatcattccaagggtacttttaccttaagcccttagttatggaataaaactgatctctcctggtaaagaatcctcagagttcaattagcggttgagagagtaatttttagagcacagcacggaagttttaccatgtaatcgtgctctgtcctagagcaaactatctttgccatccattatatttataaagcttagtactgctgaaaagttcaccctggagaaggtcatcttaatggttgaaacattaaggtgaggtttgctaacacaaactattgtctctatatcctttgttcattctattttagtccttcctcagactctttataggattaaagtgacatataaacatacattttgcgaaacttttgacaaatcagggaacctccctgagcttcagtttccctaccataaaatggaggatttggactaaattatctctaaaatcctttccaactcccacattctggatttgttttagcctgagatacacattgttaggctctgtagtttggcctagatttaattccagattccaggcacggagtgagttacttcctgttattaacgggtttcttaaatggacataccattgtgtagatgaaattttatttttaacccagtacccaaccttgtagattgcactgtggaagcatacgtttttgtgcatttgtgttcaaaccaatttaactttcatttttaaggagagttggaagcatcccagttcattgaactatgagaaaatacagaatgaacaaagttgttgatgttggatgtgttctgttgctttgttcctgtcaaaacttgagcaggctcaaccaagaggcatgctgagatctcattaacagggtgggatatatatgtatcaggggagagaggtaagaaatggggacaaacaggagaggaggaaggaaactattaaatataatcttaatattatggatgtaaagataaacaatacattttagaattttcacctagcatctttgtctaagctattctccctctccgccatagagttcctttataactcatactcagtttcctctattaacatctaacattaaaatggtacattttattacaatacaattaataaactactattgacacattatgattaactaaagtccatattctattcagattttcttaatttttacttaatgcccttttgctattccagaatcccatctaggatttacattatatttaatatcatgtatccttaagttgctgttggctatgacaattaagaccctatatttttaacaatcacttcctttttgtctcagtgtcttcacttgcttattttattttatttatgtaagctgtcttaaattcttcctctacttagaagagcactaattatttactcttttgtttaggaaatgttctggaaatccctagtttccatacaacctgccaagtttttttttttttttaattttctgaaaatttgcaaatgaggagggcaatcctatccagaggccaataagaatttatgattattgaagcaagactttccttggatggcaaaaggagaataatctttattagtgagtcagtcagttgaaagtcttaaatcttacacacttgaaaaataacctagtgaagtttcaaaagaggtaggcacattagttgaatgcttataggtacacaaataaataggtaagaatgattaagcacattagtatttaaaaacattaacacttcagctactagcattagtcttcaaatatctttctatatgtttcaatatgtttctcccaacccagaaattctctccacaaatgcagtagagaaagaaacacctttattgttgaataagcattaaaccagactgtcatgtgcattacagccactccactaagaaagtgcacagaaagaaaaaaaaaatcacacccttttatatagccaagcaaatatacccaattacacacatattttcaagatgaacaataactagtcctcaagtaagaggacttgacagcaccattgggcataaagtctatcttaactttacctggtaattgaggtgaccatctatgttagctaactgggtgtatccagaggagagaggaagcgggtggggttggggtggggggaacaccctatgacgggagggaggtttataacttggagcatggcgcaagctgatgttaggctcctgccttcccatggaaaattgtaggatgggggcaccttcccctttgatatttacatttcaaagagatgactctcaggtctttgagaaagacattcctcaataataaagctgacagaaggcttatttactgtctagaaagatacatttcaaaaagacagagaaggtactttatatacaggttttctacagtacacgttctgacaaaaagggaggaaaggaaaatagctcttattttaagcaggaggaattaagcctcctgtttttcattcctttacatccttacactaggcaaagatttcttttttcattcatgcaaaagtgttcactgagcagaggaccacacaccatgtgccagactctatgctagacactatgaatacaaatatttagtgagatgcaaaaaatccaatcccacactccaaaagctcaccatctaggaatccagactctatgagccacaatatcaccttagttctcttacaggtccccagaagtccctcctgcaaagagatgagaattctgaataactcagaccaagatttcagactgcaccaggcactgaaagttcttgattggttcagagaaaggcaccatatgaatattcctgcatgttgaagttattttctactattaataagtagcattcattgagtggtgttcctgtcccatgcactgcattgctgagtctcacaacagccctgtgaggtaggtgttatttctatccccattttatagatgagtctgggcagatggataactcgcctctggacacagagctagtaaatggggagctgtgatgtgaacacgggtgaatctgactccacagtctgactacactgcagccactacatatgaatttagatttggaagaaaaggccgtcaccactggctgagctctttatcttatagaattatgtacaagctcagtaaaaaaagactacctcaaataagaattattccccatgtttacaatgcacttaaccgtcttcaaatcagttgttttgcatagtttcatttgatgttcacaacaaccttgggagacacatagtgcaggtattttaaacccaggttaggcattgaaaacctcagactcacaatttaaataacttgtccaccatcaaacagctagtgagtggaagagctgggactccattccagagctcataacaagtggttacttgtggcatgaaattggaaaatcccaacctggagacagatacgctgtatatggattcctaacagagctctagaggttccaggattcacctatattctactgctctgtcccagaagaaaagccagagtaaatgttagtcctgccaaatctggtgcactgtgcaatactcacttaagtatgcctttgttttccttcatgtgacttgtaaataaaattccatttgcttctattccctgtggctaaagagtaatatttaagcctttcaagtttatttctactgtgcttcctggagaattttgtatactacttaccccaaaatgggcactgttctgcagtttttattcaggtaaaattaatggagtttccccctgagtgaggaatgtttaatcaatcctattgtttgatttcaatgggttattacgggtgggagaattgttataccagaggcaatttagaaaatcaggtacaattgactcaagtcaatttacatactgcagtcccaacagcaaaaagtcatggtgtttcatgcctgagatagtgtaatcattaaatgagaccacctgggcaagtaactaaacccaagagagaataaaagaacagagatagagagagacagagaaagagaaggggaggggagagcagtagagaggttggtttaaacacaggcacattcagaattgcagccaatcaaaaaagggaaaaataattttcgaagtatctatctctagtattttccaaaagatattcaccatcagaatcatctaatgatgaatccttttatagaatctcatgtggctagccttgcatttaatatttgtatgtactgcggttggatgttcttctgataaagctggaagaattcccctttctgagatgtgggaatgattggaaagctctgagtggagcagcggaaatagggattctagtctgaacccagccattaactttcctcatgtcttgggcaagtcagctaattcttaggcctgtgtttcctcctctttatgagactttggatcatatattttccaaagccttctccagcaataaagtttggtgtttctaactctgtcacacattcttggaaaagggatgcactgtgggaaaacactgatatgattactgccaaattatgtgtcatgtctatggactatacccagtgagccaaatgagaaaagaaggtcaagggagaacagagggaaagagtacagctgcccatcccagcatacaaacgcatctccattaggaaaggataagtacatgcatgagcactacagatggtgggtgattagtaccatttttgcagtgaaagataatgtagcccacatttcaataatatgaagtgtatctgctggtctgagagtcccgtacagagaggtttccctagtgcacatggggaagggacaagaaggccggctggaagggaagacgccaagatatttgtacaaaccagctaggtttatagatattgtctcagtatcttcactgcaaccctaagaagtcattaatataagctctatttgcaggaacttgaacttggaaagattaagcaatttagccaaggaaaaatataaaaccctggtgagggccagagccgggatgcaaaccttgtctgaactatacaagttcttcccagcagagcacattgaatatgcagaaaatgtcacatccttttaatcatattttttttttctagcaccaatttctcacctctatttatgcatcttttcagagcatgacccacaggtacagaacattgcctgcagtccttgggggcaagggagggagaggcattaatttttgtctccatttccttccctcataattatttttgctccatgactgcccatttcatccatttcagcttattaaaaacaaggcctctctgtttttgtataatactctttatatttattgttggaagtgaaatatctttaacggctcataggcaggctggtgtcagtgctgagagctgtgtcagcatgaagacagcaatgccacaccatgaaaagcaattgcagttttgagaagctgcagctatttgcaatcctcgtttcaaaaagatcactttcagaatgtggcgttgggtggaaatggatgcagtcatcatttttaggggctttgttgagctgtagcagctgggaactctcttttctcatctcctacaacccacagaccctcacgcaaaacaggaggtaaaaatgctgttgtccttaaaataaaactcggctgtgtggctacatattttaagaaattttttatggaaaaaaagctttttataatgaaaaaaaagattacaggagttcaaataaaacctaaccagacatgaaaaatatgtgattatccttaataaatataaaagaatcaaaatctgtagataagaccaataggtagtcttccatttagtaaaatgccccattttttgactgtccaattctaccatccttctgcccttgctcaaatgccagcacgtccaggaagccgtgtcccatttatcctatgaggcattttttgttctttcacctaactcctaatatgtttttatctgagtacttttgtcaggtgtctctttcctatttgtactctgattatttgtgcatgaattttgtcttcactacagtctccttcaagaagaaattcacactttcattaatttatatatacaacattccagtcactgatggaccacgtatttattggtggtcccttaagattataatagagctgaaaattttctctctcctaatgtcatagtcaccattatgtcatagtgcaacacattcccttctctatggttatatatgtttagatacacaaatattctgttacaattgactacagtattcaatacagtaacgtgctgtacacgttgtgacctaggagctataggctataccgcatagccgagttgtgtagtgggctatgctatctaggtttgtataagcacactctatgatgttcacacaacaacagaattgcctaacaatgcgtttctcagaataaatcgctgtcattaagtgacacatgactatattcattaaacaaatgtgatttgacagtctactaggtgccaaggacctttcaggcattagtaatataatactagtaagtatttatatggtttatttcctggctctgcatcaaagacccatcaacaagtcaccacatgaaatcttactgtcacccttgagttccacattcaattctaccaagatggtcatcaagtctctctcatcaatttaaccattccccctatttccacgtccattttaccaaagtcttaagtacgttcactccttgatgtcccaccattatatcagactcagccatctacctgttccttacattcttcattccactgagagatgaatcatcctcagaactccaccactacatatgaataagaaccatatgaatgaatctaaggtcctcaaggatcttagatttaagtatggaaaatagacatgtaaacatgtatataaattgcaatctagagtatacaggatacatattggattcatttttataaccttttaagtatcttagcaccttgttgaattaataaaggtggattccactctctaacaacaataaaggtcctacagaaaaacaatggataaaaactggtggagaaataaaaaaaacaatgatgacatatggattcttgggagaaccgtgactcttgacagcccagatcaattattcctgctaaccttagccctaaatctttctctattggctctgtttcctttatgcatggtatattttaagcagtaagggcaatcctagagaggcagccagatggagtacaaaaacatagctttcaagttaggagacttggtatgtacacaaaaaagataatatcagtctgtctgtggtaagtgttgattgaggacgcaggtattaaatgctacagtaaacaataagtctgagcttcttcagaagaaagtttatttgataggtatacttactagtgaatgagaaaagaataaagatatctgtaaaaaaaaaaaaaaaaaaaaaaaaaaaaaaaagcccaagtgtggcccatgtgatccaaaggcactaagacaaatcatggaacatctgctgtttctgagatttcatggttgagggttgcattcctgacaggtagtatattgatgctaaataataaaatgtcatctacatcctttcatagatttcctgttagctagttctttctcgttggcattttttcttccttaggctccatgatcccacactgttctcttcccattttcttgactgatcaatttatctttgtagatcatccattttcaaccatcaaatgtcagtatttcccatggttcagttcctggctctgcatcaaagaattgccattgagtcaccacctgaaatcgtgctgtcacccttgaattccacattcaattctaccaaggtggtcatcaaatgtctttcatcaatttaaccattcccctgatctccacatccattttaccgaagtcttaagtacattttctcctggatgtcccaccattatatcagactcagccacctacctgttccttacactcttcattccactgagagatgaatcatcctcagctctccaccactaccgtacattccaggacttataaccctctcctcaccaaagaggttttctcatcaaattccatcatcattctccttgcctcctcagtttacagtctcaggcatatttgaaccctccctcttcctgtctccatgcctagtcactggtgttaattattctgaaagtcttcttttgtaatgtctctggcactaggaacaatttaaaataattttttttagtgcaagtagctaggcacaaaaaaaagtgtacactgctacccaatttttcccattgccacctgctttatctagcccttgtcacctcatgtgtggtgccttgagtaggttatcattttttaaatttctaatctctagcccctcctaaccaatcagcactttttagtctgattccttttcttaaaaatacgtatttaataatctcaaccttccaacagttactcaatagcttgacactgtccaatagaaatataatgcaagtcgcaaatatgaaccgtgtatataatttaaattttctagtagtcatattataaaatgtaacaataaatatgtgaagttagtgttaataatattgttatatttacccaatatagctaaaacattctcattttaatagataataatgactaatatgaatgagatatttcatattatttttcatactgaatcttcacaattgtacatctcaattcttactagccacagttgaagtgctctgtagccatatgtgactagtggctaccatattggacaacgcagctctacaaaatactctatgccccccattttcattccttgcttatgcttctacttttttttatctgttctccttcgatcgtaattaaatactaataatatgtaaggctctctcacttaaattctaactcgcctgggcaaacttccccagtcatcacaagactatgatttcatctcatgagacgcattagctgtaccactcagctggcatttcccatgtgctactttctgtaattaatgcatgagaactgcaccctagccagactgccaatatcttgaagactaattcttctctctgtacctcatatcacttagcataatgtctttcatagagaagacagagtaaatatttgttgatggagtaatgagaaaatggagttactataggattaaataaatagactttattaatcaagtcttacatatcaattactatgataccacactgtactgtcacaaatttaattgttagtttaggtttctgggttttagtaaagatttattttccaaaatgtaatacattcctgttttagaaggataaatgaaatatcagaaatgtaaaagtaacacaaactaaatagaaagtcaggtgacctgctataattttagttctgcaatttatatatggagtggtgagaatattgatagctgaaatatagtgaatatggtgagcataatagtattacggaagacataatttagtgagcttcaacaaatattgtctgaatttcttatcagtatggaagaattctcagaaacatatttagaagttttgataaaagaacgtgttggaaaaagtgatttgataagggataaccaacatcagtttgtgatagggaggttttgtgcagttactctgtggatgtgttgaaaggctgtggcaaatgctttgtcagggaatggtaaatgcaatggtggggtatatgtttacttacacaaggagcccttgatgagatttcactcagagaattacagattaaagaaatgagtccttgtgtacaggctaaaaaaactaaatgtggctaatatgtttttcatcacaggggattcttttatgttaccaccactttatatgacaagaactgttagtagaccaaatggcagttagtttgaagggcatgattcaataacataaaaatttaggataagtttgacaaagcagatcttatgtaaaatgtaaaataaatgaaatctgtacttagagataacaaacttcaccatcactaaacaccctattctccctttaagcctgagtgttccccattacaacccataacacctcaatgatatgtgataggacttttcaaatgtactctgattttattaagacctcttgatagataggtcctgaagatttttatgatacaaatatgcagtacaataactggaattagggaaattaatttggttgaaagccccacatcaacacttaatattatactatactcttcctgttaataatattgatgctaaaatccaaaatttatatttatgagagtaatttagaaaaagaaagattcttaaactcaatcagtatttttagaaacttccattatcactacaaacgaaattacagtgtttgtatagtgtacatgtgcattttccatggtaacagctattgtcaaatggataaaagctgaacatgcagatatatacattgtatatctatctattcttcttaaaattaagattattgctaatttaaatgcaggcagagagccttgtgggggaacaaattctttcttggtttatcgttacatttggaaaatccacctggaaaaacagagagggaaggtagtaaatgagctggacaaaattcagaatgtatgccagatgtcatgcaagaaagctgaagtacaatctgaaatagtaatgggcggaacaccagacatagcaggtgccagagccaaggatagagaggggagtatccagtgaaggagaaaagccataactgggagaaagaaatcagcactcaagcagaaggctcaaacagacaaaagtaagtttaagagatgaagctctggctggggagattccttcctggaatgtgaattgaaacttgctttctttggctgataaggctaaaatgtcggagtaggagagtccagcttagagaaaagaggtttggagaatggggtcggtagagaatgagaaagctataaaggtgtttgttaatcatagttcttatgaaaataaagcagtttgaatttcagagatctaatccctacataaagctactgaatcttgtaaatgcttcttcagcattaatgtcgatgcagaaaactggcaaatacctttaaaaagaaatagaaacaaaaaaaatcaagagcaggaatgaacttcgggcttaaaagatgaaaaaacattactattataggcagcaacaaaacatacagaaaataaaactgaacaaaccctggacaggaaaccagactccatgactaccttgctgtgtcacatttagacaaagaaagacccagtttcttaaactgtctaacagataataggcttgatctttattgtcttcctcattattatcatggtagctctctgttaccttactatggtcaacttaccatgacttacaaagccttacataatctaacatctggcctacacctcctctcttacctgtcttaaaccaggcttttcatgcctcaacatgctgcagccacactggacacatttgtgttcttcaagcactaaagctggtccctgtgccagagcctttacatttattgctttttctagaggtctttaccccttccttgtggcatggctgttctttcttttgttaagatctcagctcaaattatcagccatctctataaggccttcctgactatcctctgtagcattacccagtgctgcccattcactaccacaataccctgttttatttttttcatggcacttagttctcactgaaattatccatccatccaactgtctttctctttctttctttctttgtcatttattacctgttacccattagcataaaatgtttatctgagcggactataatttctagtgtctagaaaagaacacatggtagatgttcaaatatgtgtgttgaataaataaatgatgaggtaaatattaagtgctaaatatccattacatttttttctaatcacgcagttatgaaagataagtattattttctttttttaatctattttactgaaaaggagactgacttttttgagagattgacttccccaagatcatgtgactattaatatgtcctcaaagctcatgctttttccattacaatatcttccttacccgctcccaaattattgtgagtgttacatgagatagtgaacagattataaagcattatagtaaagtaagatattttatttcagttctcttcattgttggtgtggcatacttcactaaccactagtgaatattagctagtttacaatctttgaagctccatgggttttctagtcttttatcagggaataagaatgtctaagtcaaagtctagaggagtatacacaggaatacacatctgctcatgaattcccttaagattacattcacaattttgctactgagctcaaagaagtcacattctatacaatgacatcaacattaagacaaagcattggtcagcttatcagaacataggaaagtctttcacaaagatagtactgcagactggctcttgtcttaatcttagccataccagtaaagcctccctctttagaaaaaatgtcaagaaaaacttagtcccaccatcttgctctttcagggtaataaaggaaaaataaagtcataaaataataaagcaatgaaaaatgtttgcacactttcaagggaaaaagtaaaatataactgatggactagtgaataaaaatatatctatgtaaacaatccaaaaaatttacaagggactaaacaacgataaactgaatgcaacattgattcaaattggaatgaaaatggggtaataaaaatgaagcataaaactttacttaaatttattcatctatttgtaatcacttttgcatctagttgaagtaaaaaagctgttaaactttcccttggtttttaggatgaatcttggcatatgttaattctgaaaatgttaaactcattattggtcttttaaatcaaatctttatgtttataatcaatatccttaatatataaaaagttattacaagtaattatagaagacatgtgctctaatagataagtaggcaacaatacatgaaggagcatttcagaaactaataaacacaaatgaaaaaataaacttttcaacagaactggtaaccaaagaaacacatattaaaataataaaagatataattttatttatcaaattggcaaaaattttaaaatgataatatctactattagcttcagtgtggagaagttggaactctcctatcttgcttgtaggagtgataaatgttattacctttttggagtataatttggcaatagatattataatttttgtaatttaatatgcaagcttgactgcatccagcaattcatcctaaggaattaatcatgattcatgcaaatatatagcctgaaggatgtttatcacaaggctgtttatacaggaaaaaaaaaaaaacaaacaaaaaaaaacaaagaatcgacaatagccttttcgacaggtctaacaaattatgtttcatccataaaattaaaatttaaaataactatgcactaactaaacaaattgtaggaaaacattcacattatttaaaaatactcatggaagagtaagtaaaaaagagaacatagcactattaatgaacttataaaatatatattaatgcatagaaaagagactgggtagctgtatacccaaaagtcaagagcagctgtctctcagtggtaggattttgaatgactttcatttttgtcttttttcttcaatgtattttgtaaatttcaatggtgattatattaaattatttttacaaaaataaaaatttgtattatttttagaaaaaggtataaaatgatgattaatgacttaatcttaaccgaagatgagataatgagaaagctgtgcaatatcacaggaaatagagaaaagaagaaaagaaagtaaattgtaagattaaaaaagcaagtaaaataatcatgtcctttgcagcaacatggatggagatggaggccgtaatcctaagcagactaactcacgaacaagaaaccaaatacctcattttctcacttataagtggagctaaatattgagcacacatggacatgaacatgggagtaatagacactgtggattattagacgggggagggagagcgggggatgtgagctgaaaagctgcctagtgggtactatactcactagctggatgcgatatacccctgtaacaaacctgcacatggaccccttgtatctaaaataaaagttgaaatttaagattaaataaaagcaactaagtgtaaatagaagaatggaaatggaaaaatcatatttcataattgtgtttcggtccaagtaatccacaaagagcaggtcctaggcgttttgtgtttatcatgtgtgccaaaaattcatattcagcaaagtgtgcaaagtaaaaagaaagaaaaacgtaatgcacatttatttaatcaatatatgaagagttgatatttatttctgggccttagtaacaacttggaaaattctaaatgaaattaaatgcagtacacaaattcagttcactgaatatttcttttgagtaatatcaagtcccacatttagctatgatgtctcacttactgttgtgatggtgttatttgtgcagtctatagtactttacactgtacaaagcatttgtgtgcactttatcccacttattcctaccaaaaccccatgaagttatttgtataggttccactttacaaaagaagaaacaaaaatctgggatgttgacttccaaacatcccctaatgttcaaagccaagggaaaccaacaaaaccaaatctaccatggtttattctcaggctgaacattactttgaaaaataccagtcatgccagccatgaaatttctacattttattttccttctataataatacactataattccaatattgtttgctctgtttctgtggctgatctctacgaatatgtaaaagcaaccatttttgaatattccaatatagattttgcagctactttcagcaaatcatattacagcttcttcatattccatgcacatgttgcaaagaaaaagtgttcaagttctgcaaattatgttgacttctttgaaaatcttagcaaagctctatacagtcatgcatcacttaacaagaatacgttctgagaaatgcatccttgggcgattttgtcatggtgcaaacatcacagaacatacttacagaaacctagatggctcaacctactacaaacttatggtatgtggtatagcctattgttcttaagccacaaacctgtacagaatgttactgtgctgaatactgtaagcaactctaacacattggccagtgtatgtgtatctaaatataactaaacaaggaaaaggtacaataaaaatatggtataaaagataaaaaatagtacacctgcataggacacttacaatgaatggagctttcaggactggaagttgctctaggtgaatcaacgagtgagcagtgagtaatatggaggacaaggacaagactgcacattactatagactttataaaccctgcacacgtaggctacggtaaatgcattttaaaatattttctttcttcaataatcagttaaccttagcttactgtaagctaacatttttttttacatcttttatttttatttttattttactttacgttctgggatacatgtgcagaatgtgcaggtttgttacataggtatacatgtgccatgatggtctgctgcacctatgaaccggtcatctaggttttaagccccgcatgcattagctatttgtcttaatgttctccctccccttgccccccaccccgctacatgtcccagtgtgtgatgttcccctccctgtgtccacgtgttctcattgtaagctaagattttttactttagaaactttttaaaactttttgactcttttgtaataacacttagcttaaagcacacattgtacagctgtacaaaaatatttctttgtattatcattctatacattttttctttttaaattttttgtgtacttaaaacttttttttactaaaaattaagacacaaacacacacattagtctaggcctacacatggtaagagtcatcagtaacactctcttccacatctacatcttgtcccactagaagatcttcaggggcaataacacaaatgaagctgtcatctcctacgacagcaatgccttattttggaataccacctgagaccattctgtagttaacattttttttaagtagaaagagtacactctaaaataatgacatgaagtatagcatagtatggcaaatacataaaccagtaacatagtcattgattatcaagtattaataccattgatcatttattatcaagtactaatgccattacttttaatggcaaaaactgcaattacttttgtaccaatcaaatatgatgtaccatacataattgtatgtgctatgagtaatgcactgtgctataacattacaacagctatcacatcactagatgataagaatttttcagctctgttataagcttacgaaaccactgtcatatatgcagtccattgctgactgatatgttatgcagcacataactgtacttcatttctaatttgatttttaaggtgtttatgtaacaaaagatatgtttatttaagagatgtactttagatgaagtgatttaaaatacctcttaaataattagacatttagagacctttgaggataatttaaaggttaaattggcagcacattaggttaattgctaaaatattatgtttttgtgtcctgcctacattgtgaacattcaaacgtaaggattagaaagtagtctctaaaaaaacataagaaataattaaaattagcttctggcccctagaaccgcttttcactctcattctggttatttagaggatatatacatccgagtagatacgtcatctagcaccttgactctgggtgcttttatctattctcattcaatgacctttgcttccacttcatgacagccactcactctcttagatatatgctggcaattctcaaaatcagttgtgtaactcagacttatcctctggcttctagaaacacttacccaacttaacatttccatttgattgtctcacaggcatttcaaatataatatgtacaaaatggaattcttgtattccacttaaatcttattatattctcagtctttaccacctcagaaaatggcagcacgtgcactcagttgttcaagccacaaacctggccatcattcttggttccttattttgtcttaccttcacattcaatgcctcaaccagccttttctttgtaccttctaactatatcatgaatcaatccagcatcttttatgtcaactgtcattatggtggtccaagctttcttacaaaatttcacctccgcttccaatcactgtctcctccatctagtcatcacacagcaaacagataatcttttaaaacaaaaatcgcaagagtaccaactctcattaatttattgaatggtttatacatgcatttcatgctctacattaaatatatatttcacatccttccacttttttagagctttattaaggtataattatcatataatatactgcatgcattaaagcataccatttgatgagtttagacacatgtatatgcctttaaaatcttgagcacaatcaagataacaataatatccgtcagctccagaagtttatttatggcccttttaatacctccctcttctcttctcctcccatgtctgcagagcaccactgatcagctttatgtaactcaagatcagttgttattttctaggaatttacacaaatgaattaatgtctccacttgcctcagctattcacatagagtccaggttaatttcttcatttccactcttccaaaaagaaaaaaaaagtgaacaagttcaatgaaaatcactgagaaaatgccaacatcggtgcccagtttttagagttacttataaattataaaactcccgaaacactacaacactttcatggacttgtatctttctcaacgttgataaaaaattatattaataataaacttccatgttgttgttgttgttttgaaacggagtgtcactctgtcacctgggatggagtgcagtggcacagccttggctcaccgcaacctccgcctcctgggttcaagtgattctcctgcctcagcctcctgagtagctgggattacagatgcacacgaccacgcctggctaattatttgtattttgagtagagatggggtttcaccatgttggccaggctggtgttgaattcctgaccttaagtgatctgcctgccttggcctccccaagtcctgggataacaggcatgagccactgcacccagccaaacttcgaggtatataattaaaagtttaataagccctcagcctaattttaaaattcagattctttctttctttctttctttcgttctttctttctttctttctttctttctttctttctttctttctttctttctttcttctttctttttctttctttcttgataacattattatcatagtctggtagattctgtctttctataataaaaatcctgtgatgttgttcaaagaaactcaatgggctttctgtatgtttaccaaggaattaaaatcttaacaaaggttttcaacacaagaaatactcccttttgtaagaattcttcataggtttttctagcacaagtttgtttttattgaatgatacttgatggttctgtatgttatttcttttctactacatataattttgattaggggatacattaaatattttaaaactatcatttctttttccagaacaatcataacatgttttgcttcttgttgctttaaaaggaacattttaagttgcttttttacaacaataagtgtgaaaggaaatgccaaaatacaaacaatttcacttcttgttggaatttgacatttccactagctaagtaatataaacatgcatcacctaaatgagcagtattttaatagcatcgttttcacattttaattgttgtcacatttcttctttgtttagggagacgtctggtgaacacccgtgggatctaaagaacaagtaagatttaaagcatactgggttgtgtgcctggctttcacattttatttattttattgcttaatagtgtttctttactactgtgggttgtagcttaaaattgttagaaattttattatggagtataaggaataaaagtgaacgttcaacactttcaaattatttggagtcttaaaaaatatacataaattttctgtatgtagtaggcagacacaaaaatattatgtctttatgtatatagatggagtgaaatttcaagtcctaaataatgggtatgtttttatgtggaagagcaaatacacatctatagactgaatttttacacgatgatttttataagatataccgttttatttaaaaattgtcttagtgtgacctctagcctatcaatggagtaggttagtgagcagtgagtagttgattcatttccccaaactccacctcgtgtggaaccatgattctgttaacaccagagagtatgaacaatacaacaaccacccaatagtggaatgagatgtgttgggatggttatgagggaatcttcagttaatggattgggaaagagaaagtgtgaagtgcagtcaaaaggaaagcaaatgagtaagggaagaactgaaaataataaagaagaaagacgacagatcttcaaaaaataaaaataaacaaatagagtaaacaaatagattacatatacttgcacttcattgtaaatatttggaagaaacaaaagagaggtggaacaaatacaaagtagtaagtagagactggaaactaaatatagagacacgatattcaataaatagtgcctaagagaaagggaaagaaaaaagtggtaaaagtagaagaaagttccattttaaatttttgctttttcacttatttgacaatttacgtaatttaaactacaacttgaatggtttataaatagaagccttgaatatttttatctatttcattgaaaaagaaaaaaattctagtcatcatgcaattattcgatgtttctgagaaccttgttttatgctcaatttaagccatgtttaaatgaagaaaatgtttcttgatttatttcaagtttccttactagtgttctaaactttctatatttatgaaatcacttgattctaaaaaactgaaaattgtgcatttaaggaggtgaaataaatcattaaaatgtatttatactctgcggaaagcatatgttaaacaattcaaatttacagttagaatggttcaaattactccggcgttcaaagacacaaagccctagaattaccctgtagttatcctgtaattgctatttgctggcaaaggaaagattaacagtggtgctgatctcaactgtaatacacagatttaccaaggaacctgtagaattgagtttttctatccaaagaatgaatcataaaaattcagcaagatgacctttcttttcattggcataaagataaaacaagtaaaaattcctttttagcagcacttggaaaagtatggttgttcgtttatggttgttgctgttgttcatgggtttgggtggctattatgtattaatcatttatcatcgcaacaaagggtctttgttgcgatgataatcttactaatagtcgcagtgtcttggagaaaattatttggttatttatgattcattatctataatacacatcactactaggccaccatacattgttttttataaccatagagtagagctctgtgggggcaaaagagaaaacgcccattgactctaaatccaaaatactgagtaaaatcccagcaccaccattaagagccactttatcttcctgctcctcaatgttttcatgtttaaaatgagaatactgcctagtgacaggattgctacggtatttgagcaagttgtcattctgaaagtactttgaacttggtcaacattgctggatgacataactggggagtcttgggttctagctccctgcaagtgaagccacccaaatgactttgcaaagactgctacagttgtttgtacttgtgattcaacattatcattttttaagtcatttagggggtaggtcaaacgaccatttaagaagctttagtcatcagcctcattgctctggatctggagtgtagcctcataagaatatcctgctgtgggtgccttatattcctctaatggaataaaactaggaccatctccccgattttaaccagtactaggctggtttgttttacatatattctctcatgtaaatctcaaatcaatcatctaaggaatatctgtttgtccccatttttggatgattctcataaagggttagtaatataactgaggtaacacaaagagaaaagagaaagaattggaattggaacccagaacttgttccacagcccatgtatattacaaatgtattttactgccttcctcagtgaaatgtagtatttttagtgcaactatttgggggaaaattgtcacagtaattttatccacactggtgtggagaaaacatctaatataaaagacaaatgtttgagggagaggaaaagcaatttcgcttcccaaggagggtgacacctgctgaaaggggctgcagtaaggcagtctcagagttgtgccttggacaagctctgtgggaaagtattagtgagcatgttttttaatcctacaactctttcctcctttggcagttaacagcaaattcctcaagtcctgctgcctgtgctttaaggcccaattcttctgcattcctatgatcatttagcagagagaagacccaactctactttctttctacttattggcattcctcacctccataacaacaacaaagtttgtgcccctgattttctgtttatggtcaaaaattggtggttgatctacgtatacttgctgaagtcagggaagatggtaattattatatccaaatgtacattgaacagtccttttgaggctccattctcttcatcttctttaagaaaaagtaagtcattagaaagaaatgaaaataaattattttgttacagcaaaggggtcccaatccagaccccacccaagagagggttgttgcatctcatgcaagaaagaattcagggcaagtccatagagtaaagtgaaaacaaatttattaggaaagtgaagaaataaaagaatggctactccatagacagagcagccctgaaggcagctggttgcccatttttatggttatttcttgatgatatgctaaacaaggagtggattattcatgcctccccttttcagacaatgtagggtaacttcctggcattcccatggcatttgtaaactgtcatggcgctggtgggagtgtagcagtgaggacgaccagaggtcactcttgtggccatcttggttttggtgggttttggccagctcctttactgcaacctattttatcagcaacgtctttatgatctgtatcttgtgttgacctcctatctcatcctgtgacttagaatgccttaaccctctgagaatacagcccagtaggtctcaacattgttttaccagcccccattcaagatggagttgctctggtttaaatgcctctgacacattcatgattgattgattgattgtttaatttttttaaaagctatctagttaatttagttaaaataaacctggcttattctttttttacacaaattgattttaaatagttaaaacatttttttaaatccataagtaattcttactctactcatttatacacacatatactcacatgtacacagacatacctacacacacacttataaatacatgtatacacagaatatagcaaggtcttttatcccttttcaatgaaataaatattgtattctatatttagaataaataatgttgaaaaagtgattttggagaaaggttgaaatgattgagtcttaagtgtgtcaatgtataatctacccctttctaaacatcgtgttttaagtagtcatcttacttcagaaattagaggctcaatgtgtttagaaatacatttcatcatgttcatacacaatatagatttctccttcctcagattgtctcccatgtaaatatactgcttgataaagatgacagtcaagttaacttgattgctggacagctgtattgttattaccataaataaacacacatatttcctcttcggattattcctggcaaggaatctctagacaaacacaatgctttcttctggattgattgtgatcttattcactctaggtaatcacatatgtatcgttcatattaacacttttataaaactgaatttagtatgtagaaaagttcaaagtaaaaagctgtactattaggtgacatttttaagggcatgactaaaagcaaaaatattattgacaaatctttggagtcttacacaataaaaggaatctaatttacacaacataagcacatttctgttcagattgtgagaatgaaagatcgtggagaagttttattcaaagatatcagctttgctcatgaaactcaaataaatgcttccagaaaaaaaaaaaaaacaaacaaacaaacaaaaaaaaacgaggtaatagcatggaccaaacagttattcattttgctctttaattccaaaaacagatactattcctctctgagtattacatagagcttacgatttacttattatagaaaaatggtgttatctacaacaagtacttattatgaacatcagaagatatcaagtagacaaaaatgcagcagccaagagttcaagagtgagggagcactcagagtccagtcttatagtgagattggttaaactgcaagatgcacccaacaaaagatccattttatctgggaacctcaccttgcacgttgatactttcaggccagtagaggcccttttgtgaaagaaagaaatggtttaattagtgggactccaaggattaaaccaatgttgacaatggcaccttcaccaccactggaaaaaacagtgggtacatccccatacctgttatacgtaagcatttcctgagttttgagtcgacttggctgcttgaatcagggcagagttgcttctgtatgcaatgaaatgcccatacacttggtcattatagttaattaactgccctccaatgctgcctgcaatgcatatatacagagaatatagcaaggtcttttatcccacggaaagaaagagaaagagacttgttgcttttgtccattggagcaggaaaaagcaaagcaaaagaaaacaaacaaacacacaaaaaaacactatttgttaaacatggactgttaccaaacatagaagtaaggttccttccatatttgaagtctattattagttctgccttgtgactgatcgcttctttgctatcatcaatgatcaatgataggacccaacaatgtcagtgcagcattctgggggcactcccatggcgcatttattttgcccatcaccttgagagtggttttcaagattaattctagtgtcggtggcctcgtatattaattattgcttcagaaacgcttcatcggagttcagtcattcttttgttactttgatgtaaacccccaatgcctcagatattgaaaaaacaaaaaacagaaaaaaaaataagagctagcaagaattttcaaatagcattggtgcttaaaaaacaaacaagcaaacaaacaagattatctgtgctatctgcatccccccctttaacgtcttttctttctgcccctgttagtgtcatctgttgtgtttatttttttcattcaaaaaatttagacactcaaaattttgctgaaaatttcacctaagactgtgaccaactgtctggtataaattggatatagatttctagagatgtaggccagtagatagtgaatacaaaggcaagtcacagattttcttttagcattgctgagttttgtgaagttttatctctgcctgatgttacaggatatagtggcaagaatatacaccctcatatggcagaaaatagcaatttcttatcctggatggcagaatggcaaaaatacatacatatggcatcaaactttaattgatagaacttgataaaaaaatttcaatactattctgtaaatctccttcaaagtctgttttgttctcacatccacttaaagtagaacagtcattagacattgcaaatagttttccctgtctgcatgtgaaaggaaagcatcttacccatttgatatttttagacacttataccgcctatggaatttgcctacataactccctttcatgcatggatttcttgcttctacagtcatcttaaatatggtgaataatgcttggcttatggtcctcactcagtcaatgtttattaactaagtacgtattgggcaggtttgttagtgttctatgattgtaagaaactcagcagattaacacaaaatatatttattatctctcactttaaggtaggaaatgtcttagttgggtcctctgcaagaatgcagtgtgtcagccagggcttggttctcatctggaggcttaactggtgatggattctcttccaagtttactcaagttgttggcagaattcatttcctgtggctgtaagactgagggctttggctttggctgttggctagaggctactctcagctccaggagctgcctgaagttccttgactatagctttttccataggccctctcacaacatggtaccttgcttctttaaagtcagaaagggaaagggacacttcctattaccagactgatagcaaggtggaggcttatataatgattcataatcaagagagtaaaatcctatcatctttaccaagttctattggttagaaatatgtcacaggtcctgcccacactcagtgggacaggattatacaatctggacaccaggagaaagagaccaaaggaaagaccttagagtctctttgccacaacagataccatcaaaagaaccagtgccagggccttccctgaaatcctaactttgaactagaattgaaaatcacatcagagaaagaacatcttaatttgttctcactaaggaaaatgaaaaatatttgttgaaagagctgtagggtgtagagttatcattatactagtttactaaagtaccactgaagtacaatgggcatttcctattgtaagaggcagaatcttcagggaatagggatgtattcttagctactctggcagggaatagcatgtgaccctctttctttgctactgcattctgagtcttaggcctttgaataacacagttttttcttaatgtacacctcacttctctactattgtttggcctataacaaccacagaggtaattatatccttatatcctatgtaattatatgctgcagttaatatgtattttaccatatatttatccataggtctgttttctcaaataaccacttaattctatgatatttaaatgaaaagctccaggcttactagtcttccaggatgtgagaataatagatgaattataagctatttcccccaaaaaagagagtgttgggatacgtgagaccatgtaaatgaggagaagctatgactgatgattcctgaaaagactccccccacttttgtatcttcctggagttcaaaaacagatactatttctgagcacccctacagactagaattgccactctctacttaggagacacagtctctaaggtaaccaggatacacatatcatagcatttttaactagggcaatctaaattatgagcatgctacatatgaatcctaggccataggaaatgttttctgtaccaaaataatcaatattaatcattaaaatttaaaaataatggtatttattcatactttcgtgaggacgcccttggtggctgttgtgcaataagcggataatatttgtctgccaatcactagcccatctcacatgtaaaaatgatcacatgacaatccagtgcatgtttatcacccaagatcttgtcagcaactgatggcacactcaaaaagagtgttcttaatagaggagagcttaataaattgactatttacagagggatggacaagatgaaaggatcaaggatcatcctgggttaactggaagcaacttccacactttggcttgataaggttatcagaacccagaaagatctgcactgttgaagagggccactcagtaagaacctaacctcaagtgcagaaaagcaacatgtgaaaacatgtgcactggcagatagagagccagggaaataaataacagaactcctctttccttttatcttctaatattctgctggtatttcccattacctgaactaacaagaagccacaaagcaagagagcctagctgatgcagtcaataaatgttgaactcaccagacacagagcagggggataaaaggtgagaatggaatatcctatagcatgtcaatgtgcatcagtaactcaaaaagtcttatggataatgttgtcccatttgtattaaaattctaacttttgttcatagtctgatttctatccattgtgtcttactttcttttaggcttggaaaatattggtcaaagatatgttgaatctgttactttctaacattgttttagaaactgcatcaaccatctactgaatttgttcagattttggcctcttttcagaaatctgggacttgtaggaggaattgctgaaatcttgaatgattttctaaccattcacaattgtagtttcccctaaggcaactcctaaaaatttccatctttgtcaggctggtcatgtttaggacatttctgtaactccaagtccctttaaagggaaggcctaagagaactgtacggagcaaaaaattactcaggatccctccgtagaggcaccaagtcaacctaaaattctcataactccttgaaagcaggctagtgaaaatttggagagaatttatgaagattagtataaattatagcttattatctagtatttttgcaatctgtccttatactcgttatgtggccaaagcatccaaaaaatgctttatgcctagatgtgagctagaatatttccaaattggcacatacatcacagaatgaaatcctccagttttatccacagatacaccaatgtcatctacatctaaattatattaactctaacacaaatcatcattctacttgtttcttatttctaagcactcataaaaatttttacagttctaatttttttttctccataccaacttgcttcttatcttcatatacttttcctcctttccagttttaaattaaaataactgctgaaaacccctatggcacacatttacctatgtaacaaacctgcacatccttcacatgtaccctggaacttaaaataaaataaaataaaataaaatagaaagaactgctgaaatttgtggagcctttagacactacctttaggattgtgaaagctctgcaacccaatatttcaattctgttggggttaagtctagcctttctatgacttagaactagtcaacttttattaattctcaatttctctctccttaagcatatcatattcctggtaatttttggtaagattttgatgctgtgtatataaagtgcattgtaaatatcaaacaaaatattgagatagatattggaaaaaaaaatcctaaataaaattttaggtgaatgagagaatgatttgtacttttagagcaagttctactatttttatacatacattagcctgattatatgggttttgttgttattgtttgttttgtctttcaaatagatttcatctgaagctgttatgccaaacactactttagttcttcatttaagtgtatttatatgatatcagattttccccttgtttttacaacaagctcaatgatataaaatttatcttaagcaaaattgtccttatgctttacctgacatgcttccttaattaatattatggttaaagagaggaaaaacataaggttttacaagggttctcaaaaatagttatagtaacagagtatatttaaaatcatattaccagcaaatcccagtaataactaaggagacgaattaaaaatctttgcaaatgccaaaattatgttaaatagcagttggaatattttaacccagaattctactgtttgatttcttcacacttcctttcttgcatcaaaaacaaaggtcagcagcataataggtacaaagttaactccatcctttttttccatagaattgtcagattgacacactagaatgcgttttcactaaataatgaaggggaggccgggcgcggtggctcatgcctgtaatcccaggactttgggaggccgagacgggtggatcacaaggtcaggagatgagaccatcctggctaacacggtgaaaccccgtctctaataaaaatacaaaaaattagccgggtgtggtggcgggagcctgtagtcccagctactcgggaggctgaggcaggagagtgacatgaactggggaggcggagcttgcagtgagccaagatcggccactggactccagcctgggcaacagagtgagactctgtctcaaaaataaataaataaataaataaataaataaataaataaaatgaaggggagaaggcctgtgttacctaacagactctcatggactgtggctttcttggctagaacataggataagtaaacatcctaaaagttaaaaacatgaaaagccgccatcttgtcatctttctttatcaattttcgtatctgtttttctaaagcagatttttttaaatttctgagttaatgggtacagcgcaccagcacggcacatgtatacatatgtaactaacctgcgcattgtgcacacgtaccctaaaacttaaagtataataataataaaatttaaaaaaaatgccaaatttcaaaaacaaaaaaaaaaaacacttttctaaaatgggtcatatctttttagctttaagtataacagacaaataaaaattatatatttatggtgtaaaaaaaaaaagaaagaaacaactgaaagatatgcttaagcaacctttggggggtgtaaaccacaatgaaaaaaaaaaaaaggatccaagtaacaggaggtcaaacacgggagaagggtaaatggaattcccagaaaaataactatacataggtatctaaagcaacaggtccagattgatgtaggaaggtaaaggcatgatggtctctgagaaaggaatggaattgatggaaagttttagctgttttggagtgattagaaagaaatattgataggtttgtatttggtttattggagtattttagaaaaaagtaatagggtcaagcacataaaaaaaaatatatttttaaaattcttcagggacttgtattgaaggtatagttgtacaaaaacacattttttctcttagattttattaattttagaggctttggagggtaatggagactacaccctccttgttcctcttgtcacccttagccatctttgggctaccagttagcacaaagtcatctagtatggaaaacaaaatcaagtgattcagagttgaagggtagagtgaagaagtctatcgaaattaaatttttatattttcctaaaacagattactgtatatttctacatatacctctactcataacctcatcacagtttgaaatgaaatttaatgtagcttttcattttgatttccttaagatgtgtggatgggagcacacacagtattttaattttataatttaaaataaccaagcagtcagaagttaagataagctgaacttactttttacttgctataaataggcaaatcattaaatgttacaaatagtccattttctctaccctatcttgctataggttgggacagaggaagaaagagttattagatttactgtctacatttatctagctgtattaaatgtaaatatgaccccccaatattttttaaaatcatttctttaatggacaagtactgcttcattaaatagagtttttttccatactataaaaaaagaaaaaacatattgaaaaatatctgtggagtcatttgaactccaattaatctttatcttagatttcttactatgccaaagtatgaaacttttttaaaatatcagggaaactgatttatgatatcagtaatactccctaaaattatggttagaccagcaggcagatgcttacgtaatatcatttcccaatttcacagtaaaaataacaggtaggttatgtgaataaatatggtaattgcagcccaatgggaattgcaaatttagagttcaatctccattttaagaagaagtcacttacagagataaaactctggggatcagtgactattcagaataacgttagtctttaaaattaaatttgtaaataccaagggaatgaatgatttgtgccttgtctattccttaacataaatagactttctttttaaaagtatatgttttgttcattcttgagaacaagaagaagaacaaaaagaaaagaggaggagaatccaaatttataaattatgcaccattatatttgctctcatagcccatctaacataggaggacctagaataatagagtcagactttaatgttgaaaaatcacattacatcatcggttggatacacctctaatctttcttttaacagctaaattcatgtgcttcagacacaaaagtgaaagaagtcttcaatgaatcagttgcactgtgcttcattctaaaccagacaacagccatcttatgggttcattgatgcattttgttctatgaatatcaaaattatttaatttatgataagaaaatttaaaaaaaaatccaggctattcagacaggagccccagaagctctctggtaaaggaaattctagaactgtatattttccaaataatcatcacatatatggctttatttttctatagcaagtcctataggttagtgaagccagttaactggtctagaatagtagcccagccactgaacaatcagagtataagtctgccctccagacatccccaattatgataagaaatcttgatttcctcgtctgaaaagaaaaaggatctctcatttaagaaagtcatggttatagccagtgaagcttgctaaaatgcattagagaataataaagtgaactttattaaaaggcacccttgggtacaatttcatcatcctctacagctgaaagcagcagaattttagtcttcttatacttaggtttttatagaatgccttttaaccaaaaggatcagaagagtgtaattgcaggcccctttttaaatgatctgtgaaagttgggtggttcattcaggatgcagattaatttcatacttccttgtttggcacatcaattatttcatgatgatgttcctctctcatgagaattataaattaattatcattaataacagtcattatttattaggcatctcatatgtagcattcaccatgctacttccacttacacatgctatttcttgttttcacaacattcaggcaaggtggttgctgttttatctgcattttattgaggagcaaattgtcactcagatggagttttgcatttcttctatatcattcaaaatgcctagcaatgaactgatcagatagaaagttgtcaatacctgttgttgcctggcttattattaagctcctctaagctagttgagcttgcttccatttctaccagtggaaacagactatagccatagcaaaactatttggatctttcccctgaaggtccattcaaaatatatgcactagagggcataaagagagcatggctaatgaaggaatggctggttccagcaaatgatgctatggcctataatgagtttaacacctggcggataatgcaaatgacactgaaaattagctcatttttggcttccccgtgccctggtcaattgaacaaaacttacactgaaaataagcccagtttggagttttgttttgttttgtttgtttttcctatacacacgtgttttgaatctgagctatggctcagtgctgtacacttactagttcctctgctcttgctataccaaaagacatgagttttatgggctctaggggaggtttgattttcagtcctacctctggtatacaggcagttttgccctccgcaggcagttttgccctcattctctttatttgcagggtggttatatcatccaaacataaattaatttttcctggtactttttcaccttttgaaaatgggaatgatccatatggctaaagaatgtcaggaagagaaacatttgggaagaattaaatgggatgcaatcattccggatcttgatcatcttagccaacaagagccaagtaaaaaaaaacagccacagagtgttatgtgccaaaattttcgaattccagagagtttatactatataggtgattttaaactgacatgattatatagttccaaaaataattgtgttgagatggttgaaatgtaggaagagaataagggtatgaggtttatattttatatgataatttgtttaaaatattttatatataccttggagatatttcaaatctttttgtggcatattcttaaaatttaaaatgagttgaaataatgtggatgcttcctaaattacagattataccactaaaaatgatactgaatatcaaaacatacaataatttgaggagttctgattgacaaaagctgtttaccttaaattctttcaaacaacaaaactgtagtctataaggggttagagtctgtgagaacacaaaaagatttatctaaaggagaaacataagcacaagaatactcagtattggtctttgcaatgcagcaaatgatttatagtgagatgagacctagtccagagattgagttcgtttaggaatgcaatggccataagactaagaagtagacaatttgtttaaaagacaacaaatcacatgaaagttgatgcattgtcatgttcctatgtgtagtgacgttatcaggcatttacagattgcgagttttctgattttactaacagagctaagtctttaacaatcttagtaagaagagaagagcctttttccagctatcacaggccagttcgaaaacacagaatgggcattaaggagaatagatttgaagcagcaagtaagcaaccaacatgcttgctaatgatatcaaagcccagctcagcctgtcattcacaatctacttactgcctattgctaaaaagcctttatgctagagttagatgactgtttaactggcattaaattaggacatccaaaatgaacactgagatccagccaacaatcaccatcatagaccagtcatgtcttagctcacctctcttggagtctgtatttctaaaaccatattcaaaatgtgtctatactaaaggagaataggcatttgagagggtagaacacaagtaggcatattttaatagttggggccagcagagggaggctttgggtaacaaaaggacaggctcagatgcaacagccagactgcctagagtattcagagcgttagggatttagattcagctgttcatgtcttagttgctcatagaacaatagaggaaaaactgaaggaaccagaatccagaaccacactgtcttactagggtgaggcagttactttcaagtaaggccagctgaaagtactgggacaaagtccagtagaatgttatataaaataaacctttcaataatagttaatggtcaggggatccaaacagagttacctaacgtattctgaaaggggcgatgatccagtggtgtgtttgttgataagtcagctctccaggcattaaaagcatttcatgatttctttgggttaaatacttctacggtgattaatttccagcagtagtcccactcacaaaattgttgaacatttaacaacaggctattgcaagccagtaagagcttggtccaacataccactgaaagtaaaatctaaggagggagatagcacaaggaagcgttggtacattgtggtgacccttacttgatgggtgcaatgagcagggctccaatctcctggaaagagctggtcaagcaagaacaacttcctcaattcctagagggattaggatattaagcaaatttctaagacacaaatttgggtgcaaagaagtaggcggaagcccagtaaccagattgaggccaaaaagtaagttgttaagactggaaaaaagaaatctagttacatataaaatatcaagtaatataaattagacatcataaagggccttattgttggtgtggagaattctatttgtataggtttatctaaactataaattctctaccattataggcacataattaattataaaagaaacaggcataacttctaaaaatggcaaaagtaagtttatataatagaataatcaattttttcactaatagtggtgtatccgtctgttgaattttgattctgcaaattgttctttagtatgggctgcctaatgacttgatcattacttagctttcttttaattcttttcattatgttaatttgtacgttgcatttcttaatatacttcagtgcctcattaatattaagatctacaagtgtgatttttctgaaaaatcttgggtaaatagttttttatattgaatattttgtttctctctttaccttaccatttctctggagataaatatcctatcttctagataatatatggtataaggtattatgaatcaggctatgttaaaaattcttgtaaaacagggaaaaaatcttttgttacgatgattagagtgatttgattagagtttcagaatgctgtaatataagggcttgaactcccaacacccccccacccccgacaccaaccccccaaacacacacacacacacagggagctagtggtagtaatcaattattgcatattggaagccaggtgggcagaaactagataggtgcttattgcatgagaacaattctgaaagaaataggaagaatcaaagaagaaaaatatgtgcctagtttctactttatttaggatggcatgagctggaaacttgcatggaaaagtagatgttagaaatcagagagttaaaagtcaaaagagcgggttagtaggctccaaaagttgatttgtaagtcactcatttagaactctggatgtatttttcctagagcagcaatgtagctcacaatggtagtccaaaaaacctctcaaagtcctaacctagctgaaattaaatgaagaacctctgagccctgagttccaccaacttctcttaaaactctgatttttgaacccgatccagagctttaagtattgaacctaaagaagcctgtggtgccatttatctagaggtgcctgaaggaaatgaggcagaaggtgtttacctgaagcaagcttcctgattgtgcaaaactgagctatgttggggtcctaaatcctagggctatttctgtaacctactagttatgtaaacttgtacaggtaactcaatctgtcagagtcttggttccctgatccatacaagacgaaaagtaatatttaattcacaaatgcacagatagctcaaaggctcctgctaaaccttccccaggctccaaggggatcttaagtgtaaacatgtggggaaattttcttgtttattgctgcaaccccaggacctagaacagtacttcatatataaattcgtttctgttgattatgttaaataaatggatgcatgaatcaaaagtgcttcattagtaaccggtgccttttttaattaattcccctacctttctccacaatcaacagaaatttgagagagtattagcaaagggtatgtcctcttatagtggaaggcaggataatcatggctgttcgatggatgggtcatttgctggctgtgcgtgctttgctgtagctgtttgtatggttaaggtatgactcaggtgcaatactgacatctccctgctacctctccattgtgagtatactctggccaaaatccacctggttatttcttgtggtttgttttttgtgaatccatcacctttattgttatagagggtctcttcaggttaagctttcttcataatacacccatattaaattgttctatgtgatatttctgcttggcgaggtttaatttggtggaatgagagctgcctgttttttagcagtcagatgtgcataatagccatctaaggtagaattcatcaattatgctgaaatgtttgtttttaaaatgtcaggtgtccagatggtgccatggcaatgggggtcattaaaaatgcttagacacagagagtcttaataaataaatgttcttgttagtgatgcagatccttagcagaggccaagttttttaaaaaggttaataggttaaagtttcttaaagtgaagttataacaagcacctcaagatgaaccacaatattactctgcttttatctgttttgtcatttccatttctgtcttctctctttactcttacctgcccatcttcatccaggaattctcccctattgcacattgaaagagctttgcaaaagagagattttatgttaataaagtcagaggatggtgctgttgctatttggagattacctaattaaagacctttatgggtacttggatggtagcaggactgccgttctaaaaggatgtgcatctggagtgattcagaacgcagctccacatgcagcgccaatggtggaatttaaagcaatcaatgaaattatctatactttcaactttgttagacacatctcttgtgcaaaaccattattacagatgctgaagctacacacagagcctccagttacccataaaagcagcatttggacagagtgtaaatttgccaccaggactctggcatatggaaactaatatgtctgatcaggaaatgaaactcattggaatatttacactgcttctcagatactttgaccctagtttagccaggcttttagaaaattgttgagaggatttatttttctttatctgtcaacaccccatccccctgttccacaaagctcaatctacagactgcggtcatcaaaatagaaatctacatttctgaaaattaagattgttttgagcatatttttcttgtttctgtagaatccaccaggcctggctctggtggaaaaacaaagtagcaatatcagttacaaaggactatcgaaatattcccagccatgttaacacatctgtagaggaaataatactgattatttatttttaaaagcatacctcggagatattaaaggttcagttccagaccaccgcaataaagcaatatcacaaaagagcaagtcacatgaattttttggttcctagagcatataaaagttctgttcacagtctattgtagtctattaagtgtttgatagcattgtcttaaaaaacaatgtacatatcttaattaaaaatagtttattgctaaaatatgctaacaatcatctgagccttcagcaagtcataatctttttgctagtgcagggttgttcctccatgcttatgactgctgactgatcaggctgggggttgtggaaggttggggtggctgttgcggttttttaaaacaagacaacggtgaagtttgcttcatcaattgcacatcaatttacttttcctttcatgaaagatttctctgttgtgtgtgatggtgtttgatagcattatacccatggtagaatatctttcaaaactagagtcaatctgcttaaatcctgccactgctttaccaactaacttgtgtaatattataaatcctttctttcatttcaacaatgttcacagcatctttcccaggagtagattccgtctcatgcaatcattttcttggctcatgcataaaatgcaactgctcatccattaaactttatcatgggactgtagcaattcagtcacatcttcaggctccacttctaattctagttctcttgctgttttcaccacatctgcagttacttcctccactgaagtcttgaacctctcaaagtcatctgtgaggattggaatcaacttcttccaaattccattaactttcaaactattaatgttgatattttggccttaacccatgaatcccaaatgttcttaatggcatgtagactagtgaatactttccagaaggttttagatttactttgctcagatccatcagaggaatcactatccatagcagctctagccttataaaatgtgtttattaaataataagacttaagtgttgatattacttcttgatccataggctagaaaatgaatgttgtattagcaggcatgaaaacagtgttaatctccttacatatttccatcagagctcttgggtaactaggtgcttgtcaatgagcagcaatgtttttacagaaatttttcttttctaagcagtaggtctcaacaatgggcttaaaatattcacggtaagtcatgctgctaaacagatgtgctctcatccaggctttgttgttctattcatagaacacaggcagggtagatttagcataattcttaagggccctgagatttttggaatggtaaatgagtattgtcttccactaaaagtcaccacctgcattagtccttaacaagataaccagcctatcctttgaagaactgaagccaggcattgacttctctctagctttgaaagccctagatgtatcttcttccaatagaagcctgtttgtctgcattgaatctgttgtgtaatgtagccaccttcatcaattattttagctaaatcttccagctaacatgctgcagcttgtacatcagcacttgctgctttaccttgcactattatgttatggagacagctttttttttaaaactcatgaaccaacttctgctagattccaacttttcttctgcagcttccttgcctctctcagacttcatagaattaaagagagttagggctgtggtctggattagtattgaggaaatgtggctggtttgatcttctatccagactattgaagctttctccatatcagcaataaggctgtttcactttcttatcatttgtgtattcactggagtagacttttaatttccttcaagaatttttcctttgcattcacagtttgactagctttttggcacaagaggcctagatttcagctatctgggtgtttcacattccttcctcatcaagcctaatcatttctagcttttgacttaaagtgaaagatgtgtgactcttcctttcacttgaacactttgaggccattataggttattaatgggcataatttcaatattgttgtgtttcagcgaacagggaggtgcaagaagaggcagagagatgggagaatggccggttggtggagcattcagaacgcacactcacatttgtcagttaaactcactgtctcttatgaacttggtttgtggtgccccacaacaactagataacaagagtaacatcagagatcagtgatcgcagactataacagatatgctaataatgaaagagtttgaaatattgtgaaaattacctaaatgtgacacagagacatgaagtgaacacatacttttgagaaaatggtgtcgatagacttgcttgatgaaggactgccacaaaccttcaatttgtaaaagacacaatatttgtgaagcagaaaaaacaaagcaccataatacaaggtgtgcctgtatatctgacttttatttataataatgaaaagttaaaagatagcttaaatgttcaaatagaaaaaatatttgctagtcacagtttgtccaaatgatagaatattatgctgccattgagctttttcacaaataaagaaacaaggaaagaaatgagactctagtgcaggaaactgaggaagaattcttttagattgtttaaacctatttttagtcaggttcattgaggtgtaagttacatacataaaatatattctttttagcatgtaattctgtgtattgacaaacacatagaatcataaaaccaatatcacaatcaagatatagaaaaattccatcaccctctgctatggtccaaatgttatatcccccaaaattcatatattgaaatctaaccccaaaagtattaagtaaaagtattaagaggtagggccttggggaggtgattaggccatgaggctcagcctgtttggctaaaggaattactgtccttataaaagaggcttgaaggagcttgtttaccccttctgccatgtgaggacatagccagaaggtgctgtctgagaggaacaggccctcaccagacactgaatctgctggtgccttggtcttggacttcccatccttactgtgagcaataaatttctgtttataaactacccagtctgagatattttgctatagtagcccaaatggggtaaggcaccccacagatcccttcattcctctttgcagtcaatgcctttctccacctctatcattaggcaacaactgctctgtttgctgcccctacgtttttctttttccagaacatcatataaatgtaatcatccattacgtaacccttgactctggctgctttcatttagtgtattgcatttgacatcctaccatgttgttgtgtgtatcagtagttcatttttgtttttattttttaactgaaaagcattccaggtatggatgtaccacaattcacttatccattcaccagttgaaggaattttggattgtttacagtttggagtgattatgaattaaagttgctgtagtcatttgaatataggtttttgtgagaacctaagttttcttctttcctgggtaaataccttggagttttgggagtggcatttttaagttgcatataaagtgtatgtttacctttataagaaactgccaaactgtttttcaaaatagcattcctattttgaattaatatcagcaatattttatggttcagtcattccattatgacaactgtaactccttatgatcatttattaattgctacagatatattgtactagaagtacgtttactaaaaggaagagactttgctctttgaactttttctgtaatgtcacattgtgtcagtttgcccctcagctcatggaaatagacttttatacttcataacatggtaaaatataaactagtattgtgtatcctaaatagaatttttaggaaccagtatataacactgtgaaacctgaaacttctgtgaatgagctctgctctgattctctggtaggaaagcagaagccagtggcactctctatgataggggaacccgatttcaactctctgtatgaatgttctggacattaattgatatggaaatggtctcttgaataatgcttattcaagagggtgtagagagagttgtcaaatcctaaagttctgtaagagccccatacaccttcatgtgtcaaactgtaaaatagtgacccactgtggaaattttcaaacacctccataagaagagagaataatgaaagtcagcatcccagcagcgagtttcaatgttatcaatatattgcaatattatattcttaatatcaacttggaggatgaggaaaatgtgattcttttacagtatatttcagacatcatatcactttacttgtgaataggtcaatgtgtatttctaacagataaggatttttaaacatagcataatgccattatcacaaccaataaagtaattatttaatgttacctaattcctagtacaggtccaaatttcactgtctaaaatattgcatttggttgttatatctattaagtttctcctccttttaaaaaaatgccagttatatatctaataaatttataaattttcatgtagagcttctctcattccattcttctggtcttgaacaggtttttctacccccatgtctcctatgtttcctttacttgctcttatgtcttttacttgcttcaactatggaaggagggcagatttggggagatttgaaaattacaccaatcactgccatttttccccaaatgttgcagaatatctgcaaagttccctttagcttaattttgagcagtaggatataagtagaacaactaagagtatttttagttgcatataagatgaaatccaaattctttagcatgatcctccacagttcagcacaggcttgtgctacctttccaaatttatctcccaatattacccaacataaattcttcactcttctttattcatgctttttcccttgccttccctcactgtgtcactcattacaaaaacaaacaacaccccccctccaaccgtaattgtaattgtcttaatttctgctcaccatcttatctatcctgatcttccattcttggcaaaatcctttcccactgcccttttcttctccctctaagctttctagccacttaattatttcatattctcaaatttattgctctttgtttccctcttttatttgaataattgtcctattgatctcagtaacctgttagagtaaaaattcatttgattaaagaaaccaaataaaagaaacctgttttcattgacatgtactgcttactaagcattgtgctaggcattgttgaaggaactatctacaaacagacctggcaattgtcattaaagaactaactaaatcacatcatagtatgagaagctgaccatgtcattcctttcaagtgcatccctatttggtagaatttcagtacgaatgcaaagtcaaattaagcaagttatttaaagcaataagtgagttggttgagggagggagactgagacagaaagaggggaagatgtttctagaacagagatccttaagttcattgaactccctctccatctagttctactcagcatctttctgaatcttatgtattcttcaaagtgttgcttaaatcctacattgtgggtaaaagtttcctgaatccttccacatgtaccaattcagtgcttgttcacaaaattattgggatgcaacgatgactccctcctctaaatgtcttgaacacttatcaaatattacatttatttcaaatgaaatttttattgtcatttgctcatgtttacattgtgtccctcctgctaggttttataaatgagctgttgtataactcttcgggtcccccagtgtgtaataacaggtgcttaataaacatttcataaagaaagaaaaatttctttgctgaaaagtctgagaaactcttccttcatcaggacttgcatgaataaagcaaagcaatagaattagtagactgtgttgaacagaactgaactcaaaaattctaagatacataagattttcttccatttaagctcaggaaaaatataatcatcttagttgattttccctgaaaattttaggaaaattttgatccaaatatatcattgcattctattagtcatttgatcatatggctcatattgctcagactatacatacattatagacagacaaagaagtagaaacaaacaaattttcaacagaattgttaatgggaaaaacgctacacaaagtagggagagcacaagacattggtgtccattttgtgataatagtagctatagtttgctgtatacatccttataagccaaaattttcacatattttaatcctttaaatttccaaaacaacagtaagagatagatactgttattaaactcattctacaaatgaggaaatagttaagcaacctgtcctggggctcacagcttgtaaacagaggacaatggttctaaccttagagccaggttctctgggccaagggaatggcccctactccatacctatgagactttaaataagtccctatctgtgcataaaacatatgacataaaacataattattcttcctctgattgatttctgagataagattatgtaacactatttgatcaactgtagccatctttggtagttagtcaagagaattccaacggctcaggaagacaaaactgtatgtcctgtcttctgtaatcttatagagtgtgttgtaatttgaaagcaaattgcaaaccaaaatcagcctcaccaacaaatatttataggaatgctggcatggaaacagccatattacctccaagcttgatgaggtcttcagtttctgtccctttagtccctctaactgctccttgcacttaagtttcacttaaggcgtggcataatttatctctagtcagaaccagctaacaaaatcctctgataaatatttaagcaaaggactggtagaaaatcctaaatccagtgcaatattttgaaaggtgtaggctcttgagatcactagatttttgagcacagtttgttcaagactcaaagtagccgtatattattttatagtaatcgatgtatcttgaaccctatctcaccataaaaattcatgcctaatattcgttgtgctaaataaccaaacctctagtattaatgagaagtaaaatagaatagccgaaggtcttacagtgacattctctctagagtgagagcctctgagcaaccatcctgctgggaatagtcccaattagagtacttcaaacgttagctaacccccattccttgcctccagtctgcacaccagggtacaaattaacttttaacaaaggttgatcacactctttattttagtagtataatgtaagttatcagcaagatttcaagaatggagaaaccagtgtgaaaaagtctttccttagaaagaagggtgtcaatttggggtgtcactcttacagtttgatatgtttacacttgacattttagaatatttctttccttctatagccattcagggttaaatagttatttccaccagcaaatttgtctgtcataatagtatcatcagacatcagagtccttgtttgggccgccaaacaggagactattaaaggaaggtaaatgtggaatataggataatttgggctataaattcaccatccttctcactctcaaactctttccagaacattctttcttcatttttttcattctgaacaccacaattctatattactatggcaaatgtctcttataaaaataactttaaaatttagtgtttagtcctagctaattgccatttctttagaagtattctaacaaattaggcattgagggacatatttaatttagcatttctctgaattaagacatataggcagatttccaaatcttaattatgaactagcaaatgtataattagctatttaaaaatactattgatctgatggacagggcaaacttaccttctaattaaaattaccctaagaggcaaattgcacagaactaatgtgttactcaaagcctttcaattagaaaaaaattaaggaaaatagttttcctgatccattttgtggcaaatctaagcctctatttacctgtgtttttcatcttactcccacacaaatgaactaggaatatgtagatacacaagtccttcatacaggactgagggtatctggtgctaaacaagtcctcaataaacattaatagattagagttaacggaaattaaataaggcaagggatttattcataaaaatatttactgagcaccttgtagggggtgaaaagaaagtcttacccattacaagggtcacagctgacactcctataacaaaagataggttaacaagagaaaagcacaacaaatttatttaatcctagttttatgtgacatgggagctttcaggatgaagatcaaatgacccagggaaaactatcaaccaactttttttttttttttttttgagacagagtgtcactctgtcacccaggctggagtgcaatggcgccatctcagctcactgcagcctccacctcccgtgttcaagtgattctcctgcctcagcctcccgagtagctgggactacaggcatgcaccaacatgcctggctaatttttttttttatttttggtagagatgaggtttcaccatgttggccaggctggtcgcaaactcctagcctcaagtggtcctcccgccttgacctcccaaagtgttgggactacagacatgagccactgtgcctggcctatcaatccgtttttatgcttaggttcaatgaagtataggcagccatgtagcaatgtgcttggaccaaaagagtataatcttacggcagtagactgacttaggaaacccagaaaggcttctctgttcagattcttcctggcctttctctgaagcattccttcctcctgggtatggggcagcctctctccagaatgggggtcttatgactactatcaaacaaggtacatcaatttctttatggccatctcctacacagaaaggcaggggaaggcgagaataatatttttagtttttttggctggctttggggaaaaggagttctagtttctatgactcacctgagggaagaggtattcttgtttctgtgacttgccatggggcagaatgaggggccagggacaggagggcaggggagggtcagagagaaagagcttctgaggccacttctgaggctttcactttggtattttgttttctgagccccaacaacctactatgtgctacctacacagttgataagttcagtccctgctctctgtgaattacatgttcggtacaagcagatgcacatattctgtaaacctatgaactttttcaccaaatggattatatctcaccatattccacgtaactgatgcagaatcatttaacaatggctatttctaagtgggacccttgctcctttagtgtgttgcaatctctcttctttcagtagatctttaagtccagaggccagttgaatgtggacacagattttccatgtaaacttgtactcttagtgtgcatggaagtacttggagatattaaagttttgtggcactgttaagtttgcttaacaaataccttcttcacaaataatgggaaaagacaagtccaaatgtatccatgttatcccaaattctgattaaatgaggtctagattattatggttttatgatagttcattttcaaataagtttctttatagcccttataaagagaactgtctgagtaaatattgtaatttaaaatgtagacgtaaacttatatgggcaattttatttcattttaagattaaatcatgatttctttttaatttccttaatgtttctttttgcaaagcttcacggtttctggcactgtgcctcttaattcttaggagcacgttatctatcttttgagcataaaacaaataaagacataagtaagaatcgcttataatttttttaaagagtgaactttctatatcttaaatattggtcatgcctttccaaaccctttaaaatcagggtgggatttagtcacataattttacagatgaaaaaaccgagattcagtgactgtcattggatgaatgtataaggaaaatgtggtatatatacacaatggaatattattcagccataggaggaattaaatcttgtcatttccaggaacattgacggaactggaggtcattatagtaagtgaaataaaccaggcacagtaaaacaaatatcacatattctcactcatatgtgggagctaaaatagatttcatagagatagagaatagattggtgattactagaggctgagaagcaaaagcggaaggaggaatgaagagaaattggttaaggggtatgaaaatacagttagaggggatcagttctagtattcaatagtagagtagggaagttatagttaaagtagtgtgttgtatatttcaaaacaagtagaagagaattgcaatgattccaacataaagaaaagataaatgtttgaggtgatgaatatccctaccctgatttgatcattacacattgtgtacaggtatcaaaatatcacatgtgccccccaaaaatatatacaactatcatatagcaataataaaaaaactgagacataggtagttgaaatcctgagtgtgactcaaaacaactactaatattaattatgaaattcatcggaatattattaaaagaacttatgtaaacatttgtatagtaaagaataaactgaatctagctttcccaattctgaatgcgtcaatttacattcattcatgccaattttcttctgaatgatatctctaaggactgacattacttctctggaacaattctgtgtagaagaaaagattggtgtctccttgttttcaagagaaaagcacattaaatttccaactaacaccacaacacagacaaatgaaaacaaacttcgtgtaatgaaagagacacaggagcaaaatttaattcttcccataaaacaatgtgttgaaggagagcctaaaaaaatcgtaatgttaatgaaaatggagggattacactgttaaatcatttctatgtaaattaatagaagagatttctttttggaaataaagcccatcaacagaggaactgctaaaacctgtttttatctccagtaacataaaatttcaggtcacatcaacaaataaagttattaaatcaagcattttattatctgaccctaaataatgaacactaatcaaagataccatccatagctttgattattaaagccaggatttcttacggtttttcttaaagaaaaatagccctaatagatgtcactgcaacaattgatgggagttaaagaaacagattaattggactccatatttctttatttaaacatcttaaatacaattatgcatggccaacggtaagttaatcattttatttagatattaaatgacctgaaattgggttttttatgcctttactcagccaccaatagtcacactttcttcagtccaagaggagggtgtgggtactatctttgatttttattttataatatgaactacaactacctccttgaaatgccttcctatcttagctgtcatatacctgtactattcttgggaagcatctacatttctaatctctctctctctccccaacttcctccttacatctcccccggcctctctctcccttttgctttcactccacttccctcatatttctaccattattgctccatcttcagctacctgttcctctccacagtactctttacaagggtcattcagccttatagctttaactattgccttcaaactgaggattcccaaattagaccttcagtcctgatttacctgtctttcctttatattagacatttccaactaaatatatttatcacagccatttaaattttgtttatcttcttcctttcaacttctctctgttgcacaatttcaacttcattcaacttcattcttaaaggctgatgtggtgctacccgtgttaaatgacttccacattcattgtgttattgtatatatcaccccaaatctaaaccactagtccacataagcacacacatacataaagacccacaaacgcattcacacattagcacttaatatttcacctggcacatatcatgtgatcaaaaattttggtgattgggtaaaacacacatgaacacagcacttttctttctcttctctccaaatgattaccaccacctattgtctttatgcctgttctaaaactgcaaaaaggaatgaggaaagctaagatggagctgcattagcatagtaatcattgtgttaatgtactgcaacgcatgctcctgctggaaatatttgtgttaaaagatgctgttaagaaagccgaaatcctgaaccctaatgaggttcattctccacccaccacacatacccacccacacactcacacatacctttcaccctggccaatcgtctcacatctggtgaaacatgtcagcagaaacctaatgctactaatgacaaataaatatataataaatatctttcctgtgatagtccttttagtaaatggggaatacacttcaagcttaggttattttgacaacatgctacaggtggatgaattccagtgatgtcttaaccttctaagagacatgtgtttatggtttatttattagtgaccatctttgggttgcaaataacaaatataaaccaggaagcaagcaattcacaggaaaagaaattttaatatgtaatacacacataaaaatattcagcctccttagtcctcagagacagacaattgttaaagtagtacatcactttcaaacaccaaataatgatgactgaaaaaaaacttcaataactgcaagagtggcttgagatgggcactctcaaactctgccagtagaaataattcgtttgatattagcatgcaaaaacatttaaaatgcttacacatttgtatctggcacttcccaatctagttaatcaggctaaaaagtgagcatatatttttcaaagtttttacaaaatttgtgttctaagatgttcaccgcaattatttatgagggctaaatataggaatggttctaagtattaaaaattgtcaaaacataagaagggatactgtataactctatatatttattttaaattaacaaaagtagatttttatgataaactgttgaatgaaaagtaaagatactaaactatttatgaggtatataaaataagaaaaaaatatgacatatatgcatataatatatatattttaaaacacaaaaaattatacaaaatgaaaacaactgttaactcttgatttgtattttagtggttctgttttcttctctacatttttaacccttctgcaatgattctacatcacttccataaataaaaaataatatctatttagattggaaatgaagtcaaagtgtggatatgaaccatcaaaaaacaataatgtttggatttcttctggagagttcatagacagttgagaaacagatacctgtagcaaaatcaaaaactgttctgcacccaactcatgctataaaatctagtttaagtgcagagcttgcactgaaggttggtattactgcacactaatccatgcataactgaattatcaaggtccttccaagctttttccaacagactcaaaaagttagttttataatttaaatcaactactgtaaaaaagcttttatagctaatatttgatgaacacagtagattgaaagaaataatggaaatgatagagcaaaaatgtatattttagctaatggaaaagaagaaaagtaattttgtttttcagtggatattttcatgagagtttgctttaattaggtgtgcatgaacataatcttctaaccagtattttatttaaaagaggcattcaataacttcattaacctcaggctataggtgcacaatatattgtggaaaataggaaatttaatcaaagcatatataacttctcatagacgttgggttctggaaacagcaggaaatgtatcccagctttaccacctaacacctgtagaatctttttttttttttttgtaaaaggcacacaaattttatttacatgtccaaggaaggaaccactgagtgactatccctgcgtgtataatcttgagcaaattgctcaaccatactgtatttagaattgttggaagattaaactctttaaataagccaggttttcagaatgaagtaggacccacagtaaattccacacgaatgttacctgtcattgcttttagctattacaacctgtattaatggatctatgttggtcgtggttattcaataatttattaaaggttaagtatcagaatgtgttttaaataagttgtagcttcattacagtatatgagacataaaaatttttatattgaataaagcatccaatcatctagttctgccacaaaatagtatttatcaacaacatttataaatgcatacatatgcctagtatatccttggtatgtaagatagttgttctcctaaaaacttctgaaattctaaacaatatgtatttcaaatctaaatttttaaagtaaatatgctcatatttactgttagcatttctgatcgcacaagaaataaactgtctgttgcgagatgtttttctttcagcccattgaactagattctaaaaattgagcttgcaagaaaggttagaattaaatggatcaaaagtaaattttcctccaacttgattcaatcatttccaaagcccaaataaaatgggtcctgagcaaataagattgtaaacacaaaaccatcaaatgagtgacttagtgtactccatggtagaaaaaggaatccatgttaaaagaattaaagagattttatgtaatatatgattcccacatccaagctttgtaaaataaatgcttttcagaggtacattcttatcatagataaatttcccaagtggcaccataaatactgggctactacataaaggaccaagaccaggaagaaagaaaacagttaaactcaaggctgcagatgacttctgtgacaagagtgagaggttaacttgccaactgactgaatctatttctggaattagcctaatgtgcctgagaagtcagaagaaaaatggattttaccactgcttccttgcttgtgcttctagaagtcgtctcatcccaaggaatttattgtatgtttcagaacagctcataatttaggtttcaatttccatcagtatgatgctttataattttgtgttaagcttcaaataatttaaatttttttatattgatatatgtggagaggaagcataactatcaaaattggaggttcttgttattaaagattcatcgtacttatttattttttaaaaaacaattcatttctgttctttacctttccgcttagggcacattttatgatccaggtttcattaaatgccagtaattgtactaaaaatttataaaatgtttgaaagtagattgataaattaaaattttaactttaataaaaactgtatttaatacatttaatatctcactcaataaaaattacatgtctttgtattgtttttatgatgtcactgcaattaggacttaaaaaataggctcttccaatatacacatgtagtttttaaatgatgttctatattaagtagaaaacacacatactaaatatacgttatagtatagaaattgccactatttagaaatatatttgcagtgtaagaagttcatttggaattttaaaatattggtcttttgatctgagtgtatgactcagatataaaacttactaaaaatatgaattaatttctttgaacctctttttcacatgtaaaaaagcaatgataatacctagattagatagttatagtaaagatgagattaagaaagtatataaaattggctgggcactcatgcctgtaatcccagtgctttgggaggtggaggtgggaggatctttaaggccaggagtttgagctcagccttggcaacataatgagaccctgtctctacaaaaagtaaaaaagaaaaaaaaattagccaggcatggtggagcacacatgcagtcctagcttccctggaggctgaggcaggaggattgcttgagcccagaagttcaaggttgcagtgatgtgtgattacactccagcctgggccagagagtgagactttttctccaaaacaaaagcggggggagggggaagaaaatgtataaaataaataacacatttcctaaacacaaaaaagtcacttaagagaaaacgtattgaacactaactcgggttgagactcttgctattactacaggaaaacataagaggtaagggtggaaaattataaattgagtatatttttgactggcatcagaggtttttttccctacttatttgacattgtcatctaatataatttctagtgaagcattttattttcatctgtatctcttcaagctagaataactcaatgaaattttcatgatataaagaaggttgatttcattcacatccaggtaggttaattttggccattctaattattgctaatcacaatattactagtgtgatgaaaagccactaaaatgttaaataactcatgatgaaaacagactaaagaaaaaatgatttatgaaaaaaagaaaaagtgtatcccatcaaatagatttttttccacagtacattaaagagtaatagaacatggtatgattcaactcattgttaagtgaggttaattgatgatccacttcaacaatctcaaatgtcagccctagagtgtatccctatgcagagagaccacattatcttatggaagctacattattagccaaaaacataatgtttgctgggtagtgatttacatgtgaatagtctcaaaaaggagcttctgaatataagcagttctgaatattgtaaaaataaggaaaataaataatatttagctatatttatattctaaagacatgcaggttgctaaatatgaattgataatctagaaaaagaaaatagtgaacttgcagataggaatgaactagataggtgagatagaagtattttagaaaccctttatcccagaagttataaaaacaaatttataagatgatgattgtggagttttttatttttttttctgtcctttccctttaggtcatattttcattctctttttttttttttaagtaagattcatacttagatgccatatttgaacactatggtacaaatgtggaagaatccatttacagtgattaaaatgctgatttcagtattgaattgctggggaagcattcgcttaagataaaaagttattcttgttgggaaaacagagagaaagacttcccttatgagacttatagagggaaataaatgaagtttaaaatctataaagtttatgccctaaaagaagctaacgcatggtctttggaacaaacccagagcatacaatggaaggagagtttatataatttctacaatgagccattggaatacgtgcatttcaatgaaataccattcagtactaagtcaatcagatcacatgtgtaatttgataattgtgtagtaatattttcctcttttaacaatgtgaaattattaaattcagtgtgttaatttcactttgaaatacctctattttcactgccattcacttcttgacctttttcttacttttgtccctattaagttacaaattttcttacccataccttaactttcatttatagtaagtcttttaaaaagtgatctaccttttgctctggcgagattaaatcatcctagagagtcagtggaaaatcaacagaaaagagattccaaacaacaaaaagacaaatgatttttaacattattttgccattctatttcttccttctagcaagagaattttattttccaaatttgtagaaaattagaaagccaaataatcacattgcctttttgcatagtattttgcaattatattatgtatagtcacatatattatctcatttagtcctcaaaaaaaaatcctataaggaggagaaaaagaaattgaagttcagaaatggaattctgtgtgcccagcccagtctccttttttgctcatacattttttttctagattagctattatttattgtattaacagaaaaaataagcactgggttgccacatacagttgcaccactttcactccacaaagattcctagccaagtagatgatttgcaaatgttttcatgattcttttcaacttattgaaaatccaaatccagtggctccatggaactcccttcagtgtaaacacttgactttactaaacgatacctacttaaaaaaaaatcagactaaagaactgaatcaaatggcaacatatgttttggaataatttctagcatattaacaatcctttatttagtgtgtagacatccccttaaattaaaaacttttcctaaaaataattatgatcccactaataaaagcagtgaaataagtagtactagcttctttttttttaatctctatgctgagctctttattaggtatacagcagatgtgttttcattgaagaacaaaatacattttataaactgattttggtgacaaataaccccaatattagatcagcatcctgaaagcactgagcttttgaaaataaaagaaagataagaaattccgttagcgaggtgccggagacaagtaattcagcatgctgctcaaagattatggggagctttcagcttcaactcctaggaggcccatactcataatgctgaggctgatgtcaatgtcagttttatacccattatcttcatgcaaatctaaacaatggaattttggcctgaaaaaatgcatatgttatccgttcatggtctcttttatttcctgtttggaaccaccctttgccctacatgattcataaatgtacaccgtaagtccccagggattggctttgagaaatagctataagcacagaattcacttttggaaagtttagcctctatcattcaaggtagggatttggggctacatatatttatgatcacattgttcagtctcttcctaatggaatgccagagtcatttctctaatggaaaaattccatctgtttaggaaaatgtaactctcagtttgtccttggggaattttctgagataactttaatatccttgagaatgttgataaaatttctagaaacctaatgttattttccaatagactttttaaaaataaattttattgtatgtatttaaggtttgcaatacattattatggatacatatagatagtaaaatgttactatagtgaagcagattaacatatctatcatcttacgtagtttctgtttttatgacaaaagcagctaaaatctacttatttttttaaatccctaatataatacaattttattaactttagtccacatgttgtaaattaaatctctaaacttgttcatctacatatctgctacattgtatcctttgtcccacagctcctaatttcctcgcccccacccccactgatgataaacatggtttcactctctatctctgtgtatttgacttctttttttaaaaaaattcacatatgtgagatcatgcaatatttttatttatgtgtctggcttatttcacttaatgcaatgtcctttaggtccatccaagttatggcaaatggcaggatttccttctttttttgaggctgaataatattccagtgtgtatgtgtgtgtgtgtgtacacacaccacattttctgtatccatttgctcatctacagacatttacgttgtttccatactttggctactatgaatattactgcagtgaacatgggagctcagatatcttttcaaagtggtgatttcatcttctttgggtatatgtccaaaagaggaattgctgtaatttgtttaggaaggttcatacttttttccataatggctgtaccaatctctattcccatgaacagtgtactaatgttcctttttctccagtcaccaacatttgttatctcttgtcttactgataaaagccatccttatggttgtgaggtaatatctgatactggttttaatttgcatttccctgataattagtgatgttgagcaacttttcatataattgttggccagttttatgtctcctttggagaaatgtctgttcaagtcctttgcccatttttaagtggagtcatttgtttttattctattgcattgtaagagttctttataaattttggatagtagtcccttatcagatatgtggtttaaaaatacttttttccacttcataggttaccacttcatttggtgattattttctttgttgtgaagaaacttctgagttcgatgtagtttcatttatttttgcttttgtagcctgagcctttggtgtgatatccaaaaaaaaccattgccaagcccaatgtccaatagacttttatatcatgatattattatctgttaggtttattgttcagttttttaggaatacttcagagaacttctgaatatttcataataattttgttagctataaatgcttttaagaattatctaaaattatctaaatttgaaaaataatcttttgaatttaaacaacttcaggcttgcctggtgtgtgcctgtacataaggaactgaactgcttttaacctttaaaaagaaacatacaagaaatgaattacaagtttgggtctgttgccaaagttgagatttttcaacttcacaagactctttaaagtaaccatgactgtaaacattaaaaaaagaataaagatggcagcctcattggattcaaatgaatgtcgttcaaagtcaactctaaataactacatgtgcattgccttgcaaagtgttagacgttttcaggaatcattagcagtaaagtgaagcaggtaagatatagtagcttttgcttctctaaaatcaggtccttttcgttttctgagcctcacttagcagcattacttaagactccatgtggcaactactatttcctccattgttccttgtgtctctccctccaaagcagtattgccgtccaaggctatgtaggttatacttgtgcctggcacaagccaaggtggagaagtggggtggtggggagtaagtttcagctccagcttatgctgcatccacgaaacccttaccctgattcaaggctgcgtgcacttggtcatttcaccagctaactctgataggtctgagtctgcctaaagagggcgcctttctcaattttgcatagaggcaccctaataatgctgactccatgtacctaaatcttcctcatagtttcccaatagttcattccgtggatatttattgagagcccaatatgtgaaaactaccaggctaagctttacaaagtacaacggtgggtacttagtgcagagcatttgtactccagcagaactgataagggacttacacagtaacaaccataatgccagcagaaagtaagttggcgatgaagaatgttgtccatgcatcagctgaggccttgctaccctttgagactgagataaatccagcttaggcttcttattccacattgtgtgggaatggcaaggacctcccttccccaaaatttacgttaattacttaaggcttatggattcaaattcactctggcttccagtttctgtttccttggaatttcatctcctacttgtctcatctcctagaatgcttttcttctttcttctccctgccaacactttgcttggattactttaaatccaaacaaaatgaaacaccccaaggcatttatgcatgtaaaagacaacagtataaacaatttaaaattgaatattggatatttgtaactgagagtattttactggccacctttctctgtaagacctgctatattacgtttttccattacattttctacctccctcagtctttcccagccctaaatatctcctcatttctttgataagttaatttaaaactctctttactgtctccttccaagatatgcccttggcacctcactttctatctctaagttgtgtaccaggggattcttctaaacaaagggacaactgaggactagcaaaaaaaaaaaaaaaaattctccttgttacagaatagtatagataaatttttatgaattattaaaatagagagtaaaatttccttgggatgacatttaaacaaaacctcgagggttcaagatgatgactgtatgacaagatagaatgaaagggaacttttcataaagaattgatagtttcaataacagcacatagagcccttatgggaaacagccaataatttagtttaaatgaggcataggttaactaatgtatgaagagagctagaacaagataatttagaaatactaaatagaaccagatcatagaggggagaatatcccaggtcaggactttaagagatcttggaagcctttaaagtattttgattagggatgataggatccaagttatgctttgaaattgtgaatctggcaagacttagtgggataaattttgcaaaaggttaaaatttgaagacggtaaattagtcagttaaaccagcagagactaatagaggcccgaatttttgaagttgctgggaaaatagaggaaagagaatagatatcagagatattaccagcacagaatcgacaggacttggtaactgatcattgatggatggttaagaggatgcgtaacagaagatatctcaggagaagcaagtttgggaagtgatttaaagagttcatttttggatggctcttttttgcagagccaaatggccatcttggtagaaatgtccaacagacaaatggagaagtagaactgaagctttgaagaaaagtcagggttagagataaaaataggaacatcatcctcgtagaaaaaacagcatcttttccttcaccttaacaggcaagtacagtgtactgctttaaccactccaaaaaatcaacaatatccacctccatttaggaatactctccaattacgttactctgagaggaaaatatttaaaattcacatttggctcttaaaaatcagactgtagagaggatgtaaggaaaatatgaatcaaatgttatcaatggttagatttcccagtacagaaaaagaaagaacacaaggccaaaattgaattagacaaaacttttctttacactgacaatcttatgcaattgttttaagtctaggaaatacttgatgtagtccagattaaacaaatacttgtattggctgtggaagcacaaactttatatatgtttttccattttatttactagaagagttgctaaaatggacttctaattattatcactcagataatccttttgcttattaacttggcacagcaaaagaacatatgaagcctagtgtttgatagtggttaccaagtcatatttggaagtattaattaggtcctagttctatcatgaactaggtcacttattccacaaacatttcttaataactatgtgcaaaacactgtactaattaccagagaaagattcaaaactaacagtagtgattaccctaactatcaaatagtttaaacacaaacaatatggtgaactttccccagatagggcaaaagatagcaagggtgcagaaaaagaagggaagtgaagtgagatataatgacattcacgtaaatcctgcatttattaggactccccagaaaaatacttagttgtatcctgaggaaatatttcaaagtgaaggcaaaaacgtatcatcttacagatgttttacagtaatggcaaagtggaagcaaattaaatgtacaactatgagggattacttaaattaattacaacatatctatatattattaagcaaccaatgaaaatcatgtttttgaagtacaaatgctgtcatgatataatgctaagtaagaaagctagcatagagaaaatttatcatttaatatcaattttggatgtgtatatatatatacaaatatatatatatatggtttctcaatatagttttctgtaatttccatcttttctgcaggaaatatgtgagatttaaaatgttttaatatatctaaaaagtatcagagttacatatttatccaaaatgtttattacactgaataaatacatacatcaagataagtaattttatgaggcttactcatagttcaatgtttattctttgcagataggaaaaaactcagtcctttcctgaaattgtcattaatataacattaatttcagatttcaaaaaacatatctaaacattttgaatatttttactatataccatgtaattaaatagacaaggtagatcttccttttgtaattatatgtacatagagattaaatgaatcaattatttcttttcaatggaataatatattaccagcttcacacaagttacctaatcttcctaggcctcagtttcttcaactgaaaagcagagttaggagtacatagaaatgttcttgaaacaaagtgattgtttaattatcattaggaatcaataacatcatcagtatttttactttttggtatctcctaatgactaaaattgtttacatgggtaaagtagaagtttatttacacacaagaatatattcaatatgtatccattcccttcatcatgttatcaaactactttgataaacagtctctgaaaatctttttttttttttttttgagacagagttttgctcttgtcacccaggctggagtgcaatggcaggaacttggctcactgcaatctccacttcccaggttcaagtgattctcctgcctcagcctcccaagtagctaggaatataggcacccgccaccacacctaggtaatttttatatttttagtacagacggggtttcacgatgttggccaggctggtctcgaactcctgacttcaggtgatccacccgcctcagcctcccaaagtgctgggattaaaggtgtgagccaccacacctggcccaaatatctttcttggtgcatagggtatgttaatgtatattagtggtatatactattatatactaatagtatatactattactgtctgcatctttattcttttaatgtgattctaaagtcggttatagatgacatagagtaagcaaaggcttaaagaggattaataaacgtaagcagtatacatggtcaattcagataatccagtgaagggaaatggccattcctctactgatggcaacagatgccatcctgaaaatagctccttggccttcgaaaagtagcacattaaaaggagcatatcctagatgatgggttgatgggtacagcaaaccaccatggcgcatgtatacctatgtaacaaagctgcatgttctgcacatgtatcccagaatttaaagtataataaataaaataaaattaaaaaggagtatacccaagagttggtacactagtagaactgtaatttttttaaaggcaatttctgacaaaaacaagcaataagaaaaagattccctattcaataaatggtgctgggataactggctagccacatgcagaagaatgaaattagatctttacctttcactacgtacaaaaattaactcagaatgggttaaagatttaaatgtaagacctcgaactataaaaatcctaaaggaaaacctaggaaatacccttctcaacatcgaccttggcaaagaatttatggacaagtccccaaaagtaattgcaacaaaaacaaaagttggcaaatgggacctaaagcacttctgcaaaacaaaagaaactatggacagagtaagcagaccacctacagtatgggagaacatactttcaatgaatctgacaaaggtctaatgtctagaatctataagaaatgtaaacaattaaacaagcaaaaaacaaccctattaaaagtgggcaaaagacacaaagaagtatttcttaaaagaagacatacaagcagccaacaaacacatgaaaaaatgctctacatcactaatcatcagagaaatacaaatcaaaaccacaatgagatgccatttcacatcactcagaatggtgattattaaaagtcaaaaaacagcaaatgctggagaggctacagagaaatgggaatgcttatacactgttggtgggaatgttaattagttcagccactgtagaaagcattttggagatttctcaaagaacttaaaacagagctaccattcaacctagcaaccccattactgagtatatacccaaaggaatatagatcattatactaaaaagacacatgcactcatatgttcattgcaacacaattcataatggcaaagacatggaatcaacctaggtacctatcaacggtggattggataaagaaaatgtgatacatatgtactgtggaatactacgcagccataaaaaagaatgaaatcatgtcctttgcagcaacatggttaaagctaggggtcattatcctaagcaaattaatggagaaacagaaaactaaatcctgtgtgtccgtctataaatgggagctaaacattgagcgcgcagggacataaatatggaaaaaaatagacttggcagttgattagagggaggagagaaggaggagggagtgggttgaaaaactacctattgagtattatgctcacaccctgggtccaatatattcatctaacaaatctatacatttgacacctgtgtctaaaatcaaagctgaatatttttaaaaggcaatttctttaatttgaatcataatgcacatacttctcaataatatctttcagctatgaaagtgttttttttttttctccctgggggcagtcaatgaagagtaatatgcctgcaaatgaaagcagaaagaaacttaaattttatctactagtctattaaacgtctctaaaacattgatccactcaaaaacaagttaactagaataggaatgtgtttcctagttgaatgttgtcaccatttatctatggcacatatttatgtctcaggacagcttgcaaaccttggtagatttccattcattaaatgttcttgggaaaaatgtagattaaaacaaaagtctgtacttggttataagcatcactaggaagttttcaacctgtcttggttttcagttttcttactgaaaaaggaaatcctttgcatccgtgaagtgtttttataagaattaaatgagataatgcatattaatatcaaggttattgactaacagtcctcaataaatattcacttccatttaatttgttcttttctttcattcttcccttcctatctcctttccttccctccttccctctcctcttccctttcttctttttcttctacactaattcttcctaattgtaaatgtattctaagacaattagtatgtatgtttgattcatttaaatgtcacttttggggaaatgttaaatgtgacttttggggaaaaatcctttgaatcaggatgtgttaacgtcttctttgcgatatttttgtcattcttttgtattttattcatgtctaatagagttattgaaaagtttctttaggaaatgttatcagtggctctcaactaaaatttaacatgcatttattaaacaccagtcccgtattagtctactgaaagagaaagagagacatatcaagaacgcatatggtaaggtataatatcatagatgcatatgtgaggttagttggtcattgggtgaggtaatgctatcagaactgtctcctggattgagttctttcatgttaggccatttaaatatctttttccctctgaactagcctgccacagaattgtatgctattttaaataatttaaattttgtgataagagtatttaaagtaaaagaggtatgcaatgagatagtatagcttgattcaaatctggtgtaggaaaatatgaataatatactttaatgaattatcctagctctgccacttgcaagctgtgtgattttagaaatggcttattcttctggccttatttttcttatttataaaatgagaataataatagtagttacttttcagatttattatcaggattaaataaagtaatatatatataattcttgccacatattaattgttcaataaatatttaattattattaatattattattgtttgacttcattgtctgtcatctcgttagataggatgatttccccatacaaattttacaaaagaggaaacttcaatagtttgccactagaatctaaacatgtaattatagatcatgttcattgaactttaactatgtagcagacctcatcctaaacacttacctatatcaattcatttaatattcacaataactttgtgaattaggcataactgtccttcccatctcacagataaagaaaatgaaatacaaagaaatcaagtaattacaggagccaggctgtgaactcaagctcaagccagtatttaaccactgtattatattgactttgaacaggcaggaaggttttggggttttttttaatttctcatttttctcaattgtggattatatgtgtctatatcttggccagctaaagtatgtctttggctcatgatattcagtaaagacataaattctaagttaacttatatctaataaagtatttcttgtttttgtatataataacaatttgactcaatataaattacttgggttaaaatgttcgttgaaaattacatatatttgcaaataatgtgacacatttgaagaattgttttctaacattttaaagttatagaagaaaagaattgtgacagtttgatatttgtttctttgttgatatcctgaatttctatgaaaatgcttttaggctttttaaaaacttttataacttaaagatttcattagaacatatctccggttaattctgtgttttttgtttggtttttgttgttgttttgttttgttttgttttgttttgttttgtaaaatgcacactcaaagctctcttcaactcagaagtatgtcttcagatgagctacctgtattgcatcttttagttttcttccatgtgttttggttttattttgtcctgctttatcaaaaacaactgaaaattttgcttgaacttagattttctgtttgttaggttggttttgaaagagtttctaaggtgttgacctcactgatttgagtttttgtaatgtcaattttatgtgctctgaagcagatttttagttgtaatttggggtttttagtggttttttcttttctccacttctatgtcttttttaatagcttattgtttccttgtctctttttgctgtctcatagaattcatgaattcttgtatttgattatcacttttaaaaataattttctgctgtttccttaaataaacaagttttagatggttgactttttataatcttttggatgatggactctttctttggttttgcagaattttttcacaagtcaagaccaagtttctttctggttattcatctttaaacagagattatttagaactcactatttttgaaaagatgctattttcagctctactgtgtagggctgtcatagtgtttctgcagatatacagatgatatggcttatgctcttttatttaatatgtaaattatgctgataagcccatagcactagcctagagaatgagcaagaacactcatgctcaaatttgcctaatatatattgtttctagacaaaaataataaacgagtctagaatttctagttataaactgaacacatggcaactccacataccctttagttttaaaattgggtggaataagtacctaactcctagtccaatttcctgtatctcacaaacactcatctagtggtttctacttgagataaatactaatcttcttttacaccttattacattctcataacacaccatgctttcatctatgatgacactaatcaaaatagtaatttaaaaggcaatgttgtaattagtagttggatatctatctcctgctttagaatgtaaactctataaaaagtctgggtcttttgttgattttgctttcttattacttttttatacttttcttgaccctaggggcaaaggtatgagatcatactcctcattctgatggctcactatcaatattggtcagttttatttacccatcgatccatccatttatttattctcttttttcttcattccccattcccatttctctcccctaatagccaatattctaataagttttatttgcatacttttttataaaacatagaactcattctgtatcttatttttgttcagcattgttttgaaatttcatccatattgctggatgtatgttacctttgctttgatctgatttatagtcttgtataatatgaaactattacatttacctagcaagctctaactcttcaataacacaaacaatgtactaatgaacttctgtgcatatgaatcctttcatatttgaggaaaagtttatatggaatatatgctcaggagtggctttgatggtcatagtctgtgcatgttctgaatttgccaaaggactgccagatcattctccaagatggttgtctcagtctataacatctacaggaatttgatgagggcacctgtaaccctgccaacacttggcacgattcggctttttaattttcgttaataccatgagtgaaaagtgatgtcagtgttttagtttctgtttctctaacgatatgaatttgggcatcatttcattataaatggttttagagggaggaatgggatgaggaggaggagtggttccttttgtttattaaatgtccattatgtttgcttattttttaatcgagttgctatcttcttcttaattaatcggacttgcttaataatctaattataaatctcttgtcagttttagacactacaaattaaattttctctaccaagctatcatctgatttttgtgaactttttccattcaatcttcagtgaataaaaatctttaattcttattttacaaaatccattctttctttgtctcaatgatcttgctttttggattttgtttggaaggtactttctcatatctatgtcacacaaacttactgtttaatttataattttgcattgacagtatagtaattaagacaagggatactgaaatcacactatttggattcacagtcttggctccttcacttactaatccagtgaatttggataacttaacctttaaataacttttcctttgtgtgtaaaatggggttggtagtactaatgaacccaataagattatggtaagaactgaatgaggtaatacataaataacactgagaaaagtgcctgcctgacacatgaaaaaatgcttatcatcactggcgatcagagaaatgcaaatcaaaaccacaatgagataccatctcacaccagttagaacggcgatcattaaaaagtcaggaaacaacaggtgctggagaggatgtggagaaataggaacacttttacactgttggtgggactgtaaactagttcaaccattgtggaagacagtgtggcaattccttaaggacctagaactagaaataccatttgacccagccatcccattactgggtatatacccaaaggattataaatcatgctgctgtaaagacacatgcacacgtatgtttattgcagcactattcacaatagcaaagacttggaaccaacccaaatgtccaacaatgatagactggattaagaaaatgtggcacatatacaccgtggaatactatgcagccataaaaagggatgagttcatgtcctttgtagggacatggatgaagctggaaaccatcattctcagcaaactatcgcagggaaaaaaaaaccaaacaccacatgttctcactcataggtaggaattgaacaatgagaacacttggacacaggaaggggaacatcacacaccggggcctctcgtggggtggagggagggaggagggatagctttaggagatatacctaatgctaaatgacgagttaatggatgcagcacaccaacatggcacaggtatacatatgtaacacacctgcacgttgtgcacttgtaccctaaaactttaatttaaaaaaagtgcctgcctgtacatactgagcattgtataaatgttgctgttatgataaataacatacgtatatttcagtaagaattcagttttattttttgcatgttatgaatcattttcaataccatatactaagtgactcattaattttctattgttttttgataccacgttcttagttattgacctccaagattgatttggtgtgttaattcgcttaggataatggcctccagcttcatctatgttgttgcaaaggacatggtttttatttttttatggctatgtagtattccatggtatatatgtaccacattttctttatccagcccactgttaatggggcatctgtgctgatcccatgtttttgccattgtggatagtgccacagtgaacatgcaagtgcatgtgtctttttggtaggatgatttctttccatttagtaggatgatttgttttcatttcatatccaatcaaataatgggattgctgagtcatatagcaattctgctttaagttctttgaggaatctccaaactgctttccatagtggcaggactaatttacattcccaccaacagtgtataagcattcccttttttccacaacctcaccaacatctattgttttttttttttactttaataattgtcattctgactagtgtgagatagtatctcactgtggttttgatttgcctttctcttatgttagtgatgatagcatttttttatgtgtttattggccacctgtgtgtcttcttttaagaagtgtctgttcatgtctatggtccattttttcatgggcttatttattttgtttgtttgttgttttgttgtttgtttgtttgtttgtttttgcttgttcaattgtttaagttccttatagattctggatattagatctttgtcggatgcacagtttgtgaatattttttccccttctgtaggttgtctgtttactctgttgatagtttcttttgctgtgcataagctctttagttcaataggtctaatttgtcatgttttggttttgttgcaattgtttttgaggacttagtaataaattcttttccaaggctgatgttgagaagggtatttcctaggtttttttctaggattcttatagtttgaggtcttacatttaaatctttaatccatcttgagttaatttttgtatatagtatataggggtctagtttcattcttctggatatggctggccagttgtctcaataccatttattaaagaaggagtcctttccccactggttatttttgataactttgtcgaatatcagatggatgtaggtgtgtgactttatttctgttttttgttgcttttttttttctcttccactggtctatgtgtctgtttttgtgccagtaccatgctgttttggttactgtagacttatagtatagtttgaagtcaggtaatgagatgcctttggtttggttctttttgcttaggattgctttggctatttgggatctttgtttttcaatatgaatattagcagtttttttccaattatgtgaaaaatgatgttggaaatttgataggaatagcattgaatctatagattgcttttagtaatattgagtcttccaatccatatgcatggactgttatttgtgtcatttatgatgccttttagcagtattctgaagttcttcaatttcacctccttggttatatgtatccctaggtatttttgtgcatgtgcagctattataaatgggattgtattcttgatttctcttagcttcatcattattggtgtatagaaatgttgcttgtttttgtacattgattttgtattctgaaaccttgctaaaattgtttatcagttctcatagtcttttgtcagagtccttagggttttctaactataggatcatattgtcagtgaagagaaataatttgacttattcttttcctatttggatgccttttatttctttatcttgcctaattgctctggctagaacttctgatgctatgttagatagagatgatgagaatgggcatccttgttttcttccagttctcaaggggaatgcttccagtttttgcccatttggtataatgttaactgtgggtttgtcatagatgacacttacgattttaaggaatcttccttactttaaaccaacaacagcaaaaaggacaaagaagggcattacataatggtaaaggattcatatcaacaagaagacttaactatcctaaatatatacacaaataacattggagctcccagattcataaaataagtatttctagaagtacaaaaagacttagccacacaataaaagtgggggacttcaacacttcactgacagatcagtgaggcagaaaactaagaatttttttttttttttttctgaagcagagtattgctctgtcacccaggctggagtgcagtagcacgatctcagctcactgcaacctccgcctcccgggttcaactgattctcctgcctcagcctccctagtagctgagataggcatgtgccaccacaactggctaattatttttttgtgcttttagtagagaaggggtttcatcatgttggccaggctggtctcgaactcctgacctcaggtaatctgcctgcctcggcctcccaaagtgctgggattacagacatgaaccactgtgcctggcctaacaaaggaatcctgaacttaaacttgacacttgaccaactggacttaatagacatctacatgcacccatcaccatagaatatatattctcatcttcacaaggaattaccccaagatcaaccacatgcttggtcataaagcaagtctcaataaactttttaaaaaatcaaaattataccatccatactcttggacaacagtgaaataaaaatagaaatcaataccaaaaagatttctcaaagccacacaattatatgcaaattaattttttctgaatgacttttggataaacaatgaaatcaaggtagaaataaaattatttgaagtaagtgaaaacagagacacaacaaaacaaaatctctgggatgcagcaaaagcagtggtaagaggaaagtttatagttctaaatgcctgcttcaaaaagtcagagagatctcaaattaatgattcagcatcatatctggaagaaccagaaaaacaagacaaaaccaactccaaactagaagaatgaaagaaataactaaaattgagctaaactgaataaaattgagaccaaaaatccataaaaagaatcaatgaaaccaaaaattggttctttaaaaggataaacaggatcaataggctactaactagattaacaatgacaaaaagagaagatctaaataagcacaatcagaaacaacaacagtgacattacaactgatcccacagaaatagacaatatcctcagaaactattatgaacaactctatggacatgaagtagaaaatagggaggaaatttataaattcctggaaacacacaatctcccaagattgaattaggaagaatttgaaacactgaacagaccaacatcaagttccaaaattgaatcagcaaaaaaaaaaaaaaaaaaaaaaaaacacagccctgaactagatagattcacagccaaattccaccagatgtacaaagaagagctagtaccaattctactgaaactattccaaaaattgaaatcaaggaggagggactcctctatgactcattctatgaagccagcatcaccctgatatgaaaacctggcaaagaaacaacaaaaaagaaaactacaggccaacatccctgataaacatagacacaaaaatcctcaacaaaatacaagcaaaccaaactcaacagcacatcaaaaagttaatttaggctgggtgcaatggctcatgcctgtaatcctagcactttggaagaccgaggcaggaggactccttgaacccaggaatttgagaccagcttgggcaacataggaagaccccatctctacaaaaaataattagccaagtatagtgatgtgtgcctgtagcccagctactcagaaggctgaggtgggaggatgacttgagcccaggaggctgaggctgcagcaagccatgttggcaccactgaacttcagactgggcaacagtgcaagaccatgtctcaaaaaaaaaaagttaattgtgatcatgtaggctttatttctgggatgcaagattgttcaacatattcaaatcaataaatgtgattcaccacataaacagaattaaaaaacaaaaaccatatggtcatctcaatagacatggaaaaagtttttgatagaatccaacatccctacatgttttgtttatgtttttttctgtgaaatataacacatacaaaatgcataaaacatgtataaatgtaattccatgagtaactctatgtgaacacccgtattaccacccagttgaaaattaaaccttgctataataatacctaaaatcctcccatgtattacttcctgattccaaaccactaatgtcctctgaaaagtaactatatcctagcttttctgataatcatttccttgcttctctttactttcatcaagtattcccaaattacaagtctcagttttccttttttatactgtaaatgaatggaatcatattttatgcatttcctatgtctagcttctatctttcaacattatgacagtaaggctaccatgtaaatgttgttatagtttattcattttcattgatgtctggtattccattgtatattttatacattttactcttggtggacatttattgtttctagctcaaggctattacaaacagtgctgctgggaaatcttttgtgtatatcctgatgtgcatgcccatcagttcctaagagccacattgccggttaaaggagtattcatatcacctcagtgttatcagatgattccatactgttttcaagaaatgcctgtaatagtttttcaaagctttacctttggtagcttgagtcctaaaacgtaatacatgtagattaaccagtttcttttcttcatcctaaccaaattccccataaaagagatgaattttctcttcagccctccttgactcagctaatttgttattttagaatatggtaattttagtaccccacattcagatatcaaagaaacaaatttgtaattaagtgataaatcaattttttacatggacacccttgatacaaagcttaaatgatgtcctaagagtgctctcgctctctctctctctctctttctctcttcttccttttctccttttttattccctcccccatgtcttatctttagtcatttggtagggaagatgactgccaaaatcacatccaaagtaccatcttcccaccttccaatccatgtgaaaagagacaatctgtcctgcatgttttcataggaaagtcccaaggtggcacatattagcctctctgaatcatgtgctttctctgtcagggttgttcagagggcagagcacctagactgaccacctcatcaaaaccacacacagtggctctgcaaaggaaatgatgcctgcgtgtgtatatgacttgttctcaccaagtaattattttttcacttacgtcttaccttccttgaaggagtctcatatctttgttcccattgtccaacaggatggttagcacataacaagagctaaataaaagtttgttaaatgcattagaaagaagaaatggctctttttacatgctccaatgtaaaagatactttatgagaacccatgttgacataaaggggagatgatttaaaaatacatgaaatgacatcgcattgactggatttttccacatacagtaaatttcatatatattcctatataattattgctgcagaatacatactttttcttattttgctttgtttggaagtggggttttcatgctgtcatggtgagtgaatgttttctaaactgtcacatggggtacttagagaaatggaaactgcagtcctggattctgtgtttcaaacagtgccagatgctgtgaagtcatatgcagatgtctttacatcgacaaaattatagtaacagttgggcttctttgtctgaatatttctgcttagaagggttaagtagcctagcaggcagtggaaactaaaaccttctgttcagctatggggcacaaatgatgaaatcagccacagtggttgctcagttaatgtcctcaaccttgatgcagaagaactgccttgatgaatgtaaaacatgtgcctggtggaagtcagagcacagggcatgctcactgttgactactagagacagtgatatttgcgggtgcaaggctaactctgacctagtggaaagaagtgcagaaccaggccaaatgggaggagtattccaggatcaaggtcagtcatttcccaacatgttctgcaactgaaatgaccatgatgacacggggaaagaatgtaagacctcaagtggcctttggcttgatttacttgcaacttttgtttctaattcaatccacaaagataccattgtgttttatgtacatctgccctttgtccctggaacatcctttcttttccttgtccacctggaaagctcgcagtcataaatcaaatataagcttgcaatgtagctcctctctgaagtcttcccctgtccccctaggcaacttaggtgttccttccactttggattttactgaaccttatgcatgtctttgtggcagctggtatttcattatattataaactacttattatatattaattgtaattgattgttgatatttgactccctagtagacaatgagtgccttaaagcaatagaatttttcttttcatctttgtattgcaatcccaggaacaagataaaacttcataaatattaatgaatagatttattaatgatttcatatagtaccttggaattttctaagtgctttcttatccattacctcatttaataacccaacaatgctgtgtggtacacaaaccacttataattatcaccattttactgattaggaaactgaatcatcaaaatgacacataatttgccagcttcaatagtttatgaatgtcaggattaagctagaaagtaggtctctggcttcagccagagtctatgttgagcctttatttctcccacagactgaagagtcactgcctcaggactaacagatctttaaaatggagctagggcagctagaatgctttcttcaatacttcaatatttgatcttcagctctgtttttaatgcacgacatcttcttctatcttccaactgcactttgaaccttggatgtcagatttctgggtacccatgtcagaatttggcctggatttcttttactgatcttgctgcctacgcaaagcacaatgtcctagtacacgtccctgttactgggaccacttctctctctgaatataccagaggttcctaagtatggcagcccagttattctaccattacactgcagctccacacatttctaactgtattatgaattagcaatcatgataactaatgataataactaatatttctcagtgtttgccttgttccacacatagtattcaataagtactaccttatctgttcctgacgacaaaactcatgacctagaactaatactatcaccattgtacaaagaaggaaattgaggcttagagaagttatgtgacttgtcccaggtgacacagctagtaaatttccaagggaatatgaactaaaaggcatctaatttctgaaagcatgcctttaaccctacaatattggtaaatttctgtaaaatcaaccgttatacttggtaaatgaatgaacatgtgcacagtgtgactggggaaagaaagatgatgttgtacacttgtcacatgataggtgaggtactcgatgaatactgttggaataacattttcatgcccaagctctaatttaactaattttataaaactgagaatgttttagcaactccgtctacatgccctggagaaaaatacttgtttttaaatattctaaagcactcaaaagttttcaagatcatgaaactttatccatctggcttagtggaggatttgataagaaatatagctgctttccaaaggatatactcaatgattctttcattaaaattaattcccaacttactgcatctaaatatagactttattttaaacaactactaaatgcaaatggttaaaatcatgttaatcttctgatatatcatctgatacttgcacttgtgatgtttcaagactttggatgaagcccaaaatgcctaccatgatgattctcaaggcttttgatttctgatcgctgctctcctcctctcactctctctccacttgagctcttcaaattctccaaaatattacactccattttttgtccaggacttacatgtattatttcttctttccccactattttcctggctctcctcaactcatatatcaaatcttgaagtaaaagtcagtttctcagagatcccctctcctgagccctcactgtaagttgtttccccattatgtttccatagcatcctgctgtccttccaaacactcatagcactcataaaaacttttccagggttcatcttctgccatctttcactgtgtcttacacatgatgggtgctcaatgaatatttgataaatgaatgaatgaaggcattcctgtgttaaagccagtgttgtgtcaatagccattgtcacaataagataatatgaaagcaagtatgtcttggcttagtgagtgtgtttggcatttggaatcagatacgtgcttcctcgaggacctgtctcagttgccatgatcatataaggtacattgggctgaatgtgataagaaaatcaactcaaactaacttaaaacaaaattcattggctcacatagtaggaagactagaaggaggtgtggactttcagggaatttgatccaatggctgttctctattatcttacctctcagacaatatctccagtccttttccattgtggttatgggatgatgtcagtagcaattaagactacatgcttcttcaggcatgtccagtgagaaatgctgagagactctttctcttctgaaattcttataaaagtttggaaaaaggaaaaacacttgttttagaaataactaggctcaattccttctgtaccttattggctcaaatccaactatgtgtccgtttctcaaatatttactgtcatttcggaagctttattggcttagtccttggtttctgagtcaatcattgatgtagataatgggtttatcatgactggtttcctgggtcttcttctgggccatcacattgctgaattctaaatggccagagattagggcaaaaggtccaccactatcatcttctcaaaactgcaccaatattatgctcatgccctttgatttttttgaaaaggctaaacatcaaaattcaatcagatgctgtatcaaaatctaaattcattctaggaggaaagtagaaattttccttattagggagaagaagtatatggaacatttgtgtccccacatcttccttgttcagacagagagagaagtggcaagcaggacacaaagaagcaaatgaggcatcatgagtctccagatacataacttcttccattttgagagcaaattctggcacccgtctcatatttaaaagcacacatttagcacctgcaggatggagggatcttgactggtctctcagggtgctggaattaaaataaagattattgaagtttcatttacagaacaaatgattagcattacgttttaaggagcatgtaactaatggttcttcccctgctaaggtattacttttcatcacttctttgtgatcttctgaagatctaaatgcactctaaggtaaagaatggtcttctttttctgagaatgatattttttttttcatttgggactatagcattcttttctgttttgtcctccatatgtcctcataaatataattctggcactggaattcagacagcacttcccagcacttgcatactcagcattaggccactaagatatgagatcatgtaagctctgtgccatttaatcactttatattcctttaacaaatgagtattgagtgcctactatgtgtgagacactgtgccaggtgctttcagctgcagatgagatgtacatcttgtctttgaagagcttacaatagcatgaggagcaaaactgattaaagatacaaggaatcgtgcaataaatgcaaattgtatggtgccgcaaaataaatactaaagacagtgatttgatgagagggtgcttgcatggttgacttatagtggacagggtttgattttggctgagcagagtcagcatttcaaaaacagaacagaaggaaaaattaaagaaagtaggcttcagtaaggcgttcagtaaggaaatactgaatgtagacaaggctataaaaaaaaatgaagatccatgctgtggaataaagcattctcaacttggaaagaaactctaagccagattacagagggcctagaatgctctattttaaaaatctgagtgtttttctggaggagtaggtagccccagaaaatttggggactatatttagataataaaaggatgaaagttacgtgaaagttatatgaaaggaaaatccctgtgtgtgatgaaacctagccaggagagagtcaagattcatctattgtcatagtgcagctttgtcaaggaaaggatttgactactgatgtagtaaagggactattcagtggtaaaggaagagaagaatctcacaacaggatttaaatagttagcttacatcactgagttatccttactgccattaacgcagggacatgaaagtgggtgtcaaaagagttcccaagcctggcttcacattagaatcatctgcagagtttcaaaaaatagcaatgtttaggcctcccaaataattagtcttgagtggggcctgggtgattggtagtttataaaagcaaactgcatcaagggttaagattcactgagatagatgatggtgggttcagtttctgtgaaaatcctctcctattgcaggtatattttattgggattttttagagggagggaggcaggaacagaatgaaataaatgttctgcttctgtcgtggttggtggagttcaggagcttgataactgctcccctgttgtgaagcatgttacatagctccaatccttgatcctgacttttaaaaatacaatccagcacaagcagtgtgctgttgtttttcaaagaaatttacacatagcccactagtcacgtctgtattctaaacttacagaacattttctcactcaaaggattgttcatttgcttcttctttgttaaaacaaaaaaaagaaagaaagaaagaaaaagaaaaatagattatgtcttcatttgtttacaggaaaaaagacaatgtaaaattatagtcatcaggtgtattaaacatgaataatgttaagtattagtccaaagtggatggtttttatttttcttttttctttccttgaagaaaaatcactttgtgctttatatggataaacatcaggaggtgatagactttattcatggctgtttctctgcataaatgctgtattcttcaagaaaaatatttctaatcaagagttttatccctttcactcaccccacactctttgttcacactgggaggtcagcaccttatgtttctgacattgtaatttattgctgctggaaagattgagcatttgtataggatttccaccataattcagctttgttgcaaagtcttaccaagtataacttcttaagaatactttctaaaggatacttgatggaattcaaaaatggccagatatatttggactcagcaaatgggtataaatataaatagtatggagacagatttaatgtaaaataaggtgtgtgtgtatatgcatggatatgcaaatgaatgctatatgtaggtcgaacgcatgagtttcttttcttctttagcaaaggacagttacatttaagatgatttaatgagttagcactatatatgttacaggagttagatgtgtgtgaaagactttttttaattaaaaggcatacattttagatttcaaattccgatgtttcaaaatgtgacaaagaattttaaagacttctttttgccttgtgttttgaaaataagcttctatggaagataataataaaaaaataaaaaataaaaaataaaaaacagaaatagcctctcagaggaagcctcattctgtgaaaggctcaagggaagcttataacgaagagcacaccatagagggaactcaggaaagggcacttccatttccctgagagcagagcatttatgctggtgattgtcttccaaatgagctctccccctgtcctttaccaattattgatagctgtgataccagaataattgagtctacgagcttatagtctgagcacaaagggacacctctgagtaggactatctctatctatccaagcagatggtatctgaagatctcctgttaagaagacagcctatctcctgtctccaggaatccataagtaacctttactttcaaggctttctctcaaatgtttcaacaaacccagccaactttttcatattctgacctcactggagctaaagaacagctggcctacattttcctaatattagctcttcatattttttaagagtattattatatcccacttcagctctctctcttccagaccaaataatgtaaactctttaatcttatgtcaagtttcctctccatcaatttattgcttttttcttagatgctgcctaatttttcaatatcattttaaaagtacaacagcctggagtggacagacatttcacaagactacagaagatgaatctgagaaagaacatggttgtctatattttgcatctgtagtgataaccaactttggtagatttctttaagataagctatagtttttgcacagattattttcaatatttactcaaattgtttatttttcttcaatgcaatctttacattgagaccttgagtccattgtttttatctacattgtatacctaaagagaaaaccatgatcatgtatctaaatgcccaagaaaacagaaagcaatgaaatcaaaactggacccagggacttctttgcatacaaactaatatgttggttttgaaagtcatcctgttacttctcattggaacagctctccacagcccaagcccactactcaggctctttagctgagtggttttttgtttttgctgttttgcattattgtactatgcctttttttttccatgtttaccactttcttctttctctcttttttgacttttaccttagaattgtggagaatatgcacaggtttgttacaaaggtatattttgtgatgctgaagtttgggatgtgattgaaattgtaacccaggtagtaagcataatacccaataggtaggttttcagcccttgcctcctgcctttctcccatgtagtagtccccagcgtcttttgctcctttttttatgttcatgtgtacttagtgattaactcccacctataagtgagaacatgtagtatttggttttctgtttctgctttagttcacttaggataatggccttaagctgcatgcatgttgctgcaaagaatatgattttgttctttttaatgtctgcattgtattccatgatatatatgtactgcattttctttagccagtccattgtgaatgggtgcctggattgattccaagtttttcctattgtgaatagcactgcaatgaacatatgagtgcatgtgtccttttggtagaatgatttcttttactttgggtatataactagtaacgggattcctgggttgaattatagcactgttttaagttctctaagaaatccccaaactgctttccgcagtggcaggactaattacattcccaccagtgtataagtgtccccttttctttgcagccttgccaatatctgttatttttcactttttaataaaagccattctgactggtgtgagatggcatatcattgtggttttgatttgcatttctctgatgattagtgatgtggaacattttttcatatgtttgtgggttgcttgtatgtcttctgttaagaagtgtctgttcatatcttttgcctatattttcactgggttatttgtttttgactttttgatttatttaagttccttatacattctggatattagacctttgaagagatgcatagtttgtgaacatcttctcccactctgtaggttgtctgtttactcccttgataatttctcttgctgtgcagaagctctttaattaggtccccacttatcaatttttgtttttgttgccattgcttttgagggcttagctacaaattctttgccaaggctgatatcaagaagggtatttatttcctaggttctgtgtgaagatgtttatagtttgaggtctttaatccatccttagttaatttttgctcataatgataggtagagatccagtttcattcttctgcatatggatagccattcttctgcatatggacagccagttatctatctgggcatttctcatttctcagctgtagcgacccttctcctgggatatacctttctgaaactccacatttcactcacacttttgcacaaatgtgccacaggaaactgcttagtcacccttgttatgagttcccatagcatcctgcacatctcctacagtaaccaaaagcatatattttatctaaaaaaaaaaactattctaaaatataattcgttgctttatattataaaattgttggaatggaggaacaagataaacagccacagatttctgggcctgcaaacattttattgcagtaggtataacctaacatatactgaaagttgcttggacagaagccagtgaaagatcaattgattcttctttgttatgctttcattgcttatatgaatcttgggacttcaggttatatcatattgagagtgagcaaaaaaaattcttcaactgtttaaattccttttctttctttcacctttttattattttttaccacatgatcacttctacctagaattcaatctttcatgaaaatcttaatttttcaataccgttaagagccaaataaataatattttttcttcctgtaaagatacctctgccccctgcttgattggttacctacaacctgttgaattagttttcttgaagctcctggattatagaatctccatctttaccatttaaagttattcggaagccactgggatcaaagaaatcttcatttccccatgctccttaatttgggataatgtgtgactatgtgtatctacgcacatgttaaaatcagcccaacatttatagttatgtttagttgatatggtttaagggtaaaggtaaaacatacagattgtgttgctaattcaagaaaaattgccctgtgcattcctttatagaatagtgcaaataaaatgcagtacgttgatgacaattacttatattaatatgctgaatttttatctgtgtgttccaaggtccatgagatttgacatgtaagaacatacattaattatcagtttgtttcttcaacaaatatctattagaggttggtaattaatgtgtagaagtgaacaaaacaaagcaaaaaagtaagcaaaacaaagtccctgccctcatgaaactcacattattttagtgggggaggcaattcggaattatatacagagaacattaatcagagagaaataaggtaaatagttatagtcaagtaagggaagactactctatcatatatatttttatatatgtgtatatatattatgtatattcatgaatggcctttcagaaatcaattgagcagagaccgaagaatgaattagggaagcagcattgtacaccatagtaagttctttggaattcatttcaagtgtggtttagaaacgcactggagaattttgagcaggagaaaattttcactgctgtgtgaatggagagtgcaggacaaatgtggaattagagaaacaaaatgattcttgtcattttccacacaagaacttggggtgaacttgggtgctgtggtgatagtgttgggaagttagaccctggatgtactgtatctgaaagtaaatcagacaagattccctaactgcctgaatgaaagaatggagtccagaataatttaaaggtttctggcctgagtaactgggtgactagcagtgcaataaagaacattagacataggagatgggagatggaagatcaagaatttggttgtgatatgctgaacgtaaaacagctactaggtaacaaagtagaaaaatcaagtatattgtcagctacatgaatctagatttcagtagaaagttcagtgcttgaagttaacagcctacagattatattggcttcaattagataacctacatgttaaggaggaaagagaagaaagactgaagcctgagccctggcacatttctatgtttacgggactgaaaaaaaaaaaaaaaaaaggaggatccagcagagaaataattaagaaggagtggtccatgtggtaagaaaaaaaatagagaagtgtagtataccagaaagacagtggaaaactgcttcaagtagttgatgtctaccattaattgctttctgtttctcctcttcctctctctctctctcttacacacacacacacacacactctttttcctaaacaaatgccttaacacaaccacataaacttttagccttaaaataagaaagataatattcacattatgtaaaactctttacttactaaaaggattccaaaaacatatctttaaataatgaactcttccagcttatcccaaataggattcaactatcaaaacgtttctgaaatatttttctattgtaaagcatgctggaactctgaaatagccttgcacagtatatttgccgtggtcagaaactggcaataaaatctgaacaagtagagtaggtagacccaggttctagtcttggctctgacatgtagtagcttaaccattcaactaacctctctggccttagtgttcacatttctggaaggttcagagtgggtcaggaatcgctcttagattctttcaagctctatttaaaaaaaaaaaaagaaaaacataattctaagtgttaatagtgtataggattctgggaagttctatctattggaaaaaatggatacttgctccattatatacagagtcctatatattattgtatacaatgttatgacatctgaaaatatgttttcattacagagagctctgttatttgagaaaccttcttaacccagtgctatgtgaacttgttggataaactgcatcatgcttttttttttttttcagaaggtgactgaattggtgcatataagcagatggttttgccccacagctttcttctcaactggactcacatacccttctccatatgttcctaaattaaaatgttggatgtcaattgtgaggaatatgttggaaaattttaactttgcacttaaaattttgcccttgcattttctctatgacctatctcacaaccatgcataatttctaaattacaaccctgattccagaaattggcaggcagtaggtagagatacttagtaggttgttccccctaccccatctagtgagaggagtggcagacaacattagaaactaacaaatttagatttgcattcccttagtattttcatgttggccaagtcacttgtaaatagacattttctcacttgtaaaatagacattccaatacctattttgtagaattgcaacacgattgatgaattaacatgggcaaagcacctaacacaatatttcaaacatgatagacaatctccctgtactactctcccttctgtgccttcttcattcttgaatgcagggaataggcaaataaaagtaactgaagtgagcagataaaatttctatttgtcttctggatcagcattttcatttcattcataactgtaggcaacaatcaaaattcaaattggaccgagtttatgctataattttaaaaagcaacacgtagaagacaacaatcccacaatgtttcaattttgttgtgctaaatacttagatagacaaaatattttcagtagcagttgaattattaaataaagaatattaagaacaatagcatgtttatgtggatgagatgtcataatgagaaccaaacctcttgcatttggtgacctcaatgtatttaaatttgtaacctcaacatcacattagcaaaacgttttgcttttgtaatctgatgcatgacttcaaaagttagcgagtttctagggacctttcaaaggcgttatgtaaatggaagtgattattatttatgactaatccagctgcatttttactgtttttcctactaagggttttcatgcagattaagctatgaaccaagcagtaaagatgacactgtgttcatgtaagtgaaaggaagttatttttaggtaaaatgttgtctttaaaaataataagacaatatttcatatcataaattatttctaccactcttcacatgttttatctaccaattagttttatttcatgatagaaacaatacttttttcttttttttctttttttgagatggagtctcgctctgttgcccaggctggagtgcaatggcatgatcttggctcactgcaccctccacctcccgggttcaagcgattctcctgcctcagcctcctgagtagctgggattacaggtgcccgccactacacccagctaatttttgtatttttagaagagacggggtttcaccatgttagtcaggctggtctcaaactcctaaactcaggtgatctgcctgccaaagtgctgggactacaggcgtgagccaccacacctggccaatagaaacaaatcttactatactattcttacaaccgtgttcagactgagaaaaaaataactgggaacacttgtctagtcaatcttctgtggcctaaattacttctatcacatcatctgttaccttccaaatattccagaattatggcttcatccatccttttgtgtttcttgagtcactcactccataagtaggaagcatctaatctagcaggaattgtgacggataaaaaaattacgtgtcctattattaaaagatatcatattttataacttaatttgtatcactacggaggtattctataaagtaaatctgaaaatgtcccactcttaaaattaaataacagctatgtcgtttcattgtgtgtgtgtgtgtatatatatatataaatatatataaatatatataaatatatatataaatatatatataaatatatatatataaatatatatataaatatatatataaatatatatatatgtaaatatatatataaatatatatatatgtaaatatatatataaatatatatatatatatattttaaacccaatggacataccaataacaacctaacaaccaataaatactattgaagatgcatgggcatagtggttaagagcccaaactcagctgggagcggtggctcacgccggtaatcccagcactttgggaggctgaggcaggcagatcacaaggtcaagagatggagactatcctggccaacatggtgaaaccccatccttactaaaaatacaaacattagctgggtgtggtggcatgcacctgtagtcccagctactcgggaaactgaggcaggagaatcgctcgaacccaggaggcagaggttgcagtgagcagagatcacaccactgcactccagcctggcgacagagtgagactccgtctcaaaaaaaaaaaaaaaaagagagagagagcccagactctgggtataaggtctggacataacttactagtgtatgatgttaggcaacacactgaacctcgatgcaatgatactagtaataccaattcgtgatgtatttgtgaggattagatgagccaataaaaggagaatacttaaaatagtgtctggcacattttgtttcataaatataagctatcaccattattttgccaaaaatacgtctgttgtatcctgtcacagtagtaatcttttcttgagatccatggaaggaatacagaacatgtacataaagcaaaccaaaaatgaattatttgctgagatattgtaccacctacccatcaacagaaacaaaacaaaacaaaacaaaagcacagaactctaggagttcatctggaccctaagaagaatttatttcctatccaagggcagagtgaatgtccttgaaacataggaggatgaacatcactactactggttactttttctaaggctaaacctaacactcagaccttaccatagtaacttttttttttcttttttctttttttttttttttttgagacagagtctcgctctgtcatccaggctggaattcagtggcatgatctcagctcacagcaagctctgcctcccgggttcagaagattctcctgcctcagtctcccgaatagctgggactacaggtgcacaccactatgcccagctaactttttgtatttttagtagagacaggttttcaccatgttagccaggatggtcttgatctcctgacctcatgatccacccaccttggcctcccaaagtgctaggattacaggcgtgagccaccacgcccaacctaccatagtaatttttaaaaataaaataaagctgcattgaaattaggaaagagtagaagagaataacaaataatataataaagaacatttaaaggagtaagagataaataaaaccggaggaagatcgagacacacacacaaaaaaaaaaaaagaaaagaaaaaaaaatacagagagacagagatagaaagcttgagaaagaaaaaaaaagataggcagaaataggaagagagatgcagaggcagacagacaataaagagacacagttagagacagaaagaaagagaccaatagaaaaagagagagacttaagaaataggatagagacaaagagaaaattatgaaaatagaaattatggggggaaaaaaagggacaaagggtcacagtaattgagcaagagacagggatgagaagaccctgcatgatactttccttctccaggctcctgaaagagagcaacctggggatctgttaacatttgactctaaaggaagataaaagaaaacaaagagactgcactccctggtccttggcccttacatcagacaaagaagaatcccccattagcagtactccacttccttggggatagaagaatgcaagagtgttgaacagagacctgtgcgcttctgctaaagcccatcagctacagctaccaagagtatgctaactaataagggattttcatatatcacttaatcctttcccaggtccagtattattaacctcgtattactcccataaataaaatgaggctggtagaggtaaagtaactttccaagcacacaaagaagagccagtactccaacaaaaccctcgaaacctatatactgctgcctccttggggtggtgggggggtggtctccgttttaagacttttgattaattttatctcaagccatgatgactactatcagttttctcatagaatacaaactgacactaaaatgaaggaacaaaaaaacaagtaattgtcaatgtaaaaatttaggaatggctatcaagtgatgttaataactggttatctttttcttgaacacaaatgctcttggttaccattttatattgtgtaatagacaggtatgtatttacattttgctagcaaggatgttcctagttttgtatgagtgaattaaatcaatatctcatgctctttctacaagagtaacatggcttaggaggactttcctaggggaacaagtttgagaaaccctgaagtgtttctaggtgaggagaatatattacaggaattaagaacttgaatatgactttaatgtaaacctgtaattgttgactggcttatttaaggaaggtttcctgaaggaattgggttttaaactgagacttgaaggaagtatagaatttggtttagctgatggaaaggaggatgcatcttagctagatgggactgtatatccaaaggtacacaggcaaagatgagtgtggtatgtatagatgctagtgtagatggaattgtggaatccattaccaaataatcaatgataaaacaggaaaaagacagtgaggtaaactgagagaggccttgaataccagggtgtagagcatgaatctgaatcaattgccagtgaagggtttattgtgtcttttttcaagagagtatcataaagatactctgtaggagtatctttatggaatgctttaggaggattctagcgagcaagatgaattgcagtagatagccaggtgcaaagtaataaagtgaggacagcagtagaaatgaagaggaagaaaagaatttgaaatagagtaaaaacggaaaagtgaaaagatgaacaagtcttggtgactgctctgttacaggcgggaggtgagagtcaatgaaggaaagagatttttttccaaatatatattttattctaaataaagaaacctattaataattcaggccttaagtgggagattcacaagtatctatgccttccagttccatcataattaagttaccatgaatgattttctgtttgataaattcaagagagattacagtaacacaaaccgatccagagttcaaccttaaaatttgatttagcaaagtaaattgtttccctgattttagattgctgtggttttctttccctttttgtaattttctttttaaaaaatttttaaattttcatgagtacatagtaagtacatatgtttatgggggacataagatattttgagaggtatacaatgtgtcataatcacatcagagtaaagggggtatctaccacctgaagcatttatcatttctttgtgttacgaacattccaattgtattatactccctcaattatttgaaaatgtacaacaaattatcgctgactgtagtcattctggtgtgctatcaaatactagatcttattaattctatctaagtatatttttgtacccattaatcatccttatttcaccccaaccccactattcttcccagcctctggtaaccgtcatcctatctccatgaatttaattgttttaacttttacctctcacaaatgagtgtgaacatgcaaaatgtatctttctgtggcaggcttatttcacataatataatgttgtttagttccatccttgttgcaaatgacaggatctcattctcatttatggctgaatagtacttcatggcgtatatgtacgacattttctttatccattcatctgtcgatggacacgtaggttgcttccaaatcttggatattttgtgtagtgctgcagtaaacatgggagtgcagatatttctttgatatactgatttcctttctttggagtatatacttagcactggaattgctggatcatatgatagttctatgtttaattttttcaggaatctccatactgttgtccctagtgagtatactaatttacaatcataccagcagtgtatgagcattcccctttctccacatcctcgccagcattcactattgcctgtattttggataaaagccattttaactggagtgagatgatatctcattgtagtgttgatttacatttctctgatgatcagtgatgttgagcatctttccatattcctttttgccatttgtgtctttttttgagaaccacctattcagatcttttgcccatttttgaatcagattactagatttttttttcctacttagttgtttgagctccttacatattctggttattaatccttttcagatgaatagtttgcaaatgttttctcccattccatgtgttgtctcttcattttgttgattgttccctttgctgtgcagaagctttttaatgtgatgtgatcctagttgcccttttttgttttggttgcttgtgcttttggagtattaatcaagaaatctttactcagtccaatgtctttgagtttcttccattttttttagtggtttcatagtttgaagtcttagatttaagtttttaaccaatttagatttgatttttttaatggcaagagatagggttctagtttcattcttctgcatgtggatatctagttttcccagaaccatttattctgggaaataatctggaaaataatttattatttcccagaataaatggttaaaaataaattattaaatataattggttaaaaaatcaataaataaaataaataaaattattaaaaataatttattatttattgaagaaactgtcctttccacagtgtatgttcttggcaccgttgtcaaaaataagttcactgtagatgtatggatttatttctgggttctctgttctgttccattgacctatttgtctctttttatctcagaaccatgctgttttggctagtatagctctgtagtataatttgaagtcaggttatttgattcttctaattttcttctttttgctcagggtaggtttggctactctgagtcttttgtgttccataaaaattttaggattatttttctatttctatgaagaatataattggtattttgatagagattgaatctttagattgttttgggtagtatggacattttaacaacattgatactttcaatccatgaacatagaatatctttccattttttgtgtcctcttcagtttcttgcatcagcattttatagttttcattgtagagatttttcatttctttggttaattcctacatattttatttgtaactgttgtaaataaggttactttcttgatttctttttcagattatttgctattggcatatagaagtgctactaatttttgcatgttgattttctatcctgcaactttactgaatttgtttatcaatctaaacttatttaataattttttggtggagtctttaggtttctccaagtgtaagataataccatctgcaaacaaggataatttggcttcttctgcaaagaaattttttttaaaaaattgtgactgaggaattatttataataaagctgaagcccagaattcaaataaacaagctgatcaagaacaagcatagaaaggaaatcagagtcatccaagcccattgcattctgatgtttttttcttccctttcaaaaaaaaaattagctttgacccctgtatgttgttgtcatgtttaatcaaattggaagtcttttaataactgcaatggaatttcttaccttgccttcctccagcgttaacccttaactgctgttattttaatttctctttgagtaggattttttccctggccacactcagtgaagtgtttgatctcatcactaactgcaagtccagttgctgatgaagttcattttgttttcctctctcctgtgcaccagatctaattgtaatggccatgtcaactacgaggtgaaacagtacacctcatcacgtaaaacgggaagcagtggaactggccaaaagtgataacttgcatgttttttattttagaacagcttaataaaagaatttaaacctaacaattgcaccagaaaaaagtatattgttaaagtgcttgctagttacaagatgatagacaggggggcaaaaaaaagaaaaaaatagttgctggcaatgggtaaagtatcgaccagactctaatttcagcaaatgatcaaaatcatgctagcaggttgcattaagacctttattataggccaggcgcagtggctcacgcctgtaattccagcactttggaaggctgaggcagatggatcacctgaggtcatgaattggagaccagcctagccaacatggtgaaaccccatctctagtaaaaatacaaaaattagctgggcatggtagtgggcgcctgtaatcccagctacttgggaggctgaggcaagagaatcgcttgaacccgggaggcggaggttgcagtgagccaagacggtgccattgcactccagcctaggcaaaaagagtgtaactccatctcaaaacaaacaaacaaacaaacaaacaaacaagacctttattatctgttttacgttaaccaactacttaaaagcccttgatgaaagtcgtatttttgctggatttttgtgagatctgtttcagccactttaactcactgacagctttctctcaaagttgttttaactttgtgaaatataatatttttatttttcatggatgtagtactttaaatttacatgtgcatatttaaactccacccaacaatactccaaggaactatttccttgtcttataaaaaaggaaagtaggctattaagtgaggttaagttacttacccaaggtctcacagctaggattagtggagccaggacccatatactgctctttttctgagaaatatttttaaaatcactatatatatacacacacacatatgttataaaattatatacatacaattcaaaattatatatagtgtatatgtgtatttcacatacgtgtgtaattttgttgataaactgcctgaaactagttgcaaatacactcctcttgtttagtaaagcttttactttagtgttttagtaagcattttagtaaatgcttccttattgatttcacaaggttgaggagatacatttacccatttttaaattttattttactttttaaacttgattttagaataatagatgtgtttatgagcaaagagagcataaagttcatttacctgacttggtgggagggtcaggaaaaatatcacaaatgatttcttgagatgggtttatcaggagttcctgatgggttattactgctgtgccatgataatgtctaaatcttcaagatggaagccatgcctttagtctataagcattcatttcaatttcttgctttgaactaagtcttttaagtggtgcaacttgggctcaaggcatgaaaaatctaggcataaaatgagtctgaaaggtatggttggccttgtgaacatcatcatcatcatcatcatcatcatcatcactaatgttttgcaatggtagttttgagaagagaataggatctacccaaggaacagtactgaaaggggtagtgaagtcaaatgtatttcagagaattattggcttgggaaagatggagagtgtctccaaccagcaggtcaaccattacattagaaagttcccaggtgggaggtaaaattcctaatttagggtcagatattgatgtattaggtataacctttttaagagatgtgcaggctgggtgcggtggctcacacctgtaatcccagtactttgggaggccaagggcaggtggatcacctgaggtcaggagttcaaaaccagcctggccaacatggtgaaaccctgtctctattaaaaataccaaaaaaaaaaaaaaaaagctgggagtggtgataggagcctgtaatcccagcttctcgggaggctgaggcaggagaatcacttgaacccaggaggcagaggttgcagtgggccaagattgcgccactgcactccagcctgggtgacagaggaagactccatctcaaaaaaaaaaaaaaaaaaaaggagagagagagagagagatgtgtgaaatgccttagtcaatttagtcttctggggaaagaatttagcaggtgcaaacacggtatcagggattgaaccatgtagcctgaagactgagttcagagcctctcaggtcttgacagactgaaatataggacattctacagtctgaaaacctttgccttcacaagcatgtaagtcttcttttttttttttccaaacttatttgtagttaaatacagaaataatctacaattaaaatgataatatttgaacctattctaattttattccttgctactctggttaaaaaaagattaactgagtttaaagagaccaaaaatatacatgttaatttatgtttttctaaagaaaactttagttttgaaaaataaataaataaaaaataaagaataaataaagagtttaagaaaactatcaccaagtacaacactaagtgaacatccatgtctgtattatcatcagtatttattacattgatttgctttagtttctatttaacctgttcaaatagtttaacactttagaaggaaagataaaaatatccttagctgtctcccaaaaccctttataaaaggaaagaaatagttaaagatattctttttcagattgccttttaagttagatttggaaagatttgcagtgcagagcacatttggaaataagctgatgtgtgtgtgtgtgttatgtatatatcaacatacacatagatgaaaagctaaaataaatattgtctgcagcaatgctatacattttatttacatagttctttggtggagaaaaaataatactttattctaataaattatagagtcacagtaaatgttacagaactttgtatctttcaaaatgaagttaagagtatgcatctgtctgtctgtatgttttatgtacttattccccatctcaatccaaaaagactttagagtgattccagagtctttaaaaatgttctaggtattttcttccttgcaagcaattcagaacatagaatttaaatgagctgttcaaataaacatcagtggtagtaatggaaagtatctccattctaagggggtgagaaagagtttcagtggcaataaacaatagacttaaattatcagcatgaataatatgacattatcattctcattaagagattctgaaagaccttgcggtattctaaatccttaatcagataatgtacattcaaaattcaattacatagtataaaaaataaataaaacatccgatgtccaggaatccttaacattaacatacttcagtaattttagggcaggactatgagtgccagcaagctcagacagacagacagcttttacgtaatggaactgagctggacaaatgctgagcatataattattacatggcaatgaagggaagagggcatttgaacttgtcttaattaatatgctaactaagctaatgtctttactgaaagcttagggaagcttagctcaaatttgctttgtagaaaatgtgtccacaaagacagtgtcttggggaaaggttagaatcttcagagtaatggtactgactttttttttttcttggcctcttagtggaccctttgtactaaaagaatttgttccctaagaaaggtcaccaggagccttcatttgtgtccttctattaaatgctatcagattgaacagtggcattttaccgacctgcaattatgaggaggtgtgaacctaaatactctatgtgctatactaaatattatggtaaatgtattcccaaaccagaaatcaaggcacacaccctgacaagctcaaagatgctcaggagccagcaaggcggattaatggggtatattttggccgtatgattgctatatttattatgtgattatatgtcacatctcttacattaaatggcattttcactcagctcagaaaccgtagctgtgttttgaattcatttctgtcatcttgtgttctctcctcttctctcttctccctcctctcttctcatctcctctcttctcctcttctcccctctctgtttctctcccctaaaatccaatcaattgccaactcctatagataatgcacttttaatagctctaccatccacatacttcacagcatcttgccatcaacaaattggttaccctgtacttttgtaaattattacaaaacctccttgcctacagtagttccttttgcaatacttcatgttattaaaattgttcatttgtctgcctcccttttctaaactgtaaacttgttgagaaccatataaaactaggtctatttagtaagactaaattgtatttattttctagtgccatcacagaaattgacacatagtgggaactcaggaataaatgaataaaagcagattgcatattgacctaattttcagtgaaaatacatatttcagtttatactttgaatcagggaatcagttaacaaaatgtagccacaagattcttgaccctttaattctcctctctgagtgttctaaaataataatggatagaataaaatgccaaagattaaagaaaagcacacagttgtttaattgtaagcttttgtaagaaggaggaggaaggctccaaagttcaagcatttgtatattgcactttgaatcttgaatgatgagcaagggtgaaaaagtcaaggttagagaaaaacattccaagctgcaatgcaaagctgtagaggtgaaaaggaatagggcctctctgagggactaagattgctaaaatgctagactgcggggtgcacagaggagagaatggagaggcatgatgaacaacattggaactgatttatgacagtcatccaagtgttttctttctgggtgaactagagcacttatgaatgcagattataggtaatttgaaaccctaatctctgcttattttcaccatactcaactgtgattctgaaaatgtggctttataagaaagggaatctgatgtgaactgatgtgaaattaaacatttctctgtatgtgactaactgtaaatcccatgcacgttctttgattcctgactgtcttatctatattttcatgcctcctgtgatgctcatcaggtgataatagtaatgtcaccgtgactgtctcaaattgtttggagactttttaagaaaacgttactcaacacaatatagctaatcaacatttttctcaggtagtcaatacattatgatgcggtaaaaaaactaccatttctattctctaatattagaaggaacacacgccatcagaaagtggtaatgtctgtaacatctatccaaatactttatttcttacttgttaccaaaaacaaataaaccaaaaaagtgctcctcttactagatgagttgataagaatggattagtaagtaaaatccaaattactcagtaatattattatttttctattgcatttgattcatgtaaatctcaaagtgaattctgtataagaaaccattttgaattatcccatgttcaccatataaacctttatcctttcaatatctagcaatacatttatgatagccaaaatccagtaagaaaacagaatcactcagtggtagaacaggcttataaaattaagccaatgatatcaaatgattacgaatgttttaccacaggcaaactaagcttagcattttcattcctatgtagtgattgtttctattccctgtaaatagtcagttgaagtttccagttcctcaaagcaaggctgccttagagatgaactactgaaaactaaaccaattatagttgctgcatatagcaaacactaaatcgcttgtctttcacaataaggattgggtagctcaaaaattagatgaagttatttttcatcttctttttttttttttttttttttttggaggcagggtcttgctctgttgcctaggctggagtgcagtggtgcaatctaggctcactgccgcaacctctgcctcccaggctcaagcaatcctcccacctcgcaccaccccctgccaacccccaggagctggaactacaggcatatgccaccacacctggctaatctttgtattttttgtagagatggggtgttcctacgttgcccaggctggtctcaaacccctgagctcaagcgatccacttacctcagtcacccaaagtgctgggattacaggcatgagccacagcacctggacctgaagttctctttctctcaatcttccatcaattgatttgaagatgtcttctgttatccgagataatgtgtcagagtagaggaaacaaacacgtctttggaggttgatggaaaaaatgtcaagccatgtagccaagagcaccctagcccccaccaaagctatattaaaactgaggaaaaaggttcaagattcacttcatgcatgggacttccagcaatatttggagacacaaggattgtgaatctttttcaaattggtgatgtaaccccaaaaggaaactgtatactcactcttggatggaaagggaaagggggattatgagaagagaatgaaattactcatagtaagaatcactatcctgttctttggaaggccttttgaaaaatatctttttctgctttctcatttcatactgcattaagcctcatgtaatttcccactgtggggggccttccccagtgaagcaaactgcacacgttcagatgccttctcctccagggcttctagtaaagataaaactagttatgtgaatgaagcattcattcgttaggcttcctcgggatctatttagtatgtttgtgaaggcatgaaaaaaggtagtaagtagactttctctttggatgatattttaagaatctcttgtttgctggtattttaaatccccaaagcacttactttaaaggtaggcaccacagtgttttctatgtacagatctttcgattcactggttaaatttatccttaaggttgtattgtttgtttgtttgttcttgagatgctattgtaaatagattgctttcttaatttcttttttaaataattgctagtatatagaaatgcaattgatttttaatactgattttgtattctgcaactttactgaatttttttattacttccaacagttttttggtgaagtctttagggtattctatatgtaagatggtgtcatatgcaaacagaggcaattttacttcttccttttcaagatatctgtgtacctatgttcactgcagcattattcacaatagccaatatatgaaatcagtctgtgtttatcaacagataaatggataaagaaaatgtgatacatatatctctctgtgtgtgtatatataagtatatatacacagaaagacatatgtatacacacagtggaatattattcagctttaaaaaaggaagaaaatcctgtcatgtgtgactacatggatgaaactggaggacattatgctaagtgaaataagacaggcacagaaagacaaatactacttaatctcacttacgtatggaatccaaaaagctgaacatacagatgcagagagtacgatggtggttgccaggggctagagagtgggagagacagggagatgttagtagaaggataaaaagtttccgttatgcaggatgaatacattctgaaaatctcatgtatagcatggcgactatagttaataatactctagggtatactagaaataagagagtagatcttaaacattctcaccacaaactatgtgaggtaatggatatattaattagcttgatgctggtaatcatttcacaatgtatatcaagacatcttatggtttcccatatatatatatatttatatatatatatttatatatatatttatatatatatatatttatatatatatatttatatatatataaatttatatatatatttatatatatatatacacacacacacacacacacacacacacataattagtatttgtcaattacacctctataaagctgggaaggggaatgtaggtaccagctacacctggtgtctgcagggcttgatttcggtagttcaagttggaactgaatttaggaggatgggccttcacttaattttatgttattttcatgtaaattgtttaggtaccaaatcacttcctatctttccattctttttttccatattatctcatcttctcaatcaacaagtgtttatttgttaccaattctctctttctctcttatcagttcagcattagccatttgcacatctggaggtgagagaaggaagctagatggtgactgaggccaaaagagtcctgaggaatagaattagttaccttccttaagcatctgaagttttagagcccaatctttcatttcctttcccagccccaaaaggaaatatattctggggttgggaaatatgttttggtactgggaaaggagttctatatggagaacttgccagaaggaatactagatttgtgatttattaaagtctgttaaacttttgaccattaatagtagaaaagattaagatataatcttgcatcatgatttttattattaaagatggtcaaaatgctaccaaacgtgtttttgtccctccatacccctctggaattttctgatgtcatttgaaccccaaaatagacttggctgaaagactaagaggtagtatatcaggtgatgacattgagtcaaatatttctatagttagaagcattaaaatactttatagtcacttgaaaaactgtattaggttagaataaatatatcaagtatccattagctcactgaatgaaaatcagtcacatgcattagaaaactgattcaagtcattctttgtctgtggacttgagaagcatgttattggtatccaagataaaatgtactcatgtaagctacagccaatccctttaaaatcattcagaaaaaatgcttaaacttggtataagaaagggataaattattatctgtatgttatactagagtccttttatgtaaaaaaaaaaaaaaaaaaaaaaacctcaaggttgtggctggcaagatggccaaataggaacagctctggtctgcaactcccagcgataccaatgaagaagacagatgattttttcatttccaactgatgtaccctgctcatctcattggaactggttagagagtgggtgcagcccatgaagggcgagcagaagcagggtggggcgtcacctcacccaggaagcacaaggggtcggggaactccctcccctagctaaggggagccatgaaggactgtgccatgaggaacggtgcactctggtccagatactatgcttttcccatggtcttcgcaacctgtagaccaggagattctctctggtgcctacaccaccagggccctgggtttcaagcacaaaactgggcagccatttaggcagacaccaagctagctgcaggagtttttcatacctcagtggtgcctggaacaccagcaagacagaacctttcattcccctggaaaggcgacggaagccagggagccaagtggtctagctcagcagattccacgcccacggagcccagcaagctaagatccactggcttgaaattctctctgccagcacagcagtctgaagtcaacctgggatgctcgagcttagtggggagggggggtccacctttactgaggtttgagtaggtggttttcccctcacagtgtaaacaaagccgctgggaagttcagactgggcagagcccaccacaacttggcaaagctgttgtagccagactgaatctccagattcctcctctctgggcaggccatctctgaaagaaaggcagcagccacagtcagggacttatggatcaaactcccatctccctgcgacagagcacctgggggaaagggtagctgtgggcgcacaactacatggaaactgaacaacctgctcctgaatgactactgggtaaataatgaaatgaaggcagaaacaaagatattgtttgaaaccaatgagaacaaagacacaacgtaccagaatctctgggacacagctaaagcagtgtttagaggaaaaattattgcgctaaatgcccacaggagaaaatgggaaagatctaaagtcgacaccctaacatcacaattaaaagaactagagaggcaagagcaaacaaattcaaaagctagcagaaggcaagaaacacttaagatcagagcagaactgaaggagatacagacacgaaaaacccttcaaaaaatcaacgaatccaggagcgggttttctgaaaagattaacaaaatagaccactagccagactactaaagaagaaaagagagaagaatcaaatggacacactaaaaaattataaaggagatatcaccactgatcccaaagaaatacaaactaccatcagagaatactataaatacctctatgcaaataaatgagaacatctagaagaaatggataaattgggacacatacaacctctcaaggctaaaccaagaagaagtcgaatccctgaataagccaataacaagttctgaaattgaggcagtagtcaatagcctaccaaccaaaaaaaaaccaggaccagacagattcatagccgaattttaccagaggtacaaagaggagctggtaacattccttctgaaactactccaaacaatagaaaaagagagactcctccctaactcatttcatgagacatgcatcatcgtgatacgtaaacctggctgctcaatgaaataaaagaggatacaaacaaatggaagaacattccatgctcatggataggaagaatcaatatcgtgaaaagggccatactgcccaaggtaatttatagattcaatgccatccccatcaagctactaatgactttcttcacagaattggaaaaaactactttaaagttcatacggaaccaaaaaagagcccgcattaccaagtcaatcctaagccaaaagaacaaagctggaggcatcccgctacctgacttcaaactatactacaaggctagagaaaccaaaacagcatggtactggtaccaaaacacagatatagaccaatggaacagaacagagccctcaaaaataataccacacatctacaactatctgatctttgacaaacctgacaaaaacaagaaatggggaaaggattccctatttaacaaatggtgctgggaaaactggctaggcatatgtagaaagctgaaactggatcccttccttacaccttatacaaaaattaattcaagatggattaaagacttaaatgtcagacctaaacccataaaaaccgtagaagaaaacctaggcaataccattcaggacataggcatgggcaaggacttcatgtctaaaacacccaaagcaatggcaacaaaagccaaaattgacaaatgggatctcattaaactaaagagcttctgcacagcaaaagaaactaccatcagagtggacaggcgacctacagaatgggagaacatttttgcaatctactcatctgacaaagggctaatatccagaatctacaaagaactcaaacaaatttacaagaaaaaaacaaacaaccccatcaaaaagtgggcaaaggatatgaacagacacttctcaaaagaagacattaatgcagccaaaagacacatgaaaaaatgctcatcatcactggccatcagagaaatgcaaatcaagctgcaatgagataccatctcacaccagttagaatggtgatcattaaaaagtcaggaaacaacaggtgctggagaggatgtgggaaaacaggaacacttttacactgttggtgggactgtaaactagttcaaccattgtggaagacagtgtggcgattcctccgggatctagaactagaaataccatttgacccagccatcccattactgggtatatacccaaaggattataaataattctactataaagacacatgcacacatatgtttattgtggcactattcacaatagcaaagacttggaaccaacccagatgtccaacaatgatagactggattaagaaaatgtggcacatatacaccatggaatactatgcagccattaaaaaggatgagttcatgtcctttgtagggacatggatgaagctggaaaccatcattctcagcaaactatcgcaaggacaaaaaaaccaaacaccacatgttctcactcataggtgggaattgaacaataagaacacttggacacaggaaggggaacatcacacactggggcctgttgtggtgtgggggggggtgggagggatagcattaggagatatacctaatgtaaatgacgagttaatgggtgcagcacaccaacatggtacatgtatacatatgtaacaaacctgcacgttgtgcacatgtatcctagaacttaaagtataataatagttatatatatatatacacacacacacatatatatatacacatatatatatacacacacatatatatacacatatatatacacacacatatatacacacacatgtatatacacatatatatacacacatatatatacacatatatatacacatatatatacacatatatacacacacatatatacacacccatatatatacacatatatatacatatatatatacacatatatatacacatatatatatacacatatatatatacacatatatatatacacatatataaaagaaaacctggcagagacacacaaaaaaagaaaatttcagcccaatagccctgatgaacatcgatgcaaaaatcctcaataaaatactggcaaaccgaatccagcagcacatcaaaaagcttatctaccacgatcaagtcggcttcatacttgggatgcaaggcaggttcaacatacgcaaatcaataaatgtaatccatcacataaacagagccaatgaccaaaaccacatgattatctccatagatgcagaaaaggcctttgataaaattcaacacaacttcatgctaaaaactctcaataaactaggtattgatggaatgtacctcaaaataataagaggtattcatgacaaacccacagccaatatcatactgaatcggccaaagctgaaaggattccctttgaaaaccggcacaagacaaggatgccctccctcactacttctattaaacatagtgttggaagttctggccagggcaatcaggcaagggaaagaaatcaagtgtgttcagttaggaaaggaggaagtcaaattgtctctgttagcagatgacatgattgtatatttagaaaaccccatcgtctcagcccaaaatttctgcaagctgataagcaacttcagcaaagtctcaggatacaaaatcaacatgcaaaaaatcacaggcattcctatacaccaataatagacagagagtcaaatcatgagtgaactctcattcacaattgctacaaagagaataaaatacctaggaatacaacttacgagggatgcgaaggacttcttcaggcagaactgcaaaccactgctcaaggaaataagagaggacacaaacaaatggaaaaacattccatcctcatggataggaagaatcaatatcatgaaaatggccatattacctcaagtaatttatagattcagtgctttccccatgaaactaccattgaccttcttcacagaattagaaaaagctactttaaatttcatatggaacaaaaaaagagcccatatagccaagataatactaagcaaaaagaacaaagccagaggcatcatgctacctgacttcaaactatactacaaggctagagtaaccaactggtaccaaaacagagatatagaccaacggaccagaacagaggcctcagaaataatgccacacatctacaaccatctgatctttgacaaacctgaccaaaaaaagcaatggggaaaggattccctgtttaataaatggtgttgggaaaactggctagccatatgcagaaaactgaaactggaccccttccttacaccttatacaaaaattaatgaaagatggattaaagacttaaatgttagacctaaaaccataaaaaccctagaagaaaacctaggcaatccttttcaggacataggcatgggcaaagacttcatgactaaaatatcaaaagcaatggcaacaaaagccataattgacaaatgggatttatttaaactaaagagcttctgaacagcaaaagaaactatcgtcagagtaaacagtcaacctacagaatgggagaaaatttttgcaatctatccatctgacaaagggcaaatatccagaatctgcaaataattttaacaaatttacaaggaaaagacaacctcatcaaaaagtgggcgaaggatatgaacagacgctcctcaaaagaagacatttatgtggccaacaaatatgaaaaaaagctcatcatcactggtcattagagaaatgcaaatcaaaaccacaatgagataccatgtcatgccagttagaatggcaatcattaaaaagtcaggaaacaacagatgctggagaggatgtagagaaataggaatgcttttacactgttggtagaagtgtaaattagttcaaccattgtggaagtcagtgtggcaattcctcaaggatctagaaacagaaataccatttgacccagcaatcccatttctgggtatatacccaaaggattataaatcattctgctataaagacacatgcacacatatgtttattgcagcactgttcacaatagcaaagacttggaaccaacccaagtgcccatcaatgatagactggataaagaaaatgtggcatatatacaccatggaatactatgcagccaaaaaaaggatgagctcatgttctttgcaggaacatggatgaagctggaaaccatcattctcagcaaactaacacaggaacaggaaaccaaacaccacatgttctcactcataagtgggagttgaacaatgagaacacatggacacagggaggggaacgtcacacaccagggcctgtcatgttggggaatagcattaggagaaatacctaatgtagatgatgggttgatgggtgcagcacaccaccatgacacatgtatgcctatgttacaagcctgcacattctgcacatgtatcccagaacttaaagtataataaaaataaataaataaatatgagaaaaacagtcaatgttgaagcatgtcttagaaaagagaaggtgtagaggtaggactcttatttcaagctgttaaattagaattttgccttttttttatgttcttaagagctagtaaaaatgtagctactaacttgctctgtgaccttaaacaaatcattcaatgtctggacctcagtttcctcctctgtcaaaaggttgcaattggatgacatgattttgtagttccctttgagctcaaaaattccacactctaaaagaaagaaatgtaaactgactcatcattattccctgggctcaaatgatgttttctgccttagattgtcttaatacttaaaacatttaaatataagaaagggaagatttgaatagtctttacaagttgaatttcaaatggtttagaagatgcttagagatgttttcagaaagaattatcaagaagagatcactcagtaagtgcacagcctgcctgaagggcagccaagttatatacataaaaatatttaatgtgagcaaggaagaaatacaaatcctgacagaatagaattcagacatgggaatgattatttccagtggaaagaatcagggaattttccatggagaacatacagtcccagcctttccagactttaaaccattcagtgaacaaggcactgagttgggctctgtgaataagaaattttcagttaaaacacagaactttcctttctagagttcagggtcacataggagaaaccatgaagtggacagacgcttaccataaagtattagaaaactctacgagataaaatttactaaaatgctatcacagtgcctaggacctagtgtttacccaataaatattattatattttactcctattgtcatttttattgaggtaagcataagatactgcaatggattgtgtaataggcaacctatacagattgggttgatcaaggaaggcttcccagaggtggtaacatctgaaataagttttgaaggataagtagaagctgagttgataaaaccttggcagcaggaaaatgaaaaggtattccagtcagaggatgcagtttgggcaaatggagtatgatggaagagggcacgtcatgttaagggcctgcaagaagcttgggaatgactagaaatcgtgtgatgaggcatggcaagaggtggtactttctataaataccagggctagacctaaagtccatttcatgtcattttaagtagtttgggttctggtttgaaaaggagagaattgatgaaggattgtaaacaagagaaatattaactcaatagaatggaaaatgtacttaattaataaggacaaacttgaaagcaagagatcagtaaaaaaaaaaaaaaaaaaatattgcaatagtccagctgacaaattgaggaggcgttgaattaagttctccttgaactaattacagcagttctctaacagtgagtgtcagggggagaaaggagacaagaggtgtttatagctgaacagaacagtactcggtgcctagaggtgtggcgtaaaggaaaagttgaggatggcatccaagatactggcttagactatttatatcacgttgatgtagtcttttgaggatctccatgcagaggtaaccatcctcatcagatgaaaaatatcttggttggcgggggtggtgggggtgggcacagcttagcaacttgtagttggttttttttgtttgttttctttgttttgtttttctgtttcggggaattgaaatttttttcctgtcagaacaaacacagctgtgtcttatgtttcagaaattatgtaggtgacttacttgcttttgacatttttcacctttcttagagttgcattattttaaacctgggagactatatagtggagaatgtaccttcccctgcatcccctgcctcggagccatcctacaccatccctgcctataagagcaccctttaatgtaggaaggtgaccaataagtagctgcataaaaggacacaagtacccagaaaaatgctcaggctggagtcaagacgttggctgcatcatcacatagggagtaattagagtcagggagtagattagattacacagaggaaatataatgtaagaagagaatcggacaaaggacagaaacctgggagagtaccaacatttaaatggctgtaaaaagagcaggaagaattgctctagttttattgcctgagctctcaggacttctcaaagtatttacggaatataacatatgggaccaagcaagtcatgatgttcatttccaccacaatcatcagcagcataagcaaatggcaaccatgttgtaaatgatggcttcataggcttattctgattacccagctttttgaaatttcatgaattctaagcactgtcacatttcaagaaaagcaaatcagagaaatattccaagaaatatatgttctagcctagttcacatctgggtggctgactcatgccaagccctactgaatggccagaaattgatgggggtagggatgatgagacagcgctgcagagtcattaacagtttccttctacagacaagatcagttctgcaagtagaagtgaggagttggcgagtttgctaatgatggagaggcctccatggactcatctgtctagggaggtgaggtggggagatgctaagacaagacaaaggagttgacagcttctgtgaaattcaggtaccactttgattccctgattgttacaagaagaatatttgcctccccaaataaactctaaattccgcaaattgatgcaacatgccaagagcacctaagagtgaatttgacatgttgcaagtactcagtggtttctctttctatcccaccaaggactaggttttgtatttttcttcctacctctccttgtaccaagaagagagctgaggaactattgagaattcaataaatacctgattgaaatagtgcttgttaaggaaaaatatcaagaatatttttgcattaaagaattaaaaattttgggttgatactttgccaatgttgatcctttttcagtactgtagacttatttaaactccctttctcagaagcactgaatcataggtgtgatgagtgagtgctggatttaatcgtagcttaggcccctgggactgcgccttatgaagacaaatagtagacataataataaaattaaaatatttcttcattctaaatttagaaaatgactgccttctttttgtaaatgataatggcttgcaaagcagttcaatctttttagctatgtaaatggtataatacagtttaaaggattttttaattaaaacaattggaagcttcaaatatagactgcattttccaatttttacaatgctttgctcaaaaaggcagagcttaaaatcacatatgactcactgcattgtttcaaagccattacactcgaggtgtgttacctccatctggcacgtagagccacatgtcctggtgttcattgccgtttggtaggtagcatgtgtttataaacagaatatcaacgaaatggacaatacttggagagtttacctaagttttgttattttttaaagagatttaagattgttaaacttattatttaaagggctctgagtaacttttttttgcatttttaaaataggtcagttttattctgctagttccataaaaacaatgtaaacacaagcattctgtacgtcttgctggtgaattcacataatgcttacttagttccctgatcctttgacctcctcatcttctccagttattttctgtttggaccacgggccacaggagtggagtgtggttggggcttaggagacaggaatgtagctttttggtatgactcgttttattgcttgctctcggtgctgagtaacttctaaaataagaagtacgtagaagctggccaggcgcggtggctcatgcctgtaatcccagcacttagggaggcagaagcaggcggatcacctaaggtcaggagttcgagaccagcctggccaacatggtgaaaccctgtctctactaaaaatacaaaaattagctgggcgtggtggcaggcgcctgtaatcccagctacttaggaggctgaggcaggagactcacttgaacccaggaggcggaggtttcagtgaaccgagaccacaccattgcgctccagcctggatgacagagcgagactcagtctcaaaaacaacaaaaaaaaagacagacaaaaagagagaaaaagaaacaaaggaagaagagaaaaagaaacgagagaagaaaagaaaggaaaaatctttgggccaggtgcagtggctcatgactgtaatcccaacacttagggaggctgaggtgggtggatcacaaggtcaggagatcgagaccatcccagctaagatgatgaaaccccatctctactaaaaatacaaaaatacaaaaaaaaaaaaaaattagccgggcgtgatggcacacgcctgtagtcccagctactcgggaggctgaggcaggagaattgcttgaacccgggaggcggatgttgcggtgagctgagatcgcgccactgcactccagtgcagacagagcatcagagggacagagcgagactctgtctcaaaaaaaataaaattagaagaagttaaaaaactacatggaagtggtcattctaaatcaaactgcatccctgcctattaggcctctgaatcagttcctacgcagttggatggcaaagacaataaacaagagccatctaagacatggaatgttattatgactattgttaagaaagtaagaatttccctgatgacctttgtattctcatattcgtaggaggtaagggatacgaccatggagtaatggttcatttagcatgatgtgtgtatatgtgcatgtgtagatatttggcataaaaaatgcctattcctcatcaggagtgattgtgtaagtaatatcctagtgagctctcttctgaaagtcctggtattgatgaaaattatcagttgggtccacccatttcagaaaaatttctgtaacaaaaatatatattaacactggacttaatagagaaaaaaaacaaagtcaagaaaatttgctgagaaaaatacaaaggcacaaaatacatccttttaatccttttaataagtattaacatgaagatttaaaagaataaactacacacgaattctctgcctgttaacagtatgaatttgatgttaaccactaatcccttctcactagcgtaataacttctcctttgtgaagagagactgggattctatctgtctttgttccttgccaactttcccttttattgtttttattttgcctcctcttcttctgtgtccagttttagatctcactcatccattccaatgcactttggactgtttatttaaatttaccaaagctgatatattaattgcaatggctcccccaagattatgctggacttaccacatcaaaatttattgggaggctagctgtggtggctcactcctgtaatcccaacactttgggaggtcaaggtgggtggatcacttgaggtcgggagttcgagactagcctggccaacatggtgaaaccctgtctctactaaaaatacaaaaattagctgagtgtggtggcacacacctgtaatcccagctactcaggaggttaagttgggagaatcactttaaccagggaggcagaggttgcagtgagccaagatcgtgccacagcactccagcctgggcgacagagtgagactctgtctcaaaaaagaaaaaaaaaatgcgaaaacttttgaaaaaatacatattcataagccccacatcctcatgctcagatttaataagtccagaaactggtactgggaattagcctttagcctcccaagtgagtctgatgagcagatatgcacaataatcattggatagtcatgtgtgtgaggtatgtctgtgtgtgagagaggagtgagagcaagttcaggaagctttaacacaggaagaatcactgcctaaaatagaatcaagttcatgtttctggtatagataatagttctgttcctactttgaatgtacaactatcttctaatgtgtcaatgaatagcctcacagattccagtggcaggttttctagaccttcctggtttgagacagaaaagaataacttcggccagacgcggtggttcacgcctgtaatcccaacactttgggaggccgaggcgcgcggattgccagaggtcaggaattcaagaccagcctggccaacatggtgataccctgtctcgactaaaaatacaaaagtaagcctggcgtgggggcgtgcgtctgtaatcccagctacgcaggaggctgaggcaggagaatcgcttgatcctgtgcggcagaggttgtggtgagccgagattgcaccactgcactgcagcctgggcaacagagggagactctgtctcaaaataaaataataaataaataaataaataagaaaatggagaagcttcttaggaataatagactctgttgtgtcatgttttagtattctgtcttatatcaattgcgtgtaaatgcttagaacaagcttgtccaacccacggcccatgggccgcagcccattggtctaggatggctttgaatgtggcccaacacaaatttgtaaactttcttaaaacattatgagatttttttgcaattttttgttttagctcatcagctatcattagtgttagtgtattttatgtgtgacccaagacaattcttcttccagtgtggcccagggaagccaaaagattggatacccctggcttagaggaagggctgggtttgtttattaatcattttgatcaaactataaaaatatgaccaagatagatattttcaatgtttttcctcattccaaatacattgcctccttagtatttaagaaaaaatattgtcttaatatttttttttggagtctcactctgtcacccaggctgaagtacagtggtgcaatcttggctcactgcaacctctgcctcctgggttcaagcaattctcctgcctcagccccccaagtagctaggactacaggtgtttgccaccacacccagctaatttttggtatgttagtagagatgggaatttgccgtgttgcccggggtggtctcacactcctcagctcaggcaatctgaccacctcggtctcccaaagtgctaggattacagctgtgagccactgcacccagcctcatttttaaaatatatatgtatacacatatatatgtcatcttgttaacattatatatatatactcctgattgtaacaagacaatacatgcatacacacgtatacatacatgtgtacatgcatacatgcatgcacatgcatccacttatgcatacatgcatgtacatctatgtatgcatgatacatgcatgtacatctatgtatgcatgatacatgcacgtatgtatgcatgtatgggtgcatgtatgtgcacttgcatgtgtatgtattgtgcatagatgtgcatatacatggatgcatgcatgcatgtatacatgtatgtgtgtgcatgcatgcgtgactgcagttggatacgtgtatacatgcatgtataaatatatacacattagtgattccaaaacactataaatgtgattatacctaagatgaacatctgtatatggaaaaaataggaaaagtgagatgtttctgcatgacacagcattctcagtgcacacaatgccctcattaatcagcaggttttgctaagctaatttttagaatgaaaactataataatagagcaagtctgtatctaaacaagaaaaataaactagagaaaaaaatattgcatggagtttggccaacagaaattagataaatctggttgaatttttttttttttttttgagacagggtctcactctgtcccacaggctggaatccagtggcatagcctcggctcactgcacctccaccccccaggttcaagcgattctcctgcctcagcctccctagtcactgggactacaggtgtgcaccaccacgcccagctaatttttgtatttttactagagacaggatttcgccatgttgaccaggctggtcttgaactcctgacctcgggtgatccacccaccttagcctcctaaagtgctgggattacaggttgaaatttattaaactgcagttagataacagctctcatccttcttgactttgcagtattatagagaagagcataataaagtggtaaaaaggatctgcatacatccactgtgggtttagaaatcctcagaaataaacttatgttccctacgatgtgtggtctttttcagtcgaactttgtaggtgttctgaggtttgttaacagaccattcctaattaaaaacaaaaatcaagcaaacaaaaagcaacaaatatgacttgtactagatagaaattagcccgtgcaaatggccatagtaatacaatctgttgtgttagagaaagtttggtccacaatattgtgtcataaactagcctttgggtgattcctttaaagtatccgaatagaaatatctgaaatatacaatatttcttcccaacagttggcatctagttaagcaaaattgtacgttttaggaaaagcaccttttatgcatccagagaaggaaagtgtgcaatatgttttctaacataggctacaagtaatcactatatatgcatgcatacacacatacacacacacgcacatacacacacactctctctctcgtagtgctgctcagtatcaccctctacagatgaggctgttatttggtctgatatcatttaaatgctgatgttctaaaagtgaaagggctgaattttttttactgctaaaaatccctcaaatccactgtttaaaaaacagtgcaccatgctaacaaaaagttccaaaggtaaggctaattttctgacaattcattgtgtacttccagtcttgggccttttctactttgcttgttctgtctccctttctaggccaagagaggatctgctttctctctattttaagagtttgatttcagtatgttttgttagactgggtcggtcagcaggtgtgcactaacacattgcccaggtggccacttaatgcagtgtgattgagcatggaggaaataagcaacctttctcagtgcatagggctgtctggctgctcgagcaggtgagtgtgattagcaactgactttgggtagaggttcccctgtattcccaacagatgtccccttaattgaaagcttgttgtgacgctgttgattctgaggcccgaaatcccccttaatgtctcttgcttgttaaaaatacacctcccatccttgaagagagaaacttgcttaacagttacacaggtgtggtgggagaatgggcatgcacatgcacacacatgaaaaataaacttttaaagtgaaactgcaaatcctttactgcctttccatcaaatggtctctagcaataaaccttgaggtctgaatcatgccattttagcaaatgttccatttaattatgttctggaataaagcagtgcaacacatttataggtgcatccttcagaattgtatagactgctaggattgtttgtttatatttatagtccattatattcagaaaaattagagcatattgcaaaaatacagaggacaacaagagttctccagattggctgagaaaataggggtgattaaaaagaaaggagagaaaagtaaaaagaaaccagagatgagatatgtagacaaaccgtgctctgagtttcctgtttctgattgttacaagtagaccacagcttagacctgtgcttccttgccccagagcaaagaggaaaatagaaacaatctgttatgtaggccgggcgcggtggctcacacttgtaatcccagcactttgggaggccgaggtggtggatcaccagaggtcaggagttggagaccagcctggccaaaatggtgaaacgctgtctcaactaaaaatacaaaaaaaaaaaaaaattagctgggctggtggtgggcacctgtaatcccagctactcgggaggctgaggcaggagaatcacttgaacctaggaagcagaggttgcagcgagccgagagcacaccactgcacttcagcctgggcaaaagggagactttgtctaaaaaaaaaaaaaagaagaagaagaagaagaagaaataatctattatgtgattctcattgcctatacaatggggattgtaaaaaaaaaaaaaaaagaaagaaaatgtcaaaaacaagtctttgtgcagagagaaaagagaggcatttatcccatgaggcctcataaagagaacacgattatatgcagaatttgcttgaaccctgtggtttatgtgcactgtttgctttggatatttgataccacaggaggttttatgagaaagatttagtcatgtgctacatgcattgatatatgtaaatatttcttgtaattcactacatttaatagaattcattttatagctcgttgtttccaatttgaaacaaaaaatgtaaagtcatgagttgtgaatggttttctagagggaatgatgtcaggcattcaaggaagtattcattcaaatgcattttttgagcactatgtgagctaccttgctacttttgattatattaagcagatttcactgggtttagtaaagaaggataattttacaactatatcactgagaattttataatctacaactctaaatctctgttctatttcatagtcaaacttttctaaaaggcctctctacacactacctccagttcatcgtcactaatttactcttccacctattccatattctagggaacaccccttatttcagtgcccccacttaccccatcctctccttaggcttattatacaatattctcatagtgtatccactactttctgactgtgattttcagatttgttggcagggtcatgtttctgatccagtcataattgtcataataaatgtcataattgtccaatgattaattttaggacttctctctctctctctcctctacagtaacccccttcttccttccctctctacctgtgctgatggcttccattaacatctacatgctgttgactcccacattattctttctaaaccaaacttctcttctgagtcccagactgtatatccattgataattccacttagatgtcactgagtcatcacaaactcagaaaatccaggataaaatttctgatctttgatataaaaccttgggcttccttagtgttctccagcttagtgaatgtaaccaccagctatcaagttgttcacatcagaaagacagggatctttctaaacaccttcttctccttcattcctgtgtccaaagtgatgattaattatgtatgtcaacttaactgggccaccggatgcccagatattgggtcaaacattattcagggtgaatctctaagggtgtttttattagatgaagctaacatttgaattggcagcttgctcttcctaatgtggatgtgcctcatccaatcacttgaaagcctaagtagaccctttctcaactaagaggaaattttttcctgcctgattgcctggagctgggacattggatttttttctgccttcggacttgagttgaaacatcatctcttccttggtctcaatcctgctgacattcaggctacagctgccgcatcagctcacctaggtctctagcttgccagctgtagctcttgggatacatatgtatatgcacatatatgtgtgtgtgtgtatacttgtaaatatgtttgtatatatacacacacacgaatgtgcacacacacacacatatcacattgttccgatcttctggagaacccccactaatacatgcagtggtccacaatccccgttgatcttactttctatatatgcctcttgttgtaaatcacatcacctaaattcaatggtcaccaccagagttctgtcttttacttatattagtgttgtagcatcttcgaccttcattgacactggttttcatctaaactattctctgtggctagtggaagtggattcttcaaaacgttgatctcattatgatgcctcctcgtcacacacacccttttcttcatcatgaaacttgcaaaggctttctattgtttttaggataaaaatgaaaatcctgagcatgacatatgagactctggatagttttgtgtatatatgtcttcaaactgctttcatattttcctctcttagagagctttcttagcactgaccacactagatgttttatagttccttgaacatgtgttctcgtacagggttctggcacatgttttgtgatttagttccttttgttattcacatgctttcatcacatatctggtatactaaggacaggatggtagaagtagtctgccagggtgtaagcaataaaggggtgtgttgtctgcagaggatctaaaaacaataataaaatccagtaaatgttagtctgctttttattggtaccttaaatcatcaattctaaatggtgtctctcctgaataaatcttttgttggtctaaattctaaactattgagtttcaatattcacgtacacttcaaattgtttaaaattatgctttcgtaagcattatattctatgtggaagttaatttgtagaactcctagttacattgtcagccctcaacatggactcagctacacatatttgttcaaatatgttcaaactgttataattctataacagttcccaatcattacagcttgcttcaggtccagatttatctcgacccctatcactctacatatttctgagcttaaagagtaagttttaaataaacaatcatagtgcagtagttgtaagtgaaagaaataatttgacttgcttcagttctgcaatcctttatgaccacctggagtttttatttctgtttaaaagttcaaatggcaaaacagaacaaatggcaaagtgtaatattgttatttggtaagaacaaattttagttcacacaaaatattttgcttaatttgagtaatatcttcaaaattcaaatgcattcttccttatttattttaaaattaaagaataattaaaatagtaattgttaatcattattacattaaaattattgaaaacaattttgtcatatagaagagaaaggtgttaaaatcatccactctagaggtcaaatccctagacatgccactgcatgaatcatgcttcttttcttcagagcactgactttcaattttagtacgtattcattagtctgattgtataattaatctctgaatccatgaccaaactgaccgttctctgagaataacagcaccatgtatcttttcactcaccattgcattggcagaacctagcacaatgctagcatgaagtgagtacttagtaaatatttgttgaatagacaaataaatgaacaggtaatacttagatggtccaggatttaatccaagactatctacccccaaagcaggtcataatcacaatacctcactgacttccagtctcatcttcattgtccaccaataagtatacgtttatttgcagaatattgatagcatgaatttcttcactctttctagtcactcttcatttggaagacaggaaaggtaagggaaagtatggggaatggggtagggaaagtttgccttaataagaagctcattcttgcaaaacgcattcctaaatttaggtcagaataccaatgtatagcaattaaatggaagtcactcattataatacttttttatttaaattaagaaaaaaatatgagctatgccagatgtatgcagactcagaatagaacccctcatctgtaaataatatactttgcttgatttttgaggcttgatataaacaaatggatgttgcaaaatgctttatttattttttatgtaggtttttacctttgatatgtttgtgaatatccaacagagagatgtcttcagtaatatgtcttacaaaggcggattctaaaaatagtaactccaaaggcaaggaatactcacgttttatcttacaacaaggaatactcacattttacctttcaaatatttatgaaatacatggtattttcttttttatcccattgccaattattgcaaacacacacaaggtaaagtttactacatgtgccaggtaatgttcaagtcatgttcataaagtttttttttaaagaaaattctgtggtatttatgttgaagagaagaaaagagaattacaaaggtgatattattgaacttctcaaaatggcggggtataaattcataaatcgttaagcttaagaacctaaaagacttttcaaaatagattaatgggaagaatcatcatcattataattaacatttgtgtagttttttatgcctcacaaagcagtttcatatctcatttgagctgtacaacagtgacttcaaatagggacataggtatttacacctctgtttctaccatttaggaacctgaggtttagctgtggcaactttaccagggttctacagaaattcaacaagccaaaagttcaactcagataatttagctccacacttaatttccattttatttaactaaacaatgaatatattttttaaaaaattatacatttcctgaattaatccattgtctttatttttagtaaaaccttttctctaattttaatagctttataggggtataattcacataccatacaatctaaccattataagtgtacaattcaatgttttttgtatctattaccacaatcaggctttgtagcattcccaccaccccaaaagttcctgttttcagtcagttcccattctcaacctggtcccagacaacctcagatctgttttctgtctccgtaggtttgtcctttctgtaaagttcatataaactgagtcatacaatgtgtagtattttgtttgtgtctgacttctttcacttctcatgtttctgaagttcatccatgttttagggtttatcaatggtttgtttcttttcattgctcgttattactccattccaagtatatataacattgtttatccattcaccaactgatggacatttggtttggttcccgttgggtctataaagaataatgctactatgaacatttgcatacatatttttacatggacatatatttttatttctcttgggtaaacacctaagagtggaattcctgggtcatctgccaaatctatgtttaacattttacagaattgtcaaaatgtttttctgaagtggtatgttatttttcactaccactagtaatgtatgagtattccactctctccacatccttaccagtacttgttactgttagtctttttgaatatagtcattctagtgggactagggttgtatcgcattgcagttttaatgggcatttatctaatgactaacgaagcgagaatttttttattaatcattcatatatcttctttgataaaatgtctgttcaagccttttgctcatttttaattgagttgtttatcttattgaagtttatgagttatttatatcttttggatataattcctctatcagaaatataatttgcaaatattttcttcatttgtgggtcatttttcactttcttaatgccaccctttaaacagaaaaaaaattaaattttgctcaagttcacctattgctttttaaaaatttttatggatcatgtttttggcatcatatgtaagaaatctttacctaatctatgatcacaaacattttctcttgtgtttccttctaaaaatagtatagatttagctcttacatttgggtctatgatttattttgagttaatttttgtgtggagtttgaggtaagtatcaaaagtgttgtcattcattctctctttgtctctctctctctctcacacacacacacacacacacacacaacacacacacacacacagacacacacatgggcatccagttctcccaacccatttattgaaaggaccatcttttcccaactgaattgccttggcacttttgtcaaaaatcaattgaccttaaatacgagggtttatttctggagtctcacttcggttctaatggtctatatgtctcttctcaggacaataccacattgtttatagcaagttcttaaatcaataatgaaaatccttcaactttgttgttctttttcaattttttggctattttagatcctttgaattcatataaattttaaaattgtacaaaaacatgcctgccagcattttgactgtgttgaaatgctgtgccagcattttgattcagattgtgttgaatctacagataagtttgaacgagaatgaccattttaataatagtgtctttaatcgatgaatatggaatgtctctccattaatttatatgttcttaatatctttcagcaatgttttgtagtcttctgtgtacaaggcttgcgcttcttttgttcaatttatttctgagtgtttttatcctattatgaacataatttttacttagtttcacttttggattgttcattgctaatgcatagaaataaaattaatttttgtatcttgattttatattacgtaatcttgataaatttgttttctagttctagtagattatcttagtccattttcttttgcttataacagaatatctgaaactgagtaattgataagaaatgaaatttatttcttacagttctggaggctgggaagttcaaggttgagggagcacatttgctgaaagccttcttgctggtggggacctcctgcagagtcccaaggcagtgcagggtatcacatggtgaggggctgagcatgctagctcaggtctctcttcctctcttgtaaagccaccagttccacatggtgataactcataaatccattaacccaattattaattagtggattaatccatttgcgagtacagatccttcatgacccaatcacctcttaaaggccccactctcaatactgccacattggggattaaatttctacataaaggccaggtgcggtggctcacacctgtaatcccagcactttgggaggctgaggtgggcggatcacgaggtcaggagatcgagaccatcctggctaacacggtgaaatcccgtctctactaaaaatacaaaaactagctaggcgtggttgtgggcgcctgtagtcccagctactcgggaggctggggcaggagaagggtgtgaacctgggtggcagagcttgcagtgagccgagattgagccactgcactccagcctggacaacagagcgagactccatctcaaaataaataaataaataaataataaataaataaatttctacataagttttggagaggacaactgtttaaactatagcataaaattttctggtagattctctaagatgttctacatgccagatcatgtcatctataaataaagacagtgttacttccaatttttctttttctttctttttttttttttttgcctttaatatctctctctccatctccctttcctgttcccatccctatctctatctctgtctctatctctgtctatctctatctctatctctatctctgtctctatctctatctctatgtcttccaccttatttgatgtttacatggttccagaataatcttgaataaaagacgtctttgcttcttttcaatcttaggagaaaagcattccgttttcatcattatgtattatgctagctgtagaatttttgtagatgtcctgtttcaggttgatgaaatccttatttgcttagtttgttgaaagtttgtatctggaatgggtgtttgatttgtcaaaacttctttcatacttattgaaatgatcatatggctttgcccttttgtctgtcaaggcttactacattaattgaatatagaaaattaaaccaaccttgtatgttaaatttcactcgatcaatatatataattcatttttatgtgggtagatttaggttgctaatattttgtgaaaaattgttgtgtctatgtccacaagcaatattgctttaaagttttatttttatgtgatgtctttgtttggttctggtatcagcataatgccagcatcatagaatgagtttgggagtgttctgtcttctattttctgaaggagtttatgtaaaaatggtgaattgatataattcactagggaaacaatgtgatcttgggcttatctttatgagaagatttttaattcccagctgaatttattttctttttgtaggtctattcaagtttttctttttgagtcagttttgctactgggtatcttgcttgaagtttgtctttttcatctaagttgcataatttgttttaaagttttccataattatatattttatatcatatgtaattatacataattattatatataatttattttcatattcatgtcaaattatgagccttttaattatgaggctgtagcattaataatgataggtcttctttctgtagttgattttagtaattactttctcccttttattcttggataatcgagttaaaggtttatcagttttcttactgcttccaaagaataattttctttattatttttatatttctttaatttccaagctgatctttacaatttactttcttatgtttgttttggggtttaatttgttcttctttttatagtttcttaagatggaggcttaggttattgatttgagacttttctccttttctaatatagatgtttatagctataaatcagcctccaacattactttagctgcctcctaagtgttttgtatgttgtgttgttattttcattcagttcaaagtattttctaatttcttttttaaatttcttctttaccccatgggttatttaaaaatgtgctgtttaatttctgtatatttgggtatctcccaatttttttctgttgttgatttcttatttaattataataaaacaacatactttgaatggtttcaattcttttgaatttaataactttattttctcctgtgaattttagctactcattaatgtcattttctttcagcctgatgaaattcctttagtgtttcttacagtgcaagtctgctagcaacaaacatcttagtctttccttattttagaatgtctttattttgctttcatttttgaaagacagttttgctgaatattgatgtcttggtagacattttttcagcagtttcattacaacattctgctgtcttctggcccccattgtttgtaataaaaagtcagctattaattgtgctgctgcttccttgtatgtggtgagtcatttttctcttcctgctttcaagattttctctttatttttaagatttcaactgtgtgaccatactgtttctagatgagactctcttagtgcttgttctacttgtgggtacttgagcttcctggatctgttgatagttttcatcaaaatcataaagtttcagctattacttcttcaattttttctgctccttttatgtatttttcttctgggactcatattacatgtatattaatacacttgctttatctcacaggtccctggagctatactcatttctcttcaatcttttattctctgctcttaagattgaatattttctgttgatctctttttagaatcactgactcttccttcttacacgtcttattatatattaagtccatgtagtaaatttctcatctttgttattgtaccattaaacacaaaaatttccatctagttgtttttaatagttgctttatctgtattccccatttgttgattcaatgctgtgtatttttcttctttatatatatatatatatatatttttttttttttttttgagacggagtctcactctgttaccttggctggagtgcagtagcacgatctcagctcactgcaacctccgcctcccaggttcacatcattctcctgcctcagcctcccgagtagctgggattacaggtgaccaccaccatgcctagctaatttctccgtttctttaaatactattttattccttgaacatgtttataatgatagctatttttcctgaatagaattcatattgtcttgtttctttgcctatccctaattttatgttgacaaattcacattttagataacatattgtggcagctctggattggatttttttttcctgagagctataattgtttctattattttttgttgtttatttggtgtgtttataagtatttttcctggatttaatttgcagaatctatctctattgtagtatgcagttgctagcatgcctgatgatgtcatctgctgatagatacatatgtgggttgagaaacatatgcaaaatttcggcagttttcaattctgtcctaacttttactttccactgggcccttccaggttccccttgcatatgcacagctttccaggcaatcagtgatggatggaaagtttgggccctctcaagtctcctctgcctttgtgtgagcttgcagtcagccggggatgtgtagagtttagcaagaccttccatggtgctctcatttttcggatctccctgttaaacgtctggatagtcatatagtctgccgaaaagaccacaatttaggctaagagagctgctgttgggagagctccccaacataatagaattgtcttagtgacaagcagaggaaggtggaagggagcagggacaaatgggaggaaccccaggcattaatgccacagattcccactattagtggaatttcagcactttttacaagtaaatcctttgcaagtggttactttttacatttttgtataggatgatgtcttaatttttaaatatttcttacaatgtagtacgtcagtgtatcatagcattatctcatttacttctttgatcacctcttgaggtagataattaatttctgttttacaggtgagaaaactgaactatatcaagacaaagtaacttccccaaagttacactgatgaaaaatgacaaagtcagaatctatctacagtgcactctcttcttaagtcactcaaactaattgtaaaagaatttggaacaaggtagagttaatttgctcaaacaagtgcttaaaaaaacagtgcttagctccttgctatcaaacttttaaacttctataaaccatgactataaggaggaaaaaaagatgtttgttttaatggcactcaaaaggataaaattatcatctagtcaggaaaatttccaaactcagggcataggtccttacaaatatttaattcattatgtttgtgttgcattcattgcattcaagaaatatttgccatgtgtctctctgagctttggacgtacagatttatctacacatatgaaaatgaaatgtaaagctaaactatgctcacttaagactaaacttggaaaacttaaactttggcattccaaatgaagctggtctatggtgatatttatttttgcatttggtaatgtgtagtataagttagcaacacagacatgatttgtttccttaggatcattgtgaataaactcgttggattgggaaatatcctgtgtcaagacaaattattccaagctagcctacaatggaagaagggtaggctaattcttttctctctctccatttttttttttttttttgcgagggagtctcactctgtctcccaggctggaatgcagtggcgtgattccggctcactgcaacctcggtctccctggttcaagtgattctcctgactcagcctcttgagtagttgagattacaggcactcgccaccatgcccaactaatttttgtatttttagtagagaaggggtttcaccacattggccaggctggtcttgaatgcctgacctcaggtaatccgcccgcctcaacctcccaatgtattgggattacagatgtgagccacgacgtccggctggctaattctttatcctctgatgtgtgcttatagtcctcatcttttttgcacattcaaaggaagtgcagtgcatctggagggccataatgtacacagaaagaaaatagcacttccgagggcaaccactgagagcctacgggaagaaggccaagggaaaggccaagtttatacatatctatgaaaacaggaacagaaatgcaaaccatggccaaattaaaatcatcacagaatgctttactttggaactgcttgatttttctgaaacataaacattggattgatttgcatgttacataaatcctttagcttcatcttgacttttagccacccaatcagagatgactggtgagaatgaccttaaaggtagacaatgttctctttcatttttgtatactcataattctaatcatttgtgtcatttaaatcttgaagtgtttttcttctaactctggccttattttcttacaatcttgccaagtttcaagtttacatcttcggccaattttaatgtgtatgcaaaccaaaaatgtccaaacatgctcatttcagtggaaaaatgtgtgtgtgtttttatatatcagaaacatgaaatttagttgagttgatttttacctcaattatatgaaaacatgcattatgagtgtacaatcaaatataagattttcccaagtacatttgttattttagaaaaatatctacagaccacagtaatatacgattatgtgttttgcaaataatatttaacatgaccaactaaatgtaatgtgtagctttttttttttttttttaagagtctccctctgctacccaggctggagtgcagtggtgtgatctcagctcactgcaacttttgcctcccgggttcaagcgattcccatgcctcagcctccagagtagctgggactacaggcatgcgccaccatagctggctaatttttgtgtttttagtagagacagggttttactgtgttggccaggctggtctcgaactcctgaccttaggtgatctgcccacctcagtctctcaaaatgcttgaattaaaggcatgagccactgcatctggcctaatgtgtgacttttgattggatccaagtttgagaaataagcagctatacaatttttacaggaaatttgaatatggatatatattacataagagcatcatatcaatcttaaatttactgagttctaaaactttattgtggttatacgaaagaatgtcctagtagttcttaggagataaatgctaaattacttaaaggtaaagtgccacgatgactaaaactaactcacaaatgttttaggaaagaaagaaaataaatagcaataaaccatttgttgcaaattattcacaattggtgaagagaatgtcagtgttcactgtagcattattgcaacttttttgtaaatttgaaatttttcagaataagaagttgaaaaaataaataatcgaatcataatatcataatatattccacatgtaagtgaacacgtttagacttcttgctttacaaatctactatgagacactgccttgagccatttttcaaaataaattggagggatataaatatgtaaatatgtggaacataaaacaatatttaagtcaaccattattaccatgaactttatgcaattcacttgtaggatattgctttacagagtagtcttttaaatagtaatcaaatttcccataattttttaaaggtagagaatcagaacagtttgttagttttactgataaggaaactaaagcccacagaagataattacttactataattcattaatatgtagcattgaaatatttttattcgtttttattttaaggaggtttacaaaatagtttggggatacttcatgtcaaaattgttacttacagtgcaacaacattcatccttgttgttgaaaatttttgtcaaacctactgatttgaagcttttgaaagtgattgatttaatccaaatgcatacctcctccaggaggacatacaacctggaaaaataaacattagcaggaatggtaatactttaaagacaggataatgatgctaatggatgactaaaagttggcttcacactttttctaccaatcatggaccttttctttgaatatgttcctgagtcagtcagttgcttagtgtaatagcatgtggctaggctgaaaaactaatagtcgagtactatgctcagtacctgggagatgagatgattcatatcccaagcctcggcgtcatgcagtatgcccaggtaacaaacgtccacatgtacctgtgaatctaaaataaaatttgaattaaaaaaaaaaagaataagatagatccctaagccacttatttattacgtggccttaagcaagtttcacaacagatttggattcctaaacgtggtgagattttcactatttgatgtttcattattcaagataatttgaacaaaataagatttttatcttcattctaaattcattttccttacttcccaaaaacttgtgaagccttcactaaacaacaaaacaaacaataaagcacctaagcccttcattactactattaaccttctgaaaaatcttaacagaaatagaaattatgattaccttcgaatgatgattttgaagactgaaattgtaaagatttcaaatggcattttgaaaattcaaatagattttttaaccaccgtataccatgtgttggacagatttgccaaggcttatttttcttttttcctacaagcttatgatctatggtgctgtttcttaaactttaaagtatatacaaatcatcaaacatcttgttaaaaatgcagattccaggctgggcgtggtggctcatgcctgtaatcccagcactttgggaggctgagggaggtgaatcacttgagatgaggaattcaacaccagcctggccaacatgatgaaaccctgtctctactaaaaatacaaaaaattagccaggtgtggtggcacattgcctgtagtcctagctacttggcaggctgaggcaggagaatcacttgaacccaggaggcggaggttacagttagccaagatcacacctctgcactccagcctgggcaacagagtaagactcagtctcaaaaaaaaaaaaaaagaaaaagaaagaaaagaaaagaaaaatgccaattccagttgaataaatctgggttgggtcatgaggtgtgcattgctaatcatctctaaggtcacagtgaagttgctgttctaccaacaacactttgagtagcaacagtttctgtcacatgacagtgtcataaacacacatatacctagaaactctggtggaagcctaaatgagattaatattatgtcaatatgtgcatagtatatgataatacagtaatagactcataaataactgaatagagattatgcatatgggatatctgtgtgtgtatgtgcaattgtgtagaaaaaggctgactggaacactctatctgaatcccttatttttcaagtaagaaaattaagattcagagaatttaatagatttatccagaattgttgacacaaagccagagagctggtacttgttcctatgcctgtgtctggaatttcagagaaggatttcatcatcttatatgtatgaaaatcattagtatgactatttttgttagagaacaaaaggaaattataaagtcagaccaaggacagcaatgagatctagaaagagaatatgctcatctgaaacaatgaataatgtgatgcaattacactcatttcaagtaatttattttctgatttaggatacactagcatggctaattaattgggagtagccagagaaagaaggggaacagctaagtgctggcaatcaggagacctacgttccagcctctgctctgtcactactttactgctgagagcttggataagttacttaaacttcatggagcattttgcatttgtttttcatctgtgaaatggagataagaagtgttgccctacttatcgcatgctgctgttgtgaggcaatagatgtaaacacatgtgcaaaattaacagtgctctacaaatgtatcatttttaccattatcattaatatttatgactagtcattcatattgatggaaatagttcactgtcataattgaggaaagggaattttgccattggcttgtttctttctcttctggaacttttcccagccagtttaggtggctttctgagctcagactcttacccatcagaaacaatcagagtacagaagatgcaaatgttagatttgtgtcgtggtatacactgcaggatatgtgcagagctgttgagctccaatgaacccatgaagctcactgaaaactctttggcttctcctttttctgttccttgtgttttgccctttcttagtaactgttcaaatgcccttcttgcatgtgtcctgatactgtccttttcctccttttttctatatccccttttccaatctgataaagcctactgatatcaatgctatcatcatgtacttacctgtacttaggtcagcaagacatttattacttttgaaaaatgaaaattaaagttggatggaattctataaagctgtcagttttggctttcaaagccaaaaatattatatcaatatgcctactaaaaagcattgctgaaatcttatgctaaaccaagcatttgttttacaactgcaatcctaaattctttgggaccattttcccccacatttaatgtgtgttcagtgctaatttggtttattcactacaaacaagactgtctttctcagcattttgaagattctacagaaagaccttatgtcactcatactgctatactatcattactacagcatcatgaccatccccaacctacttaaatatatcaatgtaatccaaaaggaaaattggtggagcaccaccatgcagggtcaaattctgggcaaacagtgacctgacccaaggactgattattttaaaattaataatagtgtagttctgaaaatgaacagtttggaccattcactccatttacaatacaaaatttgggtttgttctttattgtttatgattgtgccattttattacagtttttagatgagcaattaaaactcttgaaaactctagcaaaatccaaaacattattttgccatcatgttctttaaatgtcaatatcttcattcctgtgcacaaatattttaatggtatgataacctgttgcctcctttaaacatacattttgatacattaaaagggatatttgtattactttctaatggtgctttttcaccaaggtaatacctttgaacctaattattttatgaaatatcattttaacaaattatttatatagtatgtcatataagtccgctcacggccttaaaaatgaccaacagtcgttgaatagaatagtccattactcagcttgacaatgcagttttgatacacatctacactgaccaaagattttagtaaaaaatttaagaaagaaaaatgatctcaaaaagaagatgtgttcaagcatgtttggaataatttggatttgtttttccacaaagattcatgtttccaaatcgtttatctgctcccattctaaaaactttaacaaatacttgttgctctttgaatgtctagattttaaccggatgaacttctctcattttactctactctcaaaggcaacatgccgactgccaagcactcacccacaaggatacctaaaacatgcatatactagcatctgggcgaaatttagcaatccccattgtgacacattgcaaatgcaagtgaaaggagaaacgttcacttttgtgggttccaggcaactactccagtctaaacacaggctgtttcctttaaaaccaccctcaacaaccttcccacaactgctccttgccatgaaacagctaccacttgcaggatggggggagcaaaaatggaaacaatctgtttagtgcacttttccagaaaatttctgctttgagacctttctgacaccatccaagtattacctgcagttgctgtttatgcatactcatagctgggagatatgccgatctctagttgaacaacaaaaatgcggagacacaatcccatcccttgaattgtgcaactgcttgaattaatgtttgagaacacagtcaattttaaaaatacgggaacacagagtccattatgttcaactcacttttgttaaagagggcatgctacctttagttttcaggtgttgtaagtcaaaggagaaatgccagttgagggacccaggttcagaaatgataattacggtgctcttggattaggcctctgtagcaaatgcaagatggctttataagccctgcccagcagataaacaatcttttttttatcttgcctggttctccgttagctctgcagctctctttaagagagaaaaaattatctgatacagaaatttatgaagggagacatttgataggtggatcactgatgcagataatccaaaatgacaaattttcatgaagtcacttttattaaaatactccacttatgttccattattgcctatttgccttcctagttatatttttgcttttgtcagtgagttgattgaaacatgaaaatagtctttttatatataaaacaaacatgtcttgttaaaaaataaaatctatcactttatttcccctacttaatatgacctttcacagatgacttctctgtctgatatgcatggtcctccaaattctgtcccatcataccagtgttagtaataattgaacaatatttgtcatcagtgggggaaaaattaagctgtttcctgaggtttgaaaaaagttgcattgagatcttattcgtgccaagtcttatggattagatactcaattaaagtagttgatgtagaaaatataaaatctcactcaacctctgtattttaatttagtttttgaatgctattttatatatgtaaaatgtaatgcaatacttttattaactcattattattttgtagttattcaattcaatccatataaaatagaaatctggattgccacctacattgtataaataatcaccaagagtagaatgagagaacagtcaggctacctgggatggggtcagtttgtacttaggttttcctctgccaccatcaccaaactttcagttttcttctccttcccctctatccccaactctttgcttccaagtataggagattcctggggctctcagatagttattttaaaagaaaaaaaaaagttcattttctctcagagttgataatgccactgagaggcacacatccttatataaaagagaatatgagtaaaaatggataatgtcctacaaatcatacataagagttgagggcatgagaagactgacaagggatgaggaggggaaactttcaggaaagagagtgtctagggcagagaagtgagaaatggaaatgaattaatagggaagagtggaagaaggttaatggtgaccatatttcagctaatgaatcagagaaaatgtgtcatgaatgttgatgcaaatctttaattatgtagcatcttacagtttacaaagtacttttgccatattatctcatttgcttttcgctaaggttccatgatataggcagatggggtgttactaatcctcactctgtaaataaagagttggagtgccagagaagtttggtgccaatcctgaagttcacacagtaagaaagtgacaaggaatcaaatgtttatccaactcagcattctttccagctgtgtgccccccatatctcaggttgccaacgtctttaccagattcccagaggaggctctttacttctggccaggtctttccatcagggtaccctgaaagcattgttcaggttggtactgagtcctgggttcccctggaggtatgtcccactaagaaatccttgtctgtgttgttttactggtgcagacagctcatggcgaaggccctctctggggatatcaaaactctctaggtccaggttcaaaatcttccacacattctctgtgtctgcttttagccagacaccatcactatgtggtagcttacctcaaagcttcacttagtgtatcaaccctcagaagcactttctgatcccttcaacctgcacatctgtcttcttatctaaattccagcccagctcaatccataccttctgaccatgctacgaaaaaaaaacatctctttgtaaacttctcttatgcttattgtcttttcactcatttagctatgagtcagtctgcatgtaccttgagatgagtgtctacaacttacgcttgttcgatattcccttcagcagggaacccacaggcatttaataaatattccttgattgatagattttggcctctgtctctacctcaacaaaatgaaatattatggctatattgtaagagtttcataatgaaaatgatcatcagcaaacataatttatcctgatgtatttcacagtattgtagatatattaaagtttctcctatcaaaagcctttaatttgtttttatctttttagaaagaggcatttattcacttcagttacctatataaaattagaactaatctacagttctctttcttgatctcaaagcaactgtaggtatgcttttatttttaccaatttgattggaattatcaactttgggattcatttctgatgaaaaataacctgaatctgtaatattaactctaaaggaactaaagggaatgttttatgtgcctgtgggaagctttagcactgtacaaattaattgcactcatctataatctttctgggagttacgtatatgcaggccaattgaatcatgaaattaaacctgaaactattcaagtcacacagactatgggatgatattatctcagaattacctactcctcttcattaatctattgataaagtaaacagttttattatcttctgccccagcatttgtttgtggcaataactagttccaaaatttttactaaaattagatgttaggttgtgattctttataatgaaatttcattcatcattgagccagtgttgacttttgtgttctatatgctattttatgctattttaagcttgggtaaaatttctgccatctatattagtttcagcaaatgaacaaaccacaagtctgtcctgttcttctgtattattttaagcttaatgttattagaagctattgtgattggagacaatggaaatcatgtccataaccaattctgaaggcaataggaaattgagaaagtagttcaattaacagaagcttcctctgcctttttaaagaaaattatatttatgtgagcaggctttctccgtgcaatatagtctgcatgtttaaaaggcaatcatttcccccagtttattcacttaaatgaaatcactactgctcacagtagtattcccttgtcttgccccatgtcaacactctgatgtgtggagttggactgaaaaaagataggaaatgaaattccacaagtgtgtcagatttaaaagagcaactggagttttaaatagctctcttgattttttaaggatttttacaagagcaaactacagggggcagcaaatattaacaggctcctaggagtgtgctgaacctcggaattaacaagtgctattcggctcaacttctctctgaagagaaatgcccaactttaatgtgaaatgtatagttttctcgttgctttagctttatgatatatgagagttaaatctagaaggctcttcctacctgtctttacacagtaaactaaagtctggaggagtgtctcacatttcagcagcactcattgtcttccccaaattctgcaatcaagtgtgacatgctgaagtgacatggattaaaaacctgggattatctgagcattaaaaagcgaatgcagggcacaggaattgcacacatatcggggagaggagaaagcatgctacaaaggacattttattctcgattttatttattcatagtgagttgaagtctgttggacttccctgaaaaatcttccacactgtttgaaagttctattatctaaaagatagtttccaactctttggtgtatttaaaatcaaactcactatcactgaatttccaaagtaaaactctcagtctctttttcaaaaggacagagagagtgggaacatattatccattaatagtgttgaatttgacttatgtttttattttggcaaccaaaaagatagagaatgccagaccctcttggaagggctttgatcttatcctggtgtatcttataaaatagtctcatagaggctttggggaaagtctgaaaagcagaaaaggaaacattgtcattctttcaactagctcaaatccccatgtttaaaaatatctacagctgctaggagggttgcaaagttctttaattggtaattaatatagttactaacacagtgtaagagtactgcacaagacttaaaggcagaagttgaatcagtttccaaagtaaaaagtgaaaagataaagcttgtgacaatatatatgcaaaagacagcactgcattgcagtgagaagtgaagagacttgattcctttttcggttttgccacaagcagatctcttgggctctctgggctccaaattgtgtgttgtctctctctctgttgattggtgccatctactatttgtaattcttaatttaagttggttcctgtgttccttttttgtgatgaaatattctaaattaacaacaaggacatatcataaaaacaactataagcccatcaaccaagagtaaataaatgttaatacgccgttttaccccaaaactactttcctttttcaaatggcattttcacacactttgttgcaatatagcatacgttcagtttactaaatatttactaagtgtacagtttaatgacttttcataagttgaaaacacctgtgcaaccaaaaattagataaaaatataggacattacaagcatcatgtatgaccacatctatacccacttacagtttctaagcaccccccaacccccacattctgactcctatcaggatacatggacttttgtttttatataaatcatgcaatatgtatttgtcagtgtctggtttcatttgcccaaccttatatttgcaaggtttatccatacagtcgcatgcagttgcagacttttttttttttttttttttgagatggagtctcactcttgttgcccaagctagaatgcagtggggtgatgttggctcactgaaacctctgcctcccaggttcaagcaataatcctgcctcagcctcctgagtagctgggattacaggcacgcattaccacacctggctatttttttgtatttttagtagaaacagggttttaccacattagccaggctagtctcaaactcctgacctcaggtgatccacccgccttggcctccaaaagtgctgggattacaggcatgagccaccgcacctggcctagattggttattcttattgctgcctgatattccattgtgtgcgtatcttcgggtgtgctttacaaaatacaatgtgagagatacaatatgtttgagctgtatatcttttcttgtctatttttttttacttccacatatgcagatgtattcattaatgatatataaaattgttctgtgggatttgaatttttcataaatagttccttaccattcataccattctacagcgagcttttcttccctcaacattgtgtcataaatgtgtttccactttgatagatgcatccctagtccattttaacttctgaagagtggcccaattaatataccacattttcaaatgtgtatcttattgatggccacttaggttatatcttccttgtgcacatgcataagaggtcccccactgcatacctggaagtatgattgcatctttaccacattgtgccaaagtgctctcaaagcaggtgtagcaaaaagccataagagctctcactgctccacacacttgccaacacttgaaattgtcagattgctatttgtttgcttgcggattgttgggttttgtcaattttctgagagtgaaatggtgtttctctgattactggaaatgttgagcttgagcatcatggtcctttcttggtcacttcgctttctgtttctctacaagccttttgttttccacactcagctcccttctctactctcccttcgtattttgcaggtggcaacacagatttttatctctttctgtctcctgataatgaaaggtggctgctgcccaatacaatgctaatccattaaatgataatctgttcacatcttttccttattatctccaggaacatgcttctgttttaacctctcttgtcccatcagatttttttctctcttggtccgttcctatttgcaaaacaaaacaaaactcttcaaatgtcttctatcatatatatttttttcctttactcagcatcctaattaaatgtctaaactgttcatctcttatccaccatcaaacttcttagaaaacttagtttttcttctcatatcctgatgtctcactatagttggattcaactattccaccaacatggacgtcaagattatcaatgacatcttaatttcatgactcactttattgtctttatcttatttcacttccatagacttcatgcctatactctcacacttccttccttcagtgaattatctgtgtgcttttatttctctgggcctttgcatgtccactacttggtaaaatcttccctcctctcaaccttggaactagtggttctttcttctgagcttccgtagaactttgtctatatatatacatacatatatatatatatacacatatacgcacacatatatatatatacactcatatatatatacacatatatatacactcatatatatacacatatatatacacacatatatatacacatatatatacacacatatatatacacatatatatacacacatatatatacacacatatatacacacatatatacacacatatatatacacacacatatatatatattcaactttgtattattattatatttatccataataagagagattctaaaggatttatatttctgcatccccagtgcttaacacagattcttggaaaatgtttgtggcatgaataaataaattgggcaaggatttctgtggagtcccttccagttctaacatagtggttcagagtctgtgatgatgaagaaaggtcctctttcctcctgcactgactccccatatccatcggcacaaatggcctactccctgctagagaagtcatatgccagaatccaaggagttctacactggtctgaacaaaatttccatcacaagctgaggaaaagcagcgtggatggaggagttagtcatactgaactctcccatgctgttagggctggggtcagcagaggatcagaagaagcccggagtggaattctgtttctttcctttcatctcccaaacctcaagcacagagaaaagaaaagcaggaagggagggagtagaaaggggagagtatgtgaacgaataagaagaaaacaagcattcataaggggacgttaagaaggggaagataatcacaaggatttttagcccactcagaaaagcagagataaaattaagtcttatacaagagacatagacgttgatttagatcacctaaatctgcccaactccacgactgctgggattcccaaggtgattttaagcagtcacagaatgactttattttgcttccagtggttcctagaactctgtggcaattcctaataaatgttttcaatgcatttactcatgacaaagggcaccattaacatactacttggcccaattttgccatgtcaggtgtatgagtatatcctgcctccatcgctgcgtccattgcagggagaagaattcaggccattgtgtggctttcctagtaagaagaaattgctgtttttcagaattatcagttgctaattttgtatcaaattgtacgctgctaacttgtgcatataacaaatggctctttaatgtattagcattgttttttaaagatcactcttttccacgtatgttaaagaacgcttaccttaaaaaaaaaaaaaaattagattgaccaggcacggtgtctcacgcctgtaatcccagcactttgggaggccgaggcgggcggatcacgaggtcaggagattgagaccatcctggctaacacggtgaaactccgtctctactaaaaatacaaaaattagccaggcgtggtggcgggtgcctgtagtcccagctactcgggaggctgaggcaggaggatggcctgaacccgggaggcggagcttgcagtgagtggagatcgcaccactgcactccagcctgggtaacagagggagactcagtctcaaaaaaaaaaaaaattagattaattcaaagcacagaagttctgagagaggtgtatgtatcccatctgttcaaatacaggggctaattgattttccaaagaccttgatccttatttttaaagtgatacaattcacttcaaaaaccccatgacttacttacactttaaaatgataaagcttacctcatcagtaatcctaaaaggcagctgaacctggtctatgactgaaaaggcctcttttgcccatttcctctttgagacaggcagctgctgaacgtggccttctcacgccctcatttttagcctgctttcatgatgaagtaacaaatgaaaataggcaattataatagcaccttgcttcctagagaccaatgcttttggaaaaatagatgtactgtataaatagcagatagattatctgcttgcctacagtggtatggaagacaagactctctcaaaggagagaaaagtaaaatataccacaaaataggaagaaaatttgttctaggaatggatatatttaagggaatctgaaaatagctgtctaataagtacattaaaataaagatctttccatgcaaaggtccaggctaccttttgtttaacatacactttttctaaccacattgattcagtcctgacccaaaagatgaagtctagctggtgaatggttctgtgtcacttgcaagtcttcaggcggagacaaggggaagcactatgaatttatgagaggtgacaagattcttgcctgaggccaatagtttcttacacttgtacacatccagatagaaatgtgagatggaaaacagtagtatctcttacttcctagcacattaagcctggaaaagaaactgtttcctgatgtatctaggtaatgttacccttctgtatttttcattctcaatccatttcatttgaattgctatgcaagtcttttattgtagcccttgataaagggcatacatgccaagttagatatttatatatttttgatgagaatattctgacatatatttattttgatcatatatctaattcaaatataggcactgtgaaaagggaacacttttacactactggagggaatgcaaactagtacaaccactatggaaaacagtgtggaggttccttaaataactgaaagcagaattaccatttgatccagcaatcccactactgggtatctacccagaggaaaaggagtcattatatgaaagagacacttgcacatgcatgtttatagcagcacaatttgcaattgcaaaaatatggaaccaacccaaatgcctatcaaccaacaagtggataaagaaaatgtggtatatatacaccatggaatactactcagccataaaacaaatgaaataatgacattcacgcaacctggattgagttagagaccattattctaagtgaagtaactcaggaatgggaaaccaaatatcttatgttctcacttttaagtaggagctaagctatgagtatgcaaaggcataagaatgatacaatgaactttggggacttgggggaagggtgggtgggggatcagggataaaagactacacattgagcacagtgtacactgctcaggtgatgagttcaccaaagtctccaaaatcatcactaacgaacttatccatgtagccaaaaaccacctgttccccaaacattactgaaataaaataaaaaattttaaatatatatgggccctgaattaggctgggtgatctcagtgtatgatttgctcattattcatttatttattaacacatatctattatattgcctactatgtgccaggaactttgctaggagctgagaattcaggggtgaacaagacatacatattacgcaatttctctctctttctctctctactctctctcattctctttctcactctcattctaccatctctctgtatttctggttttagtaaatatcatcttcaaaatcatccagatgcccaagtcagaatctgggaagccatcctagactaaagctttctcctcctcttcatttccctgcaatgaattccttggtttataccctcttgggtttctgcctggaaaactgcaataggagggacacaggtctaataatagatgggcaatgaatatccttattatttaatatcttgagcaacaaataaatattttacattcaatattacagttcatcttcccaataaccttataaggaaaggatattactgcctccattatacagataaggaaaataaagctcagggttgttacataagctgctctgggccttcaagttaataagtacaataaccttggtttggatgcaagatagttggactccaaagtctgtgttctctccactcctctgtcacatgctttgcatgcaacatgctattccctgattgtgtttctcactcatgacggttcccaggagaaacatcttcacacacaccattagctcatccctctgaggtgatattttatggctaaggtgaagcaccacagttagaagcagccataaaaataaccctcaaggtgaagcacttaatcttggaagagtgaattgttaggttgtagtctggtactgttgggaaacctttcataaaagcccctcttatgaattttggtttcacacgagggagacaatgtttgtcatctttttgttttctttgtctaaaatctatatgggactagaggagtttatttcatgttacctttttagtcaaggcaatgcctgaaaagcatatctaccttgaatttagtggtaagaaaaccattgggtgaaggtatatctggtatgctttcaagtatccagattatatcacccaattatataataaatgtaaaagcacttttaaaactataaatagccatgtaaatgaacggtattactatgttggtacataaacatagactttcacatagtacttgatgagcactcttgttttgttgtttttccacttttcagaagtaagatgatctcacttgtaagttccattgtatgcttgtcattttgtgtatgtcatggagtgatgagcactctttaacgaaagcaaaaggaaactaataccacttgattattctgttaaagagtgagagtaattattcttccttttaaattttcacattgaaaaacgcagctatttgatttaaaatccccacgtttgtgggtatatataatgaatttcctaatgtgtttcatgttaaatgcactggaagctgtggttttccaagaattgagatggttcttcctgtaagttccagtgaggaaacataagacttgacatcaaagcgctgatgtgtttgcatacattgctgaaagtggcggggaaataatcatagaaggtggacacttctgtgtattctaaagttttaaatggcaattgcaaaactgagtgacatatcaacaattgaaaactcttaaagaggtagttttgtgttctgcaagtgtagatttcattactgcttcctttgaagtaaaaatctcatctctttgtaactaggataggttttgaagaaacaaaacttcaagagctttagatgggcaataaaaaaatgttgtaatctcctacaggagagatgtgatttatagggcaacgtattttttatgacacattgatgtttgcaacagaccaggccagtaagtaagaagttcagatttaaaaggaaagagtggtgacataacttccctttacaggtgtcatttggcttaaaacaacttttgctcacccagtgactgaatcattttggatctgtacaagtggggtttgtataaaaattgttacttcttccatctatgtgcaggagccagcatctcactgccacgatggtttttaatgaaataggaataaaatgatctgtgcatgtctgtgtttgacagtggccttaaaccagtcttgggggtctcaaccacctaggtctctgccgtgagatactcactttaagaagaggcagcagaaaataatggttaatagcatgcgttatggagtctgacaaacctgggttcaaaagccacttttgccttatatgtactagatgatgtggccttgggcaagtcacttactgaatatttctgtacctcagttaactcacatgtaaaatggggataagaaagtcacttcagaagatgattttgtggattgagtaatgccatatgctttaaatgcttagcccaatgtccagtgcctaggaagtaatcagttaagcttcatattattttttagtcatttacaaaatatttattcggtatctaccatgaaccgaacaaaatagaaatgcagtttgtgtgtgtatatcttccaggaatgaagcatggcctgacaacgcctctgtattatatggaaatgtataattagagtttttaagcattttttaaccaccagcacattagcaaacaacaaacactattgcacggtgcagagtttgtttacttggcaaaatgtagataatgcagctgcttcacacaacagtcaaggggtagggggtgctgactgcagaaaaaattcagccctaggactatatttagttagaatgtgacatcattttaaaacttgaattatttaaaccatgcattttaaatgtttgttatttaagaaaactcgagaaatcaagtaaatgtccccattcttcctaactgcatttaaccaactagaacttaaaacaaaaagagctataaggtaattaatttcaaaatccataacatctatatcatgacatggctatctgggtcaaaatctatgtcctggaacataataaccatatgctataaaatataatttatataacagcataggccaataaggtgagtctccatgctgtgcacagacattagcattatgaaagggttccctttcataactatggcaattacatagttagtgaaataccattaagcatatcttttcatgtgtagttatccctgtgtctatatgacactgaacatctgtatgaaaatcaaaaatttcaatcagccctccagatgtccccaaatatcaatatgtctggcttatgaacaaatcagctggacttaagtttttcatttcgttttcttccagatgttggtgtcttgtagacacaaatctctttttgagttctttcctaccaatcacctttgggattataaccaaattactaaaaaccataaaggtgtgtcatagtaaatatttttcttctgttgaaggatgcaattcatcaaaaatctgctaggtcgtatatggatgcaagttgttaagaatgtggcagtgaaaaacttaacacaattaagcgcgtggaaataatttggctctagaaataaaatgttctctatgttcataattatagaaagcatttgatctgacatgggtacattcaggttttctaaagacagaggcaggccgggcacggtgggtcacgctgataatcccagcacattgggagaccaaggtgggtggttcgcctgagatcaggagttcaagaccagcctggccaatatggtgaaaccccatctctactaaaaatacaaaaattaaccgggtgtggtggcaggcacccataatcccagctactagggaagctgaggcatgagaattgcttgaacctggaaggcagaggtttcagtgagccgagatcccaccattgcactccagcctgggtgacaagagcgagacttggtctcagaaaaaaaaaaaaaaaaaaaaaaagaggctgtgtggtataatggaaagacacatgtattggcatcagaaaatcttgaacatgagttcagattctgtcctttacttgtggcattgtgagccttaatttcttctatggtaaccaatcatcttagtttgccagggactctcccagttttatccctaaacatcccatgccctgagaaaccccttagtcccaggaaaatggatgattggtcaccctaatcctcatctataaaatgagggtaataataacttcctcgcagagttttactgcagaatggtgaataagtaaaggacctagcacagccaagaagagtagggtctccaaatgggaactattatcatcattatcaatctcattcacatttcctattctgtttcctctcagagcacaggcttgtctgtttctattttattcaacacaatcagcacttcacttgcactatcatagtcatgctaattgattccatcccattctcaaaagcactaaatttctacgttgtattccccctcactgatggtcatgagctttacatcatcctcactggaatccaggagataactttttgtttcctaccatggagacttgatatatttctataatccagatgtgcagtatgtaacctccagtgcccacagcaagcccaacacatagtgggccctccacagatacttgtgaaatgaatgaatggttcataaacaaagaatagaaaactacaggtgagttatggcaaatcagtccagtaaacatcaaaatgtagcccttctctttgctacaaactcacctttctattgtggatttcaatttgcctactgcagaaacattgcttactatctttcagaagtcaactagctatatttcctttccagaacagaaactttcggaatagctagtctagtctgctccctcccactctctggctccatagtgccttttggttccctggttgctcttctgctatgttgaggcctccaccagccatgtctagtctcatcacttagtccagctccaaactcaaagaacattctcttgaattatttagatttttctcttcaccttattctaccttctgggttactcattttcctgtgccttccacttcaaccaagttgtactcctgcttccaggcttcccaatgcctgcagtctcagaagttagactaaacagcaacaggcaatcgagcatcatccttttccttctctgtcttgcaactcaggactcaccttctcccagtttgccctaataggtctcatccaatgtttaacctgccatgacagtctcagtatagccattctctcagtgctggctgaaggaatcagatggagctaggttttgaataagtactgcgtttactgcagcatgacattaaatgactgctttcatattcccgaacctcaattactcctttggtaaaatggggataagaattttacttgtgataaaatgggaataagaattatggaaaataaatgaggcaacataaagcttgcccatgaaaattcattcactcccattcgtcccaatactcttatcatttctaatagtgtctctcttcactttcttaaaattctgtgggagaaaataattgtgaagattcttgaatgtatatccccagatattttgctctgcctttggtaggctctaatatccattactggaccggctccagaagggatacagaggtccactctgttagatctgggttgggaatgggattaggaccaaagcattcaggtggtgcaagtgatttgaaaaatgaaaatacaagacctgtataaaagaaagtcctcaacggggtctcttcagaagcacaggggagaaagaggaaagcttacactcctgacctctcacctcagcatttttcttccttccactttcaagcagtgaataatcaacatgtcagagtgcatttagatctaaatccaattaagtctgaccttagggatagttactcatagttcccagcaggtgtgtgtttggaagaaattgtcatctgtgccctttgttcaattttcaaattacccaagtttatggtcctgactgattaagtctaacaacactggccaatgaatgtctaaggagaacagctgctggcttaagtgtctaggcatttgtgctgagaaggattttaagaaagaaatcacctctctctacttactccacacagaacaaatctaggagttgaaaatattctatagctttcatctagacccttacgatagttgctatcatagttgttagcccatggttaacattatttaaccaccatggccattggtattatcatttgtgcagtgctctgcaagattgttgtggaattagaattaatatgtgtaatccaattggcacaatacctgacacatagtagatgctcaattagtggtactgattattaatataattggtattattaaggcatttgacaggaatttcaaacagcagaccagtattcactgtggggggaaaaaagtatgtgtgggtatgcaatgtatgtgcaagtgtgcatgtatgattttgaccaattttcacatgtatcttccattaatagcgcctattactttagattgacttcagaagtcatgctctaaaataccttttttttttttgagacagagccttgctccgtcacccaggctggagtgtagtggtgtgatctcggcttacggcaacctacacctcctggcttcacctgattctcctgcctcagcatcctgagtagttgagactgcaggcacccaccaccatgctcggctaatttttatatttttagtagaggcggggtttcactatgtcggccaggctggtctcaaactcctggactcaaatgatccacccacctcagcctcccaaagtgctgggattacaggcatgagccaccacacatggccctctaaaatatcttaatcacagtccctcagtttggtttctgttggccataggaggagaaagatgctacaaatgtgagtagctataaaggttctgaacctataaagattctggttctctgctaggtacttttcacacattttctcatctatttctctacttttgtgaggatcagaagacctggcttctggtctcagctttccctgcctacaaaactgtggtctacaacaaattacttcaccgcttggatctgtaattttgcaatctgtaaaacaagaagattggattggaccatttttaagatcctttccaaagctgtaagtttaaagtgagatactataagatcaatataaaaataaatctaatccaggagaaatgaaatgaaaggaacaccactctgtttttagtcaatgagtcgacagtatttctttgggtgttcattcttctagatgctataaagggaaaaaggaaaaaagagaagaccttgttggttcttgctctaacacactttttccagactgcttttatctgctctctggttgacttctgagacatgatcctcaggactccagagctcttctcttctccacttatttttctaccagcctgtttgacaacagtcagcccaatcccacccagcaggaaaaaacatggttcttggtgagaaagctaaatggcaccttccttctcctttctttcctccgagtaagaagacaggaagaagctcattaagaatccagaagaatgtctagaaaggtaactgaggatctctctccattagaggaatgacaaaactgctacagagaaaactatggctggatgagtttttagatctctgtgactgtcattctttttctccgctgcttcttccattctctggtcaattctgtttgtccttaaaatgcaggtcttaaaagcttttaaaaactctgtctccaatggccccacctctcactctttccactatactatgcttccacacttttagaaaaacacgtacgttgaattatggttagttgtctgtatgcctgtcttttacttaaacttataccactgtaaatatatcagtacattgtgatgtatagtaaaccccttccattacagaaagaactaactgtatactacattgtaattatttacagaaatcttgtaaaaggaagatattctcatgtttgagaggaaaaatgtacgtaacttgaataaagcctaatatgtctgacctaaccaaatggatatattagaagtgagttccttacaaaaatattcatggaaaacttcttttaagactaagttttcctattggttattaatgggaatttataaagatttgactgatatacaactttttaggaataatatctgtcactagactgttagttctgtgagatcagggaacaaatacatttgatttctttcccattgtatccacagtgcctggaatacagtaagtgcttaataaatattataggcagaatgtataaatgacagaagaaatgaagaattaaaaatccctgctgcatatcagaaattacctttgaggccaggtacggtggctcacacctataattctagcactttgggaggccgaggtgggtggattacttcacctcaggagttcgacaccagcttgaggaacatggcgaaaccctgtctctacaaaaaatatatacatatatttttaataagccgggcatggtagtgtgcatgtgggaggatggcttgagcccaggaagttgaggctgctgtgagccaagattgcaccactgcactccagcctggatgacagagtcagacactgtctcaagaaataaaaaagaaaacaccatagagataatattataggcaaatgaaaccaactacattaaaatattttaattctatttatttgtgcttggataaatgtgttgttatacatatgaataatcgcttcttgctcatgctctaagatgaggaataacagcatgagttggcaaagggaaaaaaaaggtgcagtatacctggtctatttgcttgtttgcttgtctttgcagtaatgtaatgttatttcattactcccaataggcaccctcagattaaacagtaatagttagctctgaacatttagaattttactcaataaaaataatggcgttaaaatcagtaaggaggagttgatcgtatgctgtgcttcatcatcatcttcgtgaaagaaagagaaaaggtagaagcaagtgcctgtagatatccacaggtaacactaagggaggatgcgccagacctagcattgaagccttcctcagaaaaaccaacttgagagaggatttacaatcccttcttatctctcagacagttgccatttatatgctgtttattcagtgattataaacatggctaccctcccagcttatatcaaatatcactaggtaaataactggcagaatatattgtgggttttctcagggctatgactgagaaaaaaatgccacctttgtttcttatggtttagctacttttcacccaggaatccctgagctgttatttgaaaggctacatttcagaccccacagcaaacataggatgtatgtttttctgtaaacagggtaacaagtagatggttgaaatgtttaaattgaaaactctgacttaaggagtcagggagggagacgaaaaaggctcactttctgccaagaggttgctccttttctgtgaactggaaggatcactcttctctccttacacattttagtgtacctagaaacacgtgtggggtgcttagagcagtctcaggaaatggatgactggacacttggcttccagatttggtccagcctctctccgtttgtgtttctatgagtaaagttgaggcaaaccctaatgagctttcccaatgcaagattgttatgccaaatggaaagcagttagcaggaacgctaagatccaggattctgtttcaaatcattaaaattaaatagtattcttccctccaaaacgtttaagatattttgataaatctataattcacaattgggatagggagtagacattaatcataaagggacctccaatactaaaataacaaccaggactcactgccactggccaatgagctccatgataatgggccagcgatctgactgtgtctttgttttctcatcattgtgcttctagtgttttgcagtgcctaccaagctcagtggacatttgagtaaatacatggagaaaagtatgaatgaatgaatgaaaaaatgaatgcagagccaagcctattgggcccaatcacattgtatggtcagtactcattactgaccctctccactaatgctcagcacatttattttctgtgaaaccaggataacaggaacaatgaaatagctttgaaggagatttcccatcagtgtctcgatcacccatctctcagctaacagatcttattttcctgagctcatgctgggcccaagaaaagacaacatacgcctatagatacttggggacccaggcctctctctggaatacagaaaggtgtactgtttaaaggaagtgtgaatgcgtgtaacttaggcctactattccattctcacccagagtaaaataagtgttccacagtatcaacagagtaaaagttcatgttactgaccaggaaagcctggtgaacacagaaatgcaaccaactgtagcttgggtgaggtgtaggactgacatctaaccagagtcaccagggtatagctatggccattctttcttatgctatgcaccccaaaagggattataaagcacagataattaaatcagcagaggctgggtgtgataacttatgctgtaatcccttcccaataactttgggaggccaaggtgggagaattgcttgagtccaggcattcaagaccagcagggcaagacctcgtctcttctaaaaataaaaataaaaaacaagttatctgggcatggtagcatgtgcctgtaattccagctactcaggaggctgaggtgggaggactgcttgagcctggaagtttgagaccacgatgagctattgatcacactgctgcactcgaggctagtctacacagtgagactctgtctcaaaagaaaacaaaaaaaaaagaaaagaaagaaagaagaatcagagcacttctgttgataataatcaacagagcacttctcttttctccttaagcatatgccaccccttcttacttacttttattcttccatttttgttccccaccatcccccaccttagccccacttactggttctgtctctttaatttgtctggctagttacagaggcagctgagagcacaatgggtacagtagtcattttatttccctccaagtattgtctgtgcccggaatgaagaattacacagaaggacatgttgtggaccaattcccctgctttccaatctcctacgaatgatcaagctcctgggaacactaagacacagtgtttcatacagttccttcaaatgacttcctgagaaataagtaatatctggcaatgtaaactattatcttccagaggattaatacaaaccacttctaagggctgtaaagcactttatcttcaaactcaattatataaagtgtatacttgagggtagaatgacaacctccttaagactaggattgtcaacagccaaggaaagagtcaaccctctttctttccatgctatttcaagtgggtcatgagcaacactttcctagagttatgcccatagacacctcgatttctacccagcatccttcatgggcttcatgtttaagaaagggagaattggattgtctgagaagagcctcagacacttgtttatagtgtttaaatgggaaaagggtaaaggacaaaatcatgactctggtaactttgtctattggcctgtctcatttatgagtgtaaaatgtcactgaaggttatcattcttagaaaatgttgctgaaaaatgtgtcaagtttaatggagatctgaaagttcttttgcatttttttcctgataaacttctatcattttgtaaatagaagcaaatatgaacttttataagttgacctattgccagaaaataagaaacatcaaaagaccaaaataacaaaaagataatatgctcactaaaatattagaatctatttatttttaataagttaatttattattgctctgaattccttcacggtatgaaagtaaactgtcactataaaagtcccctagatattggtgtctcataaaattctaaacacaggtaaaaataaggtgtttacctattcaggtagattaaacaacgtttaataaactattaatttgacatagacattaccctgggttattcatgttggagtttttggaataaagcccagattacgtttcttcttctaatttggctcatacaaatgatttaaaacgtaaaacaggctgggcgcggtggttcacgcctttaatcccagcattttgggaggctgagactggtggatcacgaggtcaggagatggagaccatcctggccaacatagcgaaaccccatctctactaaaaatacaaaaattatctggacatggtggcacttgtccatagtcccagctactcgggaggctgaggcaggagaagcacttgaacccggggggcagaggttgctgtgagctgagatcgcgccactgcagtccagcctggggacagagagagacttcctctcaaaaaaaaataaagaaaaagaaaaaagaaaaacagggtggtaaaggaaagggccaaggaggatacattttaaaggacacatttgaaacacaatttactttccctaatatcagaccatggtcttgaactgtgtaacttttaaagacatttgcaaacttacttgcatttttaattcaaatatggaaaacaagttcttatttgcaaagggtacctggtcacttggtaaagttttactgcagtcataaagaacattaaatgttctgagttattttgcaattaaatttcctagatttaaatgatcagagtatattaacttagacttacgaacctatgaattcttcttgaatagatttctgccaggagcaaataatgaaacctttaaccaggaaatgacgaagctccaaattcttctgaggatactgtagtaaagtgattaccctggaatactatagtgcatgagcattacaaaggaggtttataggcatgtggagttttcagaactcatgacattttttcccacagaaaatcacattcctggtctatttccagtgtttaaaaggaaaggtaaactggcatttagtatattataggcttttcatcagcttatttggtttgatgactattcctaatatataccccaagtgtagtatttaaaaaaaacagtctgagtaaatttttacagctatgtctcatgagctgtttaaacaacaacaacaacaacacacacacacatactcagataggctctcttggtttggattaacctggtacagaatattagaacaaaactggtggaaacacaaaatcaggccaattctatgctctattatcttaattatatgctcatttactgatgtgttgaaaagcagagatttatcagttaggatatgataaggtctaagtaagagaaaaatccaacaaaatgttacttaataaagacactatgttgtaagaattccaggcatagggctacaggattggtgaattcagtgtctcggcatcataaagaatgtttgtgtgtgtgtttttccatctttccatgtcacaaaacaactggaagaagtggatctgtttttcctccttcatgaggaaagcagggctcagagaagttaaggcatatgcacaaagctactcagttaagtagctgagccaggatttcagcccactcttactaagtctaaagcttgttcctctaaccactctaaaatcatgaaatattatacattgtagatgtttagcattatctaaggacatgaggtgatgcttattattgagcataataatatacaagagcatccatacaactaaatctgcttatcttataactgtcaacttcctgtttctgctatattcttttgtaaatactcattgagatgtttaccttatgcttgaaataaggttataaatagttgtaatttcttaggtatcggatgaactgaagcacaaaggaaccaaacaaagaattcctaatgttattctgctagtcttgagttaagtgtattgtgattatactagaatttcctggtttgtagctgggactacaggaatgtgccactatgtctggctaattaaaaaaaaaattatttttgtagagatcagtctcattctgttgcccaggctctcgaactcctgggctcacgggatcctcctacctcggcctcccgaagtgctgaaattataggcatgggctaccacgcctgtcctagaacttccagagagctttctcatcaccatgagaaagagctacagtgataagcaattatgttatttatcataattaactttaacacatcagtgattgtcagtctactctttcatttaatcatccccaaaactttaaagggggattagttttatctccattttataaatgggtgactctctttaatgcatccatgtatggttgtgcaggttgaagactctaccactgatgagcacagccctatatttttgacttctcttctatgcctcccttgctccacctgagtgaatctcctctgcatccaccagaaaaatgttcttcatttttctgtcttgaaagtttcattggaaccaccaacttaggtcagaataaatatctagacattgtctcacacatttatcaaacatttcctaggagccaggctccgcatggtggtttcaagtaagtgatttgccatgctctgcacaatcacagtatgaaacaaatataattatctctcttttgcagataaagaaacaggactctggaggttttaacagctcattccatgacatgcagctattaacagaattagggattatgttctctcaactccaatgcaatttccattatgataaattagggaagagataagagtcattaggagaacaaggtaaccaagtacttggctggccagaggcaccaaggggattgagatgagggtgaagagtatgagatgctcaggggaggtgcagagtgaagagaaggaacaatattgggaaggccaatgacagacctttcccagtcatttgtttttcccagaattagactctgcaactaggccactttcctgtctctcccaggttcatttggtgatacccacgttgggaaattgcaaaaaaaacagtccgttcaactgtagtcacacttgatgaacatctacgaggaacaaagaatgtcctggtctatcttggtttgaaaagaaaaataaaatctgagtttacagttgaagggtgcatatttggcagagtcaccatgcaagttatgggcaagtcactgaaccatgggccatcagtttcattaccgttaaatgtgggtagtaaaatgaaactattcataatggctgggaattgttattcattcacatatagggacaatgtagaaatgcccaaggcaaacaagtgttacattgttttattaaatttttaccctaagttcaaaagttatgtattaatcttttagatgtagttttgcccctcaaagtctggaaggacacaagtgttctgtccagtatgatagagactccgtattatgttttaatgaccaggtgcacacacatagtctagaaaatggtgcacaaatgcaccattactattcacatgggacagcctgtcagttagtatggagtctaccctcaatggcctccaggagactatttggtgtcttacctccctctcttcatttcctgtcactcatatttctctgcagggttgcagacctacgtgcctgacaccaacgagacctagtcccccaatgctttcattctttaaaatcaaccacttacataataaagaaactctctttttgtcactattgattaaagctcagagtataatttccagccttcattaagatgaaatagatgacagtgaaaaggaaatttaaaaaagagatagagaaaactatttatttagcactcattcaaaagtcaaaactttctagctcttagggaacttggttaaaaaaaaataaagttaacacatatttataattgacctgttatgtgccaggtatcatcctagaaactaggggtatacgggaaatcaatcctcttcaatccctacccttggggagcttatattctgattggggaaaaagaagatattaaagaaataattaaaacaaccacatacaacacgacagctggtaataatcactcagaagaaaaattaagcagggcaataggatagagatgaaggggtagtgatatttcatgccaaggggtcaagaagtgaggccatgtatataaagattccttcattcaatatttattgactgtctttgaagagctgggtactgtgcaagatgtaagatgaataagacatagtccctgccctccaggagccgacagctcagtggagagtctcaccacctgctccattaggcagacagattagaagtctcagggcatatcgctgcagtaacactgtacacagtgaccaatttgaacagattgtaagtattccaaaactcacagtggtttccataaaataattctcacttcaagtaaacattttcagttggtgagtaactctattttccaccgacagcactcatatttgagggctttcttaatgcaatgatgacttgtttttctaattggttgccagggattgtttgggtccttattgaaatgtacttgcttaactcctccaaagcaacttggctggtttcttgttgtactggcaaatgccgcctcctgtactgaaaaatttgttctttctgaaaaatttggactgtccctagatggtttttattatgattaaagataagaaagaaagaatgatagatttatttttaaaaagtgataacagaacagactttacatcaaccagatttacataaatgtaggctacatgctagaggatgtgctattttatcctagttctatcacgctttgtgcagatacctggcccaaaattttcttattcattgagaagacagagaaaagtataattatggccaaaatactagcttgtacaaagctgttttctttattgtgtttttaatacaagctccatattcccagttttacacaggattgtaataatacaacattgttaacaaaaaaatactcaatcatgtgagagaacaacattgagcagagaagtcttttgtttttctgaagacagagcctttttgataggggatgggagatcatatcacacacagttgctccagagtaaaggagacagacttgctgatctctctgctagcacaaagataatccactcactctacaggctccttgttggcacctcttcctctttgcattctcactgtcacattcctcaccctttgccataggagacccaggagaggaaattattttggctacgctgagacataagcacaggtggtaccacttgttataaacttttcagtttttgttggagctataagcctactttataggggtcttgagctgtttgttctatgagagaaagggaagcaatagcttttggccctcaatgttgattgattgcattgcggctggtttccacaggctgctggcttgcagaggacacatttcttctcagtggtgccccagtacaatgatgccaatctgaattacatactggctacagccaaatatcttcatttcctttctgcttcaaacagtggatttgggcagttctttttattctgttttggagaaatgtcacacgaaattttgaattaagttaagctattattattattattattgctgtaccaaggtaaaatcaatttgtcataaattttgtcttttgcctacacgttggagtctttctcattggtaaagttttcactcttatcatggccttttacatagcagctcccactgctatgatcatgtcagctttaggggtaaatgacagagaggaattttgctatcaaagttacttccaaaggtcatgaaaagtcagtcactggataagatcaagaacttggttctaaatataaactcttcctcagcacatgcaaattataaagtctgctgaagtctaactctaccataaaatttcccacaggaactctgttccttcctaaatatttcattttctaaagatgttactcaaggtaaaatttactccattgaatcttaagtagctgattctagggcctatgtgtatgccccacatttccttagtgatcagatgctaacataaatacttccatttttcagctccgtgaactttcattcacagaatatactgcaattaagtagctttttagagtagtcttcccaaataggaaggatgttccagttgttggtgggtttggcttaggttatgcagtttatttgttttggttgtatgttttgaacatatgcccagggcttttaaaaagaatgatgggaacatttgtacaaatgaaattgaaagcaagggagcgggcattgccaacgctttaattatgaacctagcaacacgtgtacttatttgaaggtttaaagagtataagacagaaaacagggaaaggagggggcacctagtggtctcaaacgggatgtctgctttttcttctcagcaggcagggaataaaaggcataaagcctttctacccttttggatgcccaaggatacggcaaactgcctgtgtccttttcccaatatcccgttcgctttgaagcgctatcaggacagagggtaaagttctgagagagccagaggggccatttaggtcaggtgatctgagggttccacccttcctcctcctgcaatgcttccttaaggccaaaagagccagcacatcatggtgtgctgaactcccgtgtgtgtgtgtgtgtgtgtgtgtgtgtgtgtgtgtgtgtgtttcatgtctgtgtcttataaccctgttttctattgcctgagaagaaaagtgcccaactctttggaacctctcgtcttttgacagacaaatttcccagcaactgtaaccagaatagttggagggttgttacacacgagggcattactaaggttggggtggtgaaccaaaagaatttggaaagtttgagaaacagcaagatggggtggttgacacacacactttccttttcctttaattttgagggttttttcccccttgcatcttcaattctagtcaagtgtatttcattccagacataaaatcaaaatactcttctctccagtctctgtgtggattaggagtaattacaaggttaaaacaacattgtctcctcccttaaaatctgtagttttattctacaaaaggttattttgaggggtctgtttgactgtctttttttcatgttatatatgagatggcatttccaaagtagctattatgctgttctaatataatttaaagggcaggggatagctacctaagactgtgtcttttacgtttaaaccttttttttttttttttaactgatggaaagagatatataccaacacaaatagctcatgaccaattctctccctgagtatgacagctagaactagtggttcccaactaaatgctaaagcccctgaaatgtcccagcaggttgctgggtttgtactacaatgtccggtacaaatttcgtgtaattacagctgactgctgaaggaagcctgtgttctctgcaggctgttaggaccttagttatggccagaagggtagtgggtaggattcaaacctcctaccagtgccagcagctagaggctttcttcagagcagggacaactgactgtaagaataaaccagctgtgcagagcagaattacatagcttgtagatttaggtaaaatggtgccacctgtgattttttttttttttttccttttaagaagtacagaagaaagaaaaaggcaaatcctggaaaaaggccgctagcttcttaggaaatgccagaatctgctcactggatcattttcctgggagcaataaaacaaatcaataaatttgaattgagttatcatggtggttttcagaattacctgagaagcttgccaacaattctgactcctgggagctggcccagagtttctgattcagggtctggatcaatcaatgagtctgggtcagccataaaatcagtgttttgccacttacaaaattattaggagccttaaaagatatctcttaaggttctctgtgacttataaagtaccatacaaatgttaacatttaactaatagagtgtggatactgtacctcttatttgttaggcattatgttaactcttggagaaatccatgtgtcctagttgtaaattgatagttttctattcttagagttcaccaagaatactttcttctcaagaaaatgaattccttaagccaaaaattacaagcaatatctttctctctcagaagtagtagttttgttgttcctgatttaattctgaaaataacacaaaggcatcaagaatcaagactagtttcaatttgcttccaaggagggagttttaatctttccaattctttctttttttgtttctcttcttgttttaatcacagatttatttggaggtagggtggttggaatttaggctagtttgatggcatggcttcctattttaattggactgcaaagaataaaaatcattagaggatgtttgtattgtatttggataaaaagggttttccttcatatgtgtgccttgctcatagcccacattcttagaatgacttgatagtgcatagttcacatacctcacacacagtggaggtttgattgaatgagcagcgggatgaatgggcatacatgaaaactaagcaataagatatgctgaaagcaccacaggcatatataaaatttggactgcatctcatttgtagttactacttaaaaatggaattcagccaaaggatcatttctttttcatctataaaataaaagcactttcacaaagaatcctagagctgggagaaaaaaaagaaacaactttaaagataatctagtctagtgattttcgaattgtgctctctagagctacaaagcaaagttgctccaactttggctaaacatttgagtcactgggaagatttttaaaatatagatgctaggctgggcacagtggctcatgcctgtaatcccagcactttgggaggccaaggctagtggatcacttgaggccaggatttcgagaccagcctggccaacatagtgacacccccttctctactaaaaatacaaaaaaaaattagttaggtgtggtggtacatgcccctaatcccagctactcgggaggctgaggcacgagaatcacttgaacctgggaggcagaggttgcagtagctgagatcgtgccactctactccagcctagggtacagaggagactctgtctcaaaatataaacaaataaatgaattaaaatatagatgctagaacttcactcccagagaatccagttcagctagtatgcgtgggctgggcacatatgttttaaaaggtggtacagattctaatgcacaaccagggtggtgaaccatcattctacgggtttgcaagtccaaacatttggactcctgatctgataaatacaagtatgctccctgtagacaatatgatagaatatattaaactggaaaaaatgggatgtgcttgtgccctataaagttttcattaagttcaacaacaacaatgtaatctagaaaaattcaattatacagggttctattatacactcttatgataggacattctgcaggtgcacaagggatacacagaagattaaggcccattgttttccataaagattttacaaggttggcctatggcagaagcatagaaagaaaaagagaaaaacaagtataaatataactttaataaaaggcaggtgtgctatgaatggcacaggtaagattgaatcacagatgaaatattattgctttcagcatttgctctaatttctcatcactacccagcacatatctgaaaactgagcagttttgatatccatcgtcttagaacacgacctgttttttaagagaacggtgggtgcaaggattaaaaaggaaaaggaaaaaataaaacagttgtcctgttccttcttacctccgcttgatttaaggtaggatatttcttagagcctgggactcacctagcaggaggtctctctgagggaggaaaagtaaaaagcatgagtgccaactgttcttttcagaacagtctgcttctagactgctggacccttgtgtctttgccaagggggagggcagagcagaacatctgcctcacttgatttgcttttgtgcttctccaggacaaagacttaatagtcagggtcatttcatctccttgcatggataatgaacaaagctgagagaaggaaagaaagggaggagaacaaaaggagagaaggaagaaagaaggaagaaagagaagaagggagggagggaaggagagatattaagagtgtccgtcatctgttgttcttcatattggtcttaactcagaatctttggaatttttttgttcccttcccaaacacaattatctgacacaagaacttgcaagatgtgattaaataaagaggcctttcaatatgtgattaaacataagtttgcataaattcccactaactccatctactccccgcttataacattttgccactccaattaatggatcgaactggtcattaaatatatcttggaggttagtgctttctattatcttttatccaatttcagtagaatattcagtacaagagagattcaaagaatcagatattctaatggaagtagtattcatatgtggtagaggaatcaggaaaaaaaaactgacttgatgagatgattcttaacggatagataagtattcaacatgtaggtgatcataagaaaactttctggctgagtaagaaatatggatagttttatccagacaatgctggaatttaggctattggtagaaaagaggtaaagattagaatggaaaaatgggctcaggcagcattccatttgtggtagatgtcgaatgctggtagaacatttgcacttagttataaagtacgtacttaatcatgaaccactgaggttttttttagcatgggagttacataatcaacttgtgttttattaaggttaattgggcagcacgttggggcatagattggggccaatcaggaaaacaatgggagcagaagaatatgcaaaagattattattgtattagtccagagaacagtagagatacttgtgttagaaagatgggcttttggtggtaagaaaaggaaagaaaacatgatcttaaagaactgaacacaaataaataaccaagcaggaatggtgcttctacatttataaaacaagcactaacatgaatagactatgtaaagtaatcacacagttgggaaagaatagttttggtttgccttttaaatctctccaagacttgttcagtgttactagtaattttggagatgtggccaatgagttttgaaaatcaggataacttccagtaatatatgttcctataggaaataatgtttacaggcaaatgaatgctctgttcatctaagaatataccaagttaaaaatgaaaatgtcaacaccagttagaagtataaaggattttttgtccactgaactgatcaaattcttttgacttcttgtaggaaagcatgaaactttataatcattctcatcaaaagttccgtggaactacgaatccatccactcccgttagactctattattattctttgtctgggacattttggtgtgtgttgtgattagtgaggcctaactctgaccaaactctaggtcgttgtacctttcagcacagtctcaataagaggcaatattaacgtgacatctaaccaggccacagtggtatctaagcacatgctatcatattttgcagcagaccttttttgagatctgcttctagtgcaggttctgggcttggtggtgatgagaagagtgtgaagacgctcacaatttaatagggtgaaattatacacaataaaaatacagagagataggaaaaaagaagaaaaggaaaagaatgagagcccaggagcaggggaaattcattctatttagtggactatacgggaggctttataaagacagtgatgtatcatgtaagatgtgcacctgacaaccagttcatttcctatttctatccttcccttcctttactttctgaaatatttatgaaatgcctattgtgcttaaagccctatgacaggagctctgggttccaatcagacatgaatcctgctctcaaacaactgtgaaaacattacattgagtatgtacaccaagtagaaattaaatgatccaacacagattcttgttttctggtttcttgttgtactggcaaatgctgcctcctgtactgaaaaatttgttctttctgaaaaatttggactgtccctggatggtttgtattatgattaaagaaagaatgatagatttatttttaaaaagtgataacagaacagactttacatcaaccagatttacataaatgtaggctacatgctagatgatgtgctgttttatcctatttctatcacgctttgtgcagatacctggcccaaaattttcttattcattgagaagacagagaaaagtataattatggccaaaatactagcttgtacaaagctgttttctttattgtgtttttaatacaagtgtaagacaagaacagaagtataagacaaagagaaaacattagaaaagtggcagaaatatagtagtcttgatgccttgctatattcactgttttgaaaactgttactgaatgcacaaggaaacacccccagttactcatggggactctgctgcatatggaaaacaaagcaagatctggagacagtgagatcctggcccaggatacaatgaccaacttgccactggtcatttataatccctgaactgcataggaatgcgctccctgcaacgtgaaaatcaacgtgtggtatttcacttctgagtgagttttttggaaaccatcctctgaaaccctgttagaaagaacctttaaaaataatttcatggttctgtgttagtgctttctttctaaaaatgtaagagctaaagttggttggtggacgcagaagtcttactagctttgaaaaactgctgtgcttcgtgttttactctcgtttatttctctcttcctaaccattgaatcttaaagcacattctttcattaaggagattcagcaccctctagagtagtggattgtgagtcattaactgcctgaagcatgtccgagtcttgagagataagagtcaggcttgtgcaaatgaaattttaaacaaatgctgcagtacttttgtatctttctcttaaacagtacaaattttggttgaccatggaaataataatattgaagttcaaaatttaacttccttttcaggttatgtcccatgatttgacatcctacagatagagaaacagagttttccttctttcaaagaatcctcctcacaactatctgtgattcatttccattgtgtttcccattcttgcgccattcagcaagatggagcctgtttcatcagtttttggtctctgtagagtgttcctttattcaatgattaactactagctttctggtgacttcttaatctttttctgtattttaaaatattccttcatttcagaattttcttacctaagatacaaacactaaatggaacataagtaactgcagttgctttcctccctaatcagctctgcctttcctactgaagatataatttaaaaaatgtatcaaaacccatgaaagttaaaactttaaaataaacactaggcaatttgtttcctcagtgaaacaaatttagaggttaaggtgacagaaatgtgtttatacctcatataactaacaatgcacccatttatgttagcaatagttttattttttaaaaatgctgcaaaatgtaaagataggtggcctcaaaatgtttatactaaatagaatgaaaaaacaaaaccaatacacaattttgttaggaaacactgaaatccactgcttaatgtatgcattaatgggccttcttgacaaatcacctgttaaattttagctgacagcttgtcatatattaattataaataagtgtaatatacagttatcataatgcatgcaacaaaaaagaaataggaaaggtaattagagtatatcctttgttttctcccttcacttcttgctcacaagaaaaaaatgacccagtgtttcacttgggttgggatagtgccaatggttaatggaatgccccagtctactaaagaatttaatgggaatatccatttgtcacagtcgcatgctgtgatctccagtagcagagccagtattgtcacagtcgcatgctgtaatctccagtagcagagccagtagcaaatagcattgtaccataacgtcctctacacactgcaggtgagggtgaagtgcagcagctgaacagagcagtcagtggaggaggtatggcttttctaggcctttctttatgaaagatgtggatttcttttttttattattattatactttaagttttagggtacatgtacacattgtgcaggttagttacatacgtatacatgtgccatgctggtgcgctgcacccactaacgcgtcatctagcattaggtatatctcccgatgctctccctcccccccaccaccccacaaccgtccccagagtgtgatgttccccttcctgtgtccatgtgatctcactgttcaattcccacctatgagtgagaatatgcggtgtttgcttttttgttcttgcgatagtttactgagaatgatggtttccaatttcatccatgaagatgtggatttcttttcttaaagaggacagtgctgcctaacagcaagaagagatgctgccttgaagaaaaggaaagtgtatttttttcacgtggaaaaagaaagcataaatgattgcacaacatgtctcaaaatctccagctgcctccttttctactggaagcccacttgtttgtaaagaatctttgggtagtggaatcagaacaggtgatttcaatcatcagctagttctgagtttgagctttcaaatctgcagaatgggagtaatgacacctaagcatgcaatgttactggtagaatccatagaactacatgggtcaaaaaatttagcatggcaccttaattaatatcttcttttcttctttacaattgaatttgaatgatagggttgtctggctgctttttaatttattcttgagacagagtctggctctgttgcccagtctggagtgcaatggcgtgatctcggctcacttcaacctccacctcctgggttcaagcaattctcctgtctcagcctcccgagtagctgggattacagacacgtgccaccacgcccagataatttttgtatttttagtagagacgggtttcaccatgttggccaggctgatttcaaactcctgacctcaagtgatctgcctgccttggcctccaaaagtgctgggattacaggtgtgagccacagtgcctggccttttagctttcttatgtgctagttctgtgtttggccaaagcaagctactgagaaatgctgtataacttaaatttgaaaaatactctctgaaataaaaatagaaacacacgtagaagtgaatattgttatttgaggactgaaactattattgtttcatttatgtatttagcagtaagtcaataaagtgtattagacataagctaacacctacaggaaaaggtcttagatattagatttagtgttttatgaaattcctcactctcttccgaacatgtcacttgaatctatgctgtgtttctccatttagctggatttaataaaaaccccagtagtcctcacaaagaaaacatgattagcaacaatttattccataccttggtcaataatttatcatcactatagaagtgaaaatattggatttgaagtcaaacagatctaggttcaaaattctagcttggccactcactgtgtcagcttggccaaattacttatcctctctcgtcctgtttcctcacttatataatggggctaataatacttaactagcaaggcagttaagattggaaacgaggcagtgcttccaaacttttaatcactagccacatgatcaaaaaggaagttttgcaaaaaaaataaaaaaataaaaaataaaacaacttagtatgtataatgcactctgtgttttttcctacttttctttcatttcagaaattgtttatgacccactagattcgcaacccacataaggtcatgaagtgccttttcaaaaacaggtgaactttaacatgcttagcacgatgcttagtacataatacaagtgtaacaactgattactattattgtcatcgtgattatttttagtctcctgttaggatgcctcatgataaatgagaataaatcttccaagtacttctaggaactaactcctttggatggggtccaaaacagactcatactcatcgtatgctgaattatgcactagagggggtagtgctatagcaaagctcctgtgtgctatttatcacagaatgttagagctggaaggaaacgaagaaaatgtcttgtcctattgcttcatttttccttcataaaagtatttggagttttaaaaatattctatatgtattgctcattgataagttggaaaactggcttctttgatccagaatgtggaggtgatgatgaatagctggtgggatggagggcactggatcatgatgtctgagttcttgtcctgcttctggcaccaaatagttggatgattttaaattctcagggtcttcgtttctttacctgtaaaaacgaggtaatttcaacaaaagattagcctgcttctgatgttctttgacttaaaatttccaaatggtaaaccagtccagaagtttactagatgctgcagcattaggacactcttttgttgccaatctgctctgaatatattaacatgagtgtagcaggctgcagtctcacttccattactactcagatgtgcagagaaactttggcttctctatttgctgtatctcccgtttttcagcagcatcaccctgaataattctcagtctcattggtataataataactcagactctccagtcaccttgacccatccctacttctttctctaagatgtttgatgtttggttgtagtagagacaagaacatctaggacttcacagtgtcagaaaagttgggcttatgccatttacttgtactgtcctctgtatcccctgatttctgggtcccttttctacttgctagtttaaatcactaccagtggtgtaagatgatatatcctcaactatgttcccagatagcagtcagatttaccagctgggttcttcttaaatgaggtcagatctgcaggcagagtgatacatttcccacaaaagtaacagcaaaggaatattaggggttttaaaactttctgtttctctaacatgcaactttggatgaggaaagtgggattgccagtttatgggggcacatgtggcaatgacaaagccaagtaggagtttacatcttgggtggaatcacctatggggaggctgagatttctggatccatccttaggtcacagggggcaagggtccatcatccctgcacagcttttcagctcctgtgaaatcagaatgattggagggtaaacctcgtttgaaggcttgcacaagaattgatttcttcctgattttcactatgaccctaaccataaaaaagcaaaaccaaaaagccaagagacaatcatgcagggatgctcctcccccacccccaaattgctggaaaactaaacttcgtttagagagattcctttaaaaaatatgtgacttatttttggagtacatagggggcagaggattactgaccaatccttcggtggctttcaggagcacagcatgcagatggtggaaacaaatgggcagcttgagacagcagtcagcatgctggatcattaagtcaaatctaagggtgtctgtttacctttgctctttcaaagacagcccggagtctgcagggataagtattgtgtgtatgtgctggcctgaacacagaatgagcaatggaggtggctggtgagctctagctttactttatttaacctttctgaccaagtttctaataaattttgatgggccaactgccaatggtggcttccagctgccgactttttccacatgctggagaccctatgagtagtgaagaaggttaaaatccatctcttagctaacaatacacacagtgcaccttagtcaccttgggttgtgtggatgaagagtgcatagcccaacaactggatgcttgtctagggaagaggtgttatagtgtccttcagagaagctgaggagcactgcatttccaacaacataaaagcaagtggcatgaaagcaaaacaagttatcacactaagattttggttcagtacttcccagtcttcctcgttgccttcaaagcggatcctacaagcatccccgaaggaggctgccaaggtgaactggggcggacacaaactgtgtctcatcaaagcacgctccctatagtattatcactgctgtcaatagggcgcgaccagcattttttcctcctttgcgctgggacgcagagcaggaagcgcccgggtgtgcatctcttaggagatgagtgaatctgttggagagggtcttttctggcctggtggatggatgctggggagtgacgtcaccccgccccctcctctggtgtgtgtgtgtctgtgtgtctgtgtgtgtgtatgtgtgtgtgtgtgtgtgtgtgtgtgtgtgtgttgcctccttcacccacctctcctgcctgcccctcctttatccggctctctggccctttcagtgggtcagtggtccagattcagggattcgccagcgggcgcagcgggcccagctctccccgcgtccgggcgcacccacactcacactcacgcgcaggcaacgcgcacacacaatcccccagcgctggagcacagcaattccgtgggatccccagcacgttacgaggattttagaaatcacccacacaaggaaacaaagagagaagcctttccaatgactttcctgggctttttcgtttaattttcccccctccccaaaccacctcttctgcagccgtaactaccaggttcaagccaggtccaaagactgggctgcaccggccaccccacctcccggccctcgactctgctcgggccctttcccaggcgtcgcctcgcacccctctccccccacgagcctcagtttctggttacctcgcgtgcgcttcacttttggggggaagaagagaaggggagggaggcaccgaggggggcagccgagttgctatttgtggccaaagaatccgctttaaaagaagaggcagcaggaaggaggaaagaggagaggcggagggaggagaggagacgcggccccggaccccccagccgcgagcggcggagcatcgaggagcgggaggaggaggaagaggaggaggaggaggagggggaggagacaaacagcggcggcggcggcagcgagagaagcgggcgcagggcgagcaggaggagcgggaggaggagaaaccgccgcggaagccgcgggctcagaagggccaagaggacggcccgggaagaggaggaggaggcggaggaggaggaaaagggggtaggggtggagggagggcggggggacgcgctgccttggatgctggatttcgggtttttggactcactcgctgactctcttccacttcctcgctctggactgggctggccgcacgagggctgggcggcggcggcgaccaggggggcttcggcggcggcggccgctgctccgcgggattaaattggccgcccggaggcggcggcgcggccgtggcggggcgcgaaggcgctggaggaaagtgttggcggcggcgcgggaggcggtggcggcggctgcccggggccaacatgaccaggtgagtccctggaactgaccccgtccgccccgcggtgtcttcccctcttgctgctccggaatcgccctgcgcccggctccggctgccggcgcctcccgagccagagcgacacgctcgcgtttccgcgagcccggcgcccgggcaccggagcgcacagtttgctcctctggacctcctcgggcagaggtcctctcctgctgggttcacttctcgcctgaaacctcagacccgggagagaggcgactctagagaatgggggtgtccgggtatgtgtatttgtgcgacccccgctctctcctcctagggtgggcgtagtattgggggcaaatggtggagcggtggggcaatccacccttacccagggatcctgccaccgccttttttaaaggcagggattactgttttaaggagggctgactacggtgagggggcgatttctttttctttctttcctctgaactagtggggagaaggagaaatagcaggaatcaaagtctacgcagctgccatagaggagggggattgtttgggagaccttcccgtggcagaatcaaagctcgtagttcagctgcgggaatctggtgtacttaacacacacattcattccgtagggaagggaacgcatcttttataatgaagagtcaaagttgtaagaaacaatttaaaaagaaagccacgaacaaaccaaagattatttgctttcccatagatttattgtagcttttatgtgggtgtgtagaaaacttgcattgcttctctggacgttgattttcatttaaaagcactagcaagtgaagtcagtttttaagtcttatgcttaaaaaaatcttgaacaccaagtgtgagcttggctttcattaatttggtgttccaggattccagatagtagttccattctccaaaaccaggactatcacaatccacttttattgtttccagttcgcctcccagtacgctacttgccaaatgtctcctccgttttctaaaattctcagagtaatcccccagcctcatctacagtttgcaccttaagtatctaggaagattcctgagggctcgttctccttgtatttcctcttaaagttatatatatatatttacatgtgcaaagacacagtgccagtgacttaacagagtgtagctcacacagtttgaacctctcagaggctagtaactgcttatgacttgaaataggtttgctgttaaatttactgagctacaaatgtggactttatcctttggtgtattcttttctaaccatcctgtagcgcatctctggggacttagttcaaccatagatacttctgaccattttcagtatttttttctctgtttcaaagtgcacacaccaaccactcaacttgagtaaaacaaggatgatataccaaaacttgaaacattctgatgtaaagggatctgtagagataataacttaagattaagttgtatatgtaatataataatacccagtaaaaggcttagtatcttacttactttgaacatatattctgctttatgctacagacactatagcaaaaagagaacacattttcaatgttccgtgtctgacttatggaaacagacatcctaaatggacaataaaattttccctacctcccacattccataattatgtactgtactttgcttttcaatggagctagcaattctgtggcagatttcttaaattcaccctcatgctatcagctattattgtactttcaaagtgtgaaattgacaagctggtcagtttcatgaattcagctgtcagattgtgtccagttaaaaattgctaaaagctgtaaatgtgcctgcctggaattttcttttgtgaaggaaggacagcaaggggatgggggattaatgggtgttattaattgtagatctttaaaaatagatggactccaatgtgagttgtatcactggctgttactgggaaatacgtttagatttttactcctgtaaaagtggcattcaatttttatctgtatcttattttaaatagtactttgcatagaaatcatctgttcttatagccctcagtaatatataataggaataagattcaaataggaacactgtctctctcaaatatattttaatatagttgagtaatgtattatttttgcatgacatgtaaaaaggtggatgaattaaacattttattgtgtaggttatgtaacacagattcttcttgggccagagcagttgtgcagttactcaagtaatgaaatgcagcaatttattttaatatatgtgcgttagagtagataaccatagatgtaaaactgcttaaagtattaaatacagtgatttgatttgccttttaagattgacacttatttaaatccagaatatctcaaagtctggaactaagaattggaatcccctcatctgctgctatttgctaagccactaggggcctgtataactgttcttatatccaggaggtatcctggtatggcatatgcaaacccttcctagagagacattaaaaaaaaaaaaaaattcaagtaggcattcccccaagtttttgttttttcctttttaatacattaactcatattctgatactagttatagacaatgattgaagactatttcaagaattttatttagggcttctctggcactatgattttccatatagagtgtgaaaaatagaaaagagaaaaggtattggtgcaaattcatatgtgattccagttctcagtgtatgacaaagataaacaagaaggaacattaataacttttctttattggactgataaggatgttatttgcataatgtagggttaaaagataaatgaagcagaattactttaagggaagtataggcatagattgatgatgtgattaaagtagctttgtaagcgctgtacaagtttgtatggaaagaaaatctgaggctgtgaccacagtttagttagcacttgagggacctggactgaagacgcactatacatttttaagtgtcagtttcacagatttgaaatcgaccagccatggcaatcttgagagacattaggcagtgaggtcaagtatacttaaactgttctttcgttgattttcaatttttcaaactgacaagggtgactgtttgtaaaagagtacactgtaagtatttgcatattagatttccttcagaccaaacttgatttatcaaaccattggacaattctatttttaaaaggattctatgcataattaagaattcattaacacaatcacatatgaaaagtgtcatttcaagaaaggtgaatatttcaaagatgacttcattttaaaactatccttccttagtttaccttttattttaaaacaacccttctttagtttcattgtgtatttgcaggcagtataagagtcaagtgtgtgtgtgctcttgtgctctaacttgtgatcctaggagcatcagacttaggtttacacttaaaatatctatgcagaaagcctttaatcatggtacctttttaattcccaaaagtttctaggaatctcgaaaataaactttacgttttatgtagtgtactcaacttagtggtcacgaaatatacaggatttgtattacatgcccagatatatgaagtgctaaatatagatataattatccagttttcccagagtattcaaaaaatgctttactttttcctattttcttaaagtgataatagttacatgtgatttaaaccaaatttagtctgaatctcttttggttttatggagttatttacctttttttgttgttatttcatctttctactgttcagtttctttgaaaatatcttttaggaaagctgcttacttgtgatggcaaagaggcagcttactgcctcaagcaaaaccagtgttttaaaacattcttttttatattatcagtgatttgccaagaaagagcaaagagaagagttattctctctgtgaactacaagattgagaattcctatgtaacacatcaactgaagaaatctgataatgtggaagaagattgcttagaaggaatttgtcagtaaatttcatttgaacaagcatcacttgtttaagcttctgtaatttcatggcacagtgacatttctaccaaaggataggtttgtttgggatacattttctatatgggtaatctcatttgcttctaattggtagctggtgacacttattaaaatgtcatgcttggcttacatctgtttccacaaagtgtccaaattctctcccttttttaaaaaaataaaaatggatttcaactctccacaattaagcccttaagaaagatagctaaaagaatatgtgacttgtgcttcctgattgttcattatatgaaattatagcctcagatgtaaaagttcagcattttctttgcgtcataagtcttaggaaggtcaaagagcaaatgcttatatgttacagcagtctgacttaatgtaacctaaataataatgccatcacaatggtgctagactggagaattaatgaattagaattcttacgaaacatagttcaaaagattacactgaagacctgtgtctctcatttcccccttaataaattacccatttgctttcaagaaatcaacagtttgcatttttttctcttaacagtttatttataaaatatttttaggacttagacattatgtactttacgtattacatccgtgtgtactgccacgctcctcgaagcaactcacagggaaaaaaatggactaaaacaatgcctgcagtgcctccctcctccctcacaaaatgattaattctgtatcttcctgttaattatttttagtttgatgctaatacatttaacaggaccatattaatactactcagttggcctatgacattttgaaaattaccaaaagggggaaaaaagagagagacagcaaaactgagctttttgatggctttttaacctctgctgtccttcaaatcaaatccctatgtgtcatagataagtaaactaaatgaaaaagatgacagtttggagagctaagacagctcattctgtctgtaagctagtaggtcatgtataccagcaggcaagtagtattgagacaacttatgttcttccctcttcacctgcgacgagcaaaccttgctttcctttgtaaatggctgcttttacgtggcaggtccccactttggctcctccagcatttacaacaaaatgtaagagccaaagcagccatctgagtcaaggctttctcttagttctttgaattcattgaccagaaaggctaagtttgcttcttccttgacattcagataacaatgtcaggagcatagtgacctttgccacatggctatttactagatttaactctcgtaactctgccagttgcatgagattgattaaatttataaattctcaattgtctttttctttttctttttttattaacaacatcccttgagctatgttctttaatgtagcagtagctaactaaattgagatttgggaattgtatttagaaaacagcatttctcagtactgctttggggtttggagaaattgtactttcaaatacataaagtgatcctctgtaatgattggatcacaagtaacaagagacatctttttttttttaaaccgttagtagatggatttcatttattaactaaaagggttgtattagtaatgatttcataaatggttggatatcagttattgttaattctcatttaaccatgcgtgcatgtaatacatattaagatgatgctaaagaattgcaaaatctcgacccaggttcctttctttttaggctacagtgaaaagaacattcagttcttataggaagaactaaatttatgcctcagttctgccacttattatctgtgagctctcggaggaaatgataaaacatttcagaatcttagtttcatcatctgtaaaatggagggaatgaataaccatacatgtaatgaatatccagtttgatcatacaaatttatcttattttgtattttaaatttacataattctcgaatgtagaagtcacgtaatgaacataccatattcaagaacactagttcctatgatagagttctgttgtcttcagctatttgttaaaagtgattgccacttgacttaaaaattaagatctgttggatacggatgttttgtgtacgtttttcctgttggcactctgtgtgtactgctataattagtgtagttgctagaactctctttttctgcttagcacatttattaaagtctgtacatattagcatggcacggtatgttgtttatcttagaaagcatttaaagcaaaagctagaaataattttacctagaatgcacaaagagagcgtttctctctaaagtctaaattttattaatatattcctggggatatttgatttggagtttcagtttgggggaagaaatgtttagaaaagcagttaattaaaatactgaagcagaataagtgcctttttttttttttctttaatggtagtgcatcttagaaagctgcttagacttttgcccagtgcagctgtccttccctgaagtatcaggtttcaagagcaatgatggatggtgggtgcctgtagccagttgtggggtttgctctgaggtcaaatgtattgatggaggcaaggaatttactgccttctgtctccctaagattcaccagtacaattttacagggagaaattagactagacacatcaaatgctgatccagtgtctgcttataggtcaacaagacatatgttttcaatgtttaaaataaaaattttctccgtcttccttcctcctggcccatcccatctaaagggacattttgagtatgctctaatgatttcttactacacaagtagatcctggcctccctgtgaaaacacattccaactacttgtagtagtaacttaactgaaatattattagagaattttgagagaaaaaccaattcagacttctctggttgaaatagctcattatgattttgtagatacattgatttatgtcttattttaaaaagatctatcaagattatttggctagctagaaataagagtagtttgttggatgtatcttaaatattctaaatctacttactggccaggtaaccatttttgcttttctcggggagggggaagaaaagaggcaactatgtttttctagaggaataaaatattggaagcatcttccattggaaatatgccatggatggaagttgttctttgtcagttacttctttgacattcactttcttcatcaacatggaactctgtctccatttgatgtttggcatctatgtctccatctccattctaaactcttttattttcattttatctatatcccctttcaggtggctatctgtactgtctcctgccatatgtctatccacttctcatagaaacaataatttctacatagataaccttcaaaataaatttcctcgcttgtctctggagttccagacgtgcatttctatctgcttgttacatgactgggaaatgggaggctctcctgtatcccaaacattgtattttgtaaacccaaaatactatcttccatccatatctatttctcttttcttcatacttcatctgagttatcccttgatcagaaaccttggtgtcatccctatctcttttcttccttttgttcttatcctcaggcaattttgtagattctcctcctgtaatcttttcactttatttcctttccatttctacctttcctatgtgttctgcactccatacgcagcttcttaggtggtttttgtgttttctcatttctcctctttgagtcttcctaatttttgctttatgaaaggcaaacttgctcaagtctacttgatcaagtgctcaatactcaacacagccatcagagccctttgcagtctgctcccaaattgcatgtctagccttctccctcaccatagccctgtgatactctgcccttgtgcagtatcacattccctgcagtcattgaggaggctgtgcttttgggcacctctttagttctaccaatactgttcctggaatctcctttctcttaccagctgtcctcacttgtatccattgaaatcctattattctctcattttctaatgctcagttcaagtgctattccttttcgttgaattgagttgaactaaagaattatggaccaggcgcggtggctcacgcctgtaatcccagcactttgggaggccgaggccggtggatcacgaggtcaggagatcgagaccattctggctaacatggtgaaaccccgtctccactaaaaatacaaaaaataagctgggcgtggtggtgggcgcctgtagtcccagctaaaaatacaaaaattatctggacatggtggcacttgcctatagtcccagctactcgggagactgaggcaggagaatggcatgaacccgagaggcggagcttgcagtgaactgagattacaccaatgcactccagcctgggggacaaagcgagactccgtctcaaaaaaaaaaaaaaaaaaaaaatttttttttgagttgagtagaattgaaaccataaaatgtgaagaataattattcattagaaacctctcacaatgctcaggaccctgagataggtaaaaattaaaattcctttatggggaaaaatttcattaattttctcaaatttacagctatagcatagtggttgatatgtaatagttgtaatagtgattatttctaaaacttactgagcatttattatatgccaggcattctgctcagtacctcacctttagtattatgtttaatgtctaaaataacattctgtgtaagtcagatggttttattatcatcatttcacagaagagggttgatccatggagagattaagtaatttgcccaaggttgcatagataaaagtaataaagatggaacatagggtcaagattttaagtcaagcatcccaacttttatctgtttcactcactcttaacctcctcactcttgtatatgacatgattttaaaaaaaatatttatctcacatcgtccaggcaagtacgcccaatgacatggtgctttcttgactcaaattcaagaaaaatctatgttggaggccaagacaggaggattacttgagcccaggagtttaagaccagcctgggcaacatagcaagaccctgtctctaccaaaaaaaaaaaaaaaaaaaatatttgccagatacggtggtgtgcacttgtggtctcagctacttgggaagctgagatgggaggatcacttaagtccaggagatcaaggctgcagtgagctgggatcgtgccactgcattctagtctgtataacagagcaagactctgtctcaaaaagcaaaaaactaaaaaaaaaaaaaaaaaaaaaaaaaggaaaaatcttaagcattaataagtacgttgcctctctaccgtttctgaagagtatcttctgttcctttctctgcttgggactggaggcattgaaaaaaacatttttttaccaaaggggttttgattcgatgaccttttttttctgcagatggcctccagctctaaaattttatcctattctgccagtgatacaactgccagagctctggggtcagtcctggagcagaagtgtttaaatgaaatatttccaccaagaatagttcttaaaatcaaaaaggctgccattttcatagctgcccaacaggtaagaaatcagaagcatttttataaagagaactatcgatccagcagggatatctgaagagcagtcacccatcaaagaaatggaattatgccaagtgactgttatatatgcattctgcttattggcagcctgccctataccattttatctgagaaacttttgttaattataatgtcttctaaaatactcttgttttcatttcacccgttagtttcattatcaataagggtggatgatttgattattttttccatttaacctattttataatagtttagcctcttctccttgtctgtaagtcctcagagaactatttctgattatgattttataaataataaaatacaggatcttatatttgtttgatgatttggaaaattattttttctctgacaagaaggtaccccgaagttttaaatcagacatgatacataaaataaagttacatggaaaattactcggtcttttatggctttcatgatatctgaacaattaagtcttctttgcccaggtttctaaaatgcttctcacatgcatacactggcctatttagccatatgtttttctaccagttaatctataaacataacttcctagaagcatgaagcagggtgtacttttttaggtaatatgtagcaagggttttttttatagttaggttatcaatacacattttaaaataatacttataaattaagaatgataagtttaataaatactgttatgtatattcagttactgatttaagaaaggactgcttatgtttattttaatccgacttttactatttaacagactcgacctgaatttgatttatatgtaccaaaaaaaaaatattttaggaaaatattaatttcaattttgaattttatcattcaaaatctgttttctctcagttacacttgtattatatcgaggataccaaaatagatactaacttcctttccaccaaattattcactgtcttttcatgttattaggtatcatctgttgaaaggcccccatcttctcatgcttggggtgcagtctccttgtgtttggttttgacctcaccgtagttgcttctgtgctctgcagccagcatgatctttaagaaactcaaatctgatcacgtcattccttgctttcaaatatttcagtggctccctgtttctgtctgtaaaaagcatgaaatattccttaccaaaaggcacctggcctttgatgtcctttcctctgctttgtctcttgccaccttgccatactcatattcattttctcttccccactccttccatccctaacacacacacacttgagccatactaaagtatttgctgtttcccagatgtaccacattgactctttctactgtaattttgagcatgctctctctcttccatttggaatgtccccaacccttccatttttgcctgatttttttcttccttcagggcatagcttagctgacaactcttcctagaaaatttccctcctcccaagtctgggtacctttctctgggcactaaaagaataccgaataaattctacatatagtgtctatcataatgcattgtaattgcttatttttactctgttttattaggagtacctggaagccaatgtccatgtcttattcccagtgacatctccagctcctactacatggcctggctcggtgcaatagtaatattgggatgttatcgttgagtattctgtaaacaaattagtgtgcccagaaaactcagaggtgaattagttcacggcccaaatcttacaacccatctgtttaggttctacagtttacgatggtattgtctattgctcctctgtaattaattttaattttatattattttgagtgaagtttcatttacctagttccttaccaaaccaggacaaagccaaatctcagtagagtgtgtgtatctactcatatgccactagacaagacaaatctgcctttacatctggctgtggtagcaattcccagatgcacttaattctgacacatggccattattgaaccaaaagcaattgcctggcatgattatagttcttatttgttttcgttttaaggggcctcatccaggctgccaaatgtacaacaggtgccttggttttatacttgccaatctgttgttattcaaatgaccgccctaacagagactaatggtatctaataaaattgatctcggttctggcaagccagactcacaagagcaagagccgtaggaactgcagtgggaaaatatgctggtggtaaatgtgcctggtgaagcacacactttttttgggggaaagtgacgtatgtctcacacatgggcctcttgtttatgttgagctgtggacattttctgaaacccagtgttacttagacactaggatttgcagtatctaatcttgtttttgatgtacttgctgggtggcatgggacaggattggctgtgccagcttatcagtgaatggctgtgccatgcctgtaaggcacagccaggctgtctttcatgccaaacagctggcatatttgatggcttgtatttcctattgttagaaatttgcctcactgatttcacagggccttgtaaagtcttgaatatcgccagagctagccaggagaggagtatgtcaggttgcaaccaagagctaatatttaaatactgtattcaaatgacatgtacgatttggcgactttttttctttataggacactgactgaaggaaagctttgccatcaaaggagataacctcttgacaactggccttgcaaactttttcaaaagtataagtggtgttaactgttaggaccaggtctcagaggaacacagaattgtgtgtttttttttgtttttgtttttttttcctgcaaggattttagagacctcattttattcactcactcacttgtgttcccatttatacatccattctttaaagcaccagacattaaactatgctaaatgcaaagtactgtgggaatataaggctgagtaaagcactattatacttgtcagtgcaagtataatttgcactgacaaattttagagatctggatttttaagattttagaaaacttgtgccggtaatgtccatttttaattggagagctttatgttgtcatgtggaaaaaagctactcaaattccaccatgatagtagagcttactggtttcattaaataataacaccaactaccaaagtaggagatgggggttagagccttagctgcctagccacacttcactttgctccacagttaattgagctcatgtaatttcctgtgacctagcatatagaatagctcttagcttgggatttggctattattggaccatctttttgtattatttatacccatcttccttgaaaaaggatttgtggcagctattaaatcatatgcttcattatccttaataaatcaccttggtagagcagacaatggattattgtacagatggttagtttctatgagaaattttttaaaatatgcataatcttggcctcattttgagtgatattttatttcaaggcttttaaaaatgatagaaacctttaaaaagtataccaaactgctcagtgactattgttcatattaaataaaaaatatgcttagtaaaaggaatgtaaatgtgattaacaattttttaaaatatattaagaggcctgttaccttttctgattgtgaaaatctttcaaaataatcttttcattatacagaaggaaagacacaccatggatgtggtagggctttacagtaataatgttctttgcaactagtgttgagagaaataatgatgtaagcaaatccatagataaaagattgtatccacaagcctatatgaacatggtattatgtataatgtagataaaggggaaataaatgaccttttagatgttttaagcataaaactcttcttttggaatatttaggtactagagtgacagattacattatgtttccatacgtctggatgagagagaaccaaacacatttctgcttgtaaaatgtgccatgctggcttcttcatcatgggtgatgaccatttttcagataccaattagaaattttcaaaaggtgctggaaaggacctgagagtaaacctcatgttgttttgctgaggaacctaagatcccaaaaattgaagaggctttcttactccagctgacctctccatcttggtctttggaacctaaggccagtcctttctgggcttgacactgtctttgttacactgcagaaatggggtccttgccaaccctttgcttgctctttgagggaggaagatcccatagtagacagtatctgccttgatgaggattctagtgacatttctcatcaaaactcaggagatgagaacgggaggcagatcttttttatcccagtattccaacttaagaaacccattgtcctttttacttaattaaaattaaatgtaattaaaaccacattcatgctagctacatttgaagtggttaataaccacatgtagctagtggccatgatatagaaccagcaccgacatagaacgtttcccgtgttgcactaagttgtattagacagccctagtctaccagatcattctgaaacatcatttgatcttttcaaggttacagatgtaataaaatcaaggtgtacagcatttatgtagttagaatactcgttgactctagcaggaaagatgtaagtgaaagatactgtgtttcaaaaataccttctcaaggaaagtgaattgataacagattctgtgcattttgcctaatgacagacaaactctttgattttgtaccagcccgatgtgaagtacacttccatggaaatcaaataaaggaacaaatatagtactatcagttccacctttcctctcagatttcccagggagtcttttctgttgctttccaagtgatttttgtcttcagccattgtgactgcatagctgtatgggaggaattaaggagtggcaatatagttggaagagggggctcagtagggtgattatgtaatttaacatctaaataggatgctgtgagagtgaatggggatgttcttaatgggtcaacaggtgtagactgggctgtccaaagcagatagatctgtcttaaagctccatgtgcagcgcagagcaagtgtgtctttgttaggatggccgacggagcaggagggagatgtgaagggtatcctggggatgtgaaacaccgtcaaagtctccccttggcatctttcctcctgctcttttgctttattatagtgcgtttgaattttgtcacagatcaggccaatccaatgtcacatgtaattaatgctgacaagcacatctcagaacaacctgctagaagtcactgaaagaaatctagggccagatgagtgacttccagactccacccctgacagtttggtgggaatgagagacagagtagtagagacagtactgagcctaacactttaaccccctacctctccacagtctccctaccactaggtgagagttaagtataaggtttctagagagatgtaatggaacagccatatcaaatacaaaccaaaggtagttctactaatgtactaatgtactgctctaatacagttgtaaagggatactgatgttacccttgtataccctaacttttattcatctatttcaaagccataaaagtaatataatctcattataagatatttagaaacagaaaaaaaatatgttgctgataatccttttgctcataatccttttatctgaaaacatagtcgccctttctcctacctggtctctcatttggtcacagaacttgagaaaattgtttccaaatgcctttctctttttctttcacattataaatttctgtcacctcctacagggagcgtcacaggttctggtattttttattgcagttttttttgcattttgttttaggtaggtttttgttttttgttgttttttcattctcattgttatacaagaagttatttttgtttaaaaaaatacttcagaaagtatgcagcaatagttggattttttttttttgagactgtgtctcgctctattgcccaggctggagtgcagtggggccatctctgctcactgcaacctctgcttcctgggctcatctgattctcctgcctcagcctcccgagtagctgggattaccggtgtccgccaccacacctggctaatttttgtatttttagtagagatggggttcaccatgttggccaggctggtcttgaactcttgacctcaaatgatccacccgccttggcctcccaaagtgctgggattacaggagtgagccaccgtgccaggctgatgtcattttttttttaagtcacttctgagactctaagtatgtacctccagttttataatcaaaataaacaaaaacaggtttctgaaaggtaggggtttttaaaggcagttgattaagaatacaatacatttgtgtattaagcagtgtttatagctttaacaaaagatctctgttggggtaggggattgtatttatacaatgctgagggcattttggcacataataatctcatgtttgctcagaatcatgaactgtgtccactcttcccccacacaacattttttaattaaaaaaaataaagcttgtttctatttgtttataacatttattttcttaccagaggtgattgattgcaaggacagaagtgcctatgcttggtgacattttcagcaccttgtaacaaagtggaaaagtagagggtttactttgaacctgttaatccacaaaagcgtggaacattcacctcttgaagacactcatttttcaagtcttggttttttaattgtgcttatgtataccagctccattggtaatcagggtgaaaatcaagttccttcttgtaattacagatctaaatcttgatggtcacaggagtattatgatagggcaggagttgtaatgaaacagccacacattttaccccagaaagatttaatagtccatcttctcatcctcaccactctgtagccatggcttacagcactccaggtcataacacagaacttgaaattgtcattataggaaaagagactggggactctcagttaaggaaacccggtgattcacacatgacactgacctttgttgatagaagtcccttgtacatatcgttacatgcactgtagaagatgcagtaccagagccagtacagtattgtagttaattgatagaattggtgccaaaaccttgctaagtcccactgaaagggcgatcagtcattttcaatcatttaattatgtgtaaaaaaaaaattaagaatgggcatgatattttttcagagagatgtggtgtttgaaatttatgtaactgtaggcccaccgaattacatactaagccccagtggtagttcacattctgattaaaaaccggaaaggcatagaaatataaatcatcccatttgaatatgttcaacaggtggtggagtaagaagagatagcttgcattaacaatggggtcatttgaaagaaaatattgtattagtccgctttcacactgctaataaagacataccccaaactgggtaatttatacaggaaaaaggtttaatagacttgcaattccatgtggttgggaaggcctcacaatcatggcagaaggcaaggaggagcaagctacttcttacatggatcgcagcaggcaaagagagtttgtgcaggggaactcttctttttaaaaccatcaaatcttgtgacatttatttgctatcacgagaacagcatgggaaaaacctgccctcatgattcgattacctcccaccaggtatctcctacaacacgtggaattcaagatgagatttgggtggggacatagccaaaccatatcaaatttaaaccaaaggtagttctactaatgtgtactgctctaatactgttgtaaagggatactgatgttaccgttctataccgtaacttttattcatctatttcaaagccataaaagtaatataatctcattatagaatatttagaaacaggaaaaatatgttgcttatagtccttttgctcataatccttttatctgaaaacaacacactgttctaactcgagtaatttttgtgatcctttgtactgtatggtgaatttgctattcagtacatcagttatcattttaccataaatgtattttttacaaccttgcctcatcataactgctgcttttaatggctgccgaatatttcatgaactagatgtgtctgtttgtcttttgttgggcattgttcccttcttcccatttctcccactgttatcaatacaaagctttgaggaacagtttaatagaggtagctttttctatattttgcattatttctttttagggttgttatgtagaagtatgctgattatgctcataatgctaccagtaatgattgagaatactagtttcagccgggcgtggtggctcattcctgtaatcccagcactttgggaggccaaggtgggtggatcacttgaggtcaggaattcgagactagcctggccaacatgatgaaacctcatctctactaaaaatacaaaaattagccagggatggtggtgcccgcctgtagtcccagctgttcgggtggctgaggcaggagaattgcttgaacctggaggcagaggctgcagtgagccaagatcgcgccacagcgctccagcctgggtgacagagcgagactccatctcaaataaataaataaataaataaataaataaataaataaataaaatccccttggtcaatctgaaaattatcatctaggttttgttcatttaataggcaaaacactttctcattattggtttaatatgaatttctttaattactgaagtgataatttttcccttatgtttgcttgaagtaattatttctgttatatgaattaaatctctatatttcctttgcctaagggtttttattcattagttcatgttctttatatattaggcatattgactgtagtcatattgataacaaatgtaacaaactttgcagttcgttacaaggtgctgaaaatgtcttggtacatttatgagtcttactttaatgattttttaacatacaggatctttattcatcattttatatagtcaaatctgttgatggttttttttctctcttattattcattttatgtttagaattagaaggttattttctttcctatgatttcaatctgattttgtttttggtgttttgtttctctcattactgttttatatccattcttcagtcacatgatcctcaaacttatttaggtgaagtatctgaaagtattcactgaccatgaaatatcattatatttatttttatcctgcaaactacctactcttttgccagaagaaagtccaactaaaccatataataaattcacaaccaagagttatatacacatagaatgtaaaaaaaaaatctgtcaaactaaataacctgttatttaatcaataagttgttttctctcttttatttttcagtttcaagcagtttattagaaaatattacaaagttcagtgaaatacctccaataagttaattttgagttgaatttaaaaagtatgttagttgattttagaattgaaacacttccaagcagatgaatgatttgaagaagaggaatgtattgtgaattttttccctttaaatcatctagtgatatatggttgtggtataaggcaaggttctaaataatttttttttccaaatttgtcacttccttatccccaaacgatgcaccgaactgtccttccttcccccaagtatttgcagtactcttttttttttaatttgaagtcgttatgtgttttaagatctgtttctggtttctgttcatgggtatctggtttgcttgctcttcttaatttttttatacatctgtgattaagtcagtcatcataacctttcaattattggagttttattatgctggacccctctcccttaagattttcttagagatttttctttggtgctttcttgtgtttattcattgacatgaacttcagttgactcttacattttcaataagaaaccaagaagccttaattcatattttcacaaaacatggggcttactcatgttctaagaagtgggcatattacatataatttaattgtagtcaacttttattatactgggaaatctcttcttttctcttataaaacaggcaaacaaaggaaaccactttgttttaaatggcacagtttcattttgttttaaagggaatatcaggctggctgcggtggctcacacttgtaatcccaacactttgggaggctgagacaggagaatcacttgagtctagaagtttgagaccagcctgggcaacatagcaagatctcacctttacaaaaaataaaaataaaagtttagcgaggcatggtggtatgcacctgtaataccagctacttgagaggctaaggtggaagaatcacttgagcttgggcagttgaggctcaccacgattgtgctactgtactccagtctgggcaacagagtgagacctcttctcaaaacaaaacaaaacaaaacaaaaaaaggaagagaaaaggagattagtcttctgatgtgagaatgcctattttgactttaattaaaatttagtttttgtaattccaaaatcttgtctcaatttattttctagctggaggaaaaacaatctttatatgcctcatgtttcctgtatctttgctatctcttgtttttaaaataagttcttgtcaggcgcagtggctcacgcctgtaatcccagcacttcgggaggccaaggcgggcagatcacttgaggccaggagtttgagaccagcctaggcaacataatgaaactctgtctctactgaaaatacaaaaattagctggtcatggtgtaatcccagctactagggaggctaaggcaggagaatcacttgaacctggaaggcggaggttggagtgagcggagatcgtaccactgcactccagcctgggtgacacagcgagactccatctcaaaaaaaaaaaaaaaaaagctgggtgtggtggctcacgcctgtaatctagactcttccccaaatggtggggggatgggtgggttattaatggtaggtattggggggttagcttgagatgggacttggtcttagaagagagctagttctaaaggttgtttacttttctagggaggagtctgctactagtctaatcagctgttgggtggatcacgaggtcaggagatcaagaccatcctggccaacatggtgaaaccccatctctaataaaaatacaaaaaattagctggacatggtggcatgcgcttgtagtcccagctactcaggaggctgaggcaggagaatcgcttgaacctgggaggcagaggctgcagtgagccgagatcgtgccactgcattccagcctggcaacagagcgagactccgtcttaaaaaaaaaaaaaaaaaaaaaaaaaaaaggtttttattaatactctgaacttaagacctaaaattactttaaaaaatgtgtatcaaaggtcagagttttaaaattaaccccactattttttgttaggatggattttgttggtatacttagaatataatcagttgtcgagtagatgtcctaatgttaaaaacttttttatttttaggcaggagaaaacaatccaagaagagtattgtttttcagtgattaaccagtatctctggtattttagagatgtgccaagggctctctttctttgtgaaatagagcatatcttgtagtttgctttgtcaatgttctcttagactatcaaaacactcaaattttacattttgagcagtatttacgcctgaattaattcacaagtttcaaggtcactaactttggttatattatattgttattttccaatttagccacctctttatttgtataatagagcatacagcagcacataaaacgcaaaactctaggacataaaaagtggcattcggacgatgttgctctgaaatttatgcattaattaaaccggtatatatgtatgcattaattaaaccaatatttatgaagttcctactgtgttacagacgtggatccaggcactgaggatgcagcaggccatccaaatataaagttacttccttaggaagcttccattctaatgggagagtgttgttaaagagatatataataatatgtaaaatgaatccataatggtgagtattatgaagaataaaattgccaggtgaagtggctcatgcctatggtcccagcactttgggagtctgaggagggaggatcacttgagcccaggagttcaagaccagcctgggcagcatagagagaccctcgtctctacaaaaaataaaagtaaaaataaattagctggatgtgtgacacacacctgtggttccagctactcaggaggctgaggtgggaggatcacttgagcctgggaggttgaggctgcagtgaaccatgattgtgccactgcactccagcttgagtgacagagtgagacctgtctcaacagcaacaacaacaaaacaaaagtaaaacttgtcagggcaaagggctgtaaggaaatcagtctatcagtgtatgcggtgaggttgaatcactgttgctttaattaatgtggtcaagggagactctaagaagccgactctctgggcaagaagagtttagtagagaccttggtgcttggtgcttgggtgcgttattcaactcttttgaaaagcaaattttctcctcagctgtgtttgtagagactaccattctagacatatcccattctctgtgcccacgcacctgaaatgcagagccagatccatctgtgatctttggtctcatcttgactatagctggtacccataaactcaggtgatgtctagctatgccaggagctggggtcatttcgtttcttcgtccaccccatgctttgctttgctgactctctgattctgatgcatggggcccagttgaatccatgccactgtctttactgattactgactttaacctggggtccttgcctgacccagatggtgggtactcttttcatgcagttagattcctcagttcagtcatgccaacctctttaggcaaaagcaccagccatgctgtgagttattatttgctctgaataaccccaggagttactcactaagctgcctgcgtaaagctctttttcacttgcttttctgctctgactgtatataggaaaagtctgggaaatggcaagtttatatattttgcccagagccacagagggagaacccattggggtgtttgttacaaatcattgtctttacatgttccagctcattgttttggtctgtgggtcaaacagttttttaaattcctgatgtgtggtctccttgatcctcactttctttgtctctgaaataggaacaatatgagtacctacctacctcatactattgctgtgaacattaaatgagataatgcttttaaagactagtatgcctgacacatgggatagtcaaaaaatcaatttttattagtattaatgctgtcagtattaatacctttgccgtaattcctccctttatagaacagttttgggaattaaatgtgtgaacaagtagttgttaataacattttttatgaaataaacaaaaacaggttataaaagagactatttttgtataggtgctgaatttttaaaacattttatctataaaaaagaaacactatcatgtgaatcatcagatttttacacttcatatgatatatgaaaattttcaaaataaaaccagtttttaatacctaggttttaaaaatctatctaaaaataaatctacgtaagaaagcttccttgtctgttataattatttaatatcatggaaaaaaacaggctttttcccttgaactattgaattcaactactgtgaatcattctagtgtaatagtaaataaatgaaagtaggtgactatgaagggaagaaattcattatatttctaccaggattccttctggaaatgagagtgaaaaagactaggcattattgtgctttctgaacggtttgtgtaattatgtgagaaattataaaaatttagaattctactaaatgtctacctgttaggtgaatttttaaaaatctgaagtaacttcttaaaatgcccggtgtttttaatacatttatccataagttggttaatttttgtaaatggtacagtatatagctgtcatttttctttaaagagaggtggaaaccaagcaaccagtctggaaatacagttgtttttcaaagcctaaattttaacagttattaaatcatacatatatataatatatatagaatcgtgtgtgtgtgtgtgtgtgtgtgtgtgtgtgtatatatatatatatagagagagagagaggagagagttttcattcaactttataatgttgtgaatggtgcctgttattaagattgcatcattcactgagtagagttttaatttttttcaatatgaaaaatggaccaggtcatacatagatccagccctaacaagtgagaaaaaaaaatgaaaaaaagaaaattggaaattatgttacagcctgaatatttgctttgaaatctagaggctaattagaatatatatgtaacatctactaaagcgatgaataaacttagataattaaatgttaccatttaaaatacatatctctacttactggactctattctttctcatttctctgcctgttactttttatatatcaggcttatcaaaagtagctgtgctcaaacatcctgaagatgtttcaaaagtcacatgctcaaatcaatgctaataacctcttgggaactaaggggtagtagaatactgtccaatatggttatttcattagcaaggtcttcctatacaatgagtcagaagagaaaagctgtaaacttcccagctcaacctctaaagctcatgttttttctttctctctgtaagcactgttgctgtggcctgtgtatgaactggatgtgccaatgctgttattaagatttctgggtcgcacacagaagatatcaagtcagttgtattgctgatttttttttcatctgcaaagtaagaataggaaagaaaatgtctttcatgttacagctttctaggtaatgaagagtagatattaaatttatgagacaactaacatgaagtgaaaggttgcatttgttttcatttcagatattattttttgttctttgggggtatgcgtttatgaaaaaatgaagcctcatgcaatctgaaaaagagaaatacagagagagcaagagccagagagagagagagagagaactccaatttagagaaatattgaatatccagcctccttcagaaatgattagttttacagttgaaagatttcacatttaaaataatcctctttgtgaagtcttgtgatcctgcagtgtgaccacaaacttaatcaaaatcactttgttaacaaaacacacatagtgggtgcaaacactggttaattttctctttctcataacttgaagtatattgtgacctcgttcagttgggcatgtctgaaatgttgtgtggctgttttggtaattgccataattgactttttctcttacttgtaattcattgcctattttccccataattttcacattgtgaagtgttatttgacaaaaaaaaaaaaaaaaaaagatgattttagctgccccttgctttacatttgacatctttttgtttttctgctttcatgattacaaaaatacactgttacccactgtcagtcttcactgttttcttcattgtttttctcaaagcagttatctgttaggataaattaaaggttgagaccaggagctttggggattactggatcaatgcacaccatttggcataacgtttttattgcaggattcttaaatatatttaggtactgtcttggtagtcatcagacatatgtatagatcatacacacacacacacacacacacacacacacatatacacatacatatttaaatcaccggctactgtttgcattcagtgcacattatagctctcagaaggttgcaaacacttttcattgttgccttttatctgtcatgctgttcaaataattttcctggacactactaaagtaggaaatggatacaagtaaattacaacttgtacccatttccaactgtcaaaaaaagcactaaaggagaaatagaatatggacttcataaaacgttgtgatttggaagcagtttttgtcaaattagtatatgtaaatcgtctttgttttgtgaaactttctctgaggttttgcagtgtttacaatgtagttgactcacaaaagtgatacagtgttgaaaccaatagcagagaattttcagaatgataaaattcattctaactgtggctgaaagagacagattgtatgtgagttcttttttaatatttgaagatgatatgtttcattcaggacattacattttaaagggtttattatacatttgtaggaaagtttaacaagctttaatattgctcacccagttgtttctctttctatttgaaatgactggttttattgaattggattgggatttgctttttaattgtatgtagactgtataatgtgtagtctggtctctgagcatgttatataatgtatttaattgtatgtagactgtataatgtgtagtccggtctcctaatgcagtttcataatggtgtaatggaagcaagccaagtgtattttgatacagagtaagcgagattgttttaaatttttaaccaactcacctttaaacatttcttgacattctcctaggattcaagaggtagacctaacaaagataatcatcagaaaagagaatgtctgaaacaagtgcaggaatgaattcatgacagttttggaggggagtctttaataaaaaccattccgcaaccctccctcttactgtcaagtatcagaaaaacaaaacccttttcctgagtctcagtcatcttgtctgcgaagtgtaggagctggattcagtgatgccaaatgtcccttctaagtccacagattttctaagtgcctatcttaggtgaagctggatcatcaaaattcctcagaaaaactagtccttgagtattctaaagcatatttgttattaaaaatataaacttcatactaaatgctgatatatcacttgctgattaagccttataatggtttcactaataattaatcaattgaagagaattgttagaaaaatgaggcaacagtttacactctagtagggttttgggatttctttaagcaatgatttcaccatcacgtatgccctttccccaaattacggatttgattgtgaatatccttgcgtgcgaatgaccatttgcacttgttttctctttttaaaaagtcttcctttcagcgaagtagtgtctgcttcccctttgctgggtattgactgggaggaacatgccccctcatgatagggtggacactgtgtcgctgcacactcctcactggggggagttgaaggagttttgagatgatcatggtcctcacttttctgtttggtcacagagcacttaattgtgcttgaaacctctcatctgtccatgattcgatgactgaagcccattctccactttcctttcttgtttaccctcttgtttcttaatatcaagattttttgtttcttgtggacttttgagagtgcccagaagtcttacaatttctataaaatttatctcatatcttttaatcctttgattattttccctcaagtgctagagttcaaaataatctttgcaaatttatactaagcaagctgtagaaaaggggtaaaacaaaacacttaagagtttggactgtggaacccaagtgcttgagttaatacctcaggctctccccttgtaagctgtgagaccttgagcaggtcattttatgtgctttgcctcattttctcatctgtaaaatgaacataataacagtacctatgctatagtgatgcttaaaacattaaaagagttaataaatgtaaggagactagaacaatgcctgattccaacacagtaaagactcagattcaaactttggtatttaatcttcaaattttgtttactggtattacccagtaaatattttctgaaaggtctgttgtctcagctacattataataatgttttatagaattatatagttaatgaagaggtttcatacaagtaatagcatttaatcttcatactagttttctgatatgttattgttatttccattttacagattataaaagtgaaggtcaggaagggtaaatgacctgctgaagattatggttattagtggtagactgagctgtttgtccccagtcagctgattctatggttgtttcattgttctgtgctgtcaaaatatatctctagaggatgatgcattaatgtgtactatcttcctagtaaccgagctcccaggaggtagttgatgctctgtcaagtgctggacaacaacctgtgtgcaagtcagggggaaaagtccagttcaccaagaaattctaacccagtgtgatgtgtgttatgataaagatttccataggattataataaccttccaaaaaagtcacgttttaaatgcacaatgcagagctactcaccaatacaaaagtaatgaactgatgtatgcacaaaatgataaatctcgagaacagtatattgtgtgaaagaagccagaaacaaaagggtacaaactgtatgattccctctgtgattttttaggtaaaactaatctatagtgacaaaaatcatgacagtgattgccttggcataggatggaagggagctgggagtgagggaagaggaggatgactggataaggacatgaacaagctttctggggtgatggaaatgttgtatatcttgataaggatgtgggttatgtagacataacatttgttaaatgtcatccagctgcacctaaaacccgggcaattcacttatataagctatacttcaattataaaaataaaataatttacatggacaattaaggaaacattagtagtgattatctatttaatttggaaagctctcaacagtaaatttaaaatggatgcatatgatagatggcattgctggcacagtgtgatagagtatttccaagaatatgtgtttctttttcaagtactgcattttatggaacactgttgtccacatatgctgtgaagatgaacgcaccctaagttattttaaaataataacaaatctgccatggcttgaattgtctgagtttacatggagaggagaatttcacaaattttatagggagtatttaatgttattctgttgcaaagttaaagctttataatgaatccagaaaaaacatggacttaacaatttattatatatgttttttagagatgcgtagataatagtactctcagttaccttctcactttttgataactagttcttcaactgctacagaacctggtatcaattcagcagcaactcataatttggggttctgcctgccttagagtactactaacaagcataacatcttagtctctttgagctactgcaacaaaatatcctagatagggtggcttaaacaacaaacattatttctcacagttctggaggccagaagtccaagatcaaggtgtcaggtgatttggttcctgtttggggtctttttcctggttcacagacaggtgccttcttgctttgtcctcacatggcagtgagaagtcatttctgtgatgtttcttcttataagagcactattcctgttcacaagggatccaccctcatgacctaattacctctcaaaggctcaccttctaataccatcacattgagtattagagcttcagcatatgaatttagggagatacaaacatttagtccattgtgcatagtcatgtttaaacacaagtctttgagtatcaccagtttcaaattagccattggaagacagaaatgattctctttccatcaagctctgtgtacttcataatcattgcatccagctcttcatctgtggattgtataacctgtagacttttatgggatttacttcctttttaaaataatatacatataagccaaacagattaaacagtgcccaacacagtattgaatatattattatcttattgtttaggggatggtgataagtactaattaaatgtgctttgagatattatattaatataaaaatgtagatatttcagagaagatactcatccacatgatttcaggcctgttcttttcaataggtcctattcaagttcatttagctatgtcttaattggattacatccatatttagtttaattcataaattttaataatcactagtaaacaataataaatctttgagtgatgagacatgataaataccctataggttaaaggcatgctctgctttgaaatataaatgatgagctgattactttatgaggggaaaaaaaggaatttggttactttctgtggcaaaaacctaattttttttgtttgtttgagacagagtctcactctattgcccaggctggagtgtggtggcccaatcttggctcactgcagcctctgcctcctgggttcaagtgattcttgtgcctcagcctcctgagtagctgaaattacaggggtgcgccaccatacctggctaatttttgtatttttagtagagatggggtttcaccatgttgcccaggctggttttgaacccttgacctcaggtgatccacccaccttggcctcccaaagtgctgggattacaggcatgagccacctcacctggtctaaaactaaaattttttcaataacaaatagattgatgggttgagtcacgtatctatttaccatagatttccctaggtttgggggactgaaatatgaattagaagttgtccttaccctcagtgagcttagttagtctattaaaggagattgataggaggacagattttttagcaatttagtatgataatattttatcagaagtgtagtgagcctagagaagaggaattaatcaagtctactctgaaccatgagggtgtgtgtagtgtgtgtgtgtgttatatgtgtgtgtgtaggggtagaaagacactagagtttgactgaaagagtgagaagaaatctgccagtttaaacaaggggagaaagagcatcccaggcagaaggagaaacatgtgtcaaggaatcgtgctcattgggtatcccataagcttttttaaagatatgatgagaaccagtgtgtggggttagagagttgggagaagttgtcagagaccagaccacgcaaggctctaaattttaatatttgtagaatttcttctgtttgtcaggcatcatgctaaacactgggcatttactggtgatcagaagagatactatgcttgccattaaggggcttaccgtccagcaggagagtaaaataatggatgaatacacaattgcaaattggataagcactatatagaaaaaaaaaaaaagatggtgcctgcagtcttggaatcttggtcttgtacatttaagtaaagacctgaaggatgagaaggaatcagttggatatgggtagctggtatcagcacgtatgaaggataaaaggcaggaaataactgtgtggtgaacggaagggaggccagcagggctggagggtggtggactgggtgagtcaaaagtgattaagattggagaaaaatggtcaggaggtctgatggctcagggctttggtaatgagattggatttcatttaaggcacaataggagaccatgggagggattgtaggctgaggggtgaaacaatggatttaaaaaatatataaattattctggatgctttgtaaggaatagattgggaggtaacaagagtagaaataggaaggccatttaggaagctattataggtagtctggatgagagatggtggtggcaatgactacaggatttccaactgattgagttaagggtgtggaggaggaggaagattgggaagaaattgaggacagatacaggcctttatctgtgaattgtcagaggcctgtgaaccagagcaactccatcttaaaagctgggtaaaatgaggctaagatctactgtgctgccttcccagacaaggcattctaagtcacaggataagataaaaggtcagtacaaaatacaggccataaaatccttgttgataaaacaggttacagtaggagctggccaaaacccaccaacaccaaaatggcaacaattgtggcatctgctcatccttgctgctacactctcactggcgccatgacagtttgcaaatgccatgggaatgtcggaagttactctatatggtctagaaaggggaggcatgaataatccaccccttgtttagcatttcttcaagaaataaccataacaatgggcaaccagcagccctcatggctgctctgtctataaagtagccattcttttatttctttactttcttaataaacttactttcactttacactgcgaactcaccatgaattctttcttgccaaaatccaagaaccctctcttttaaactttgcttaaaacgttgctaatcttttatttttcaaagtcaaggaaccttttcttttaagctattacagcttttaacagttaagtgtactcctataaaaaaatttagagcatatttatttctctctacctcattttttcagaattttaaaaactagttgtaagcattcttatgacaatatagttatttacatgagtgcaataaacatctgttttcttttgtcacaggacacaattttaaaaattggttattttaccaaggctttaactaaaatggtgtactttcctttaagttatcaaacttaacttgtaaagccaataaaaaccctttagaaaactggccacataccttgcctaaaacagtccctatacagggtttctaacctgtgccaaataaaaaatatcactttctaacaggtccagaaaccacaagttatcttgggacctcaaaaagaaagaaatttacccaactcataaatatttaaaggtacaaactcatggcagggctcagctttaaaaaagtcttatctaaaattccttctatgaaacaaagttccatcaaagccaatttttaaaaagcctatgtaaaaaataattattcttactgcactttatacaaataatcaggccaagtataataaagcaaatcagtcttaccataatttatctttagtgaaaatggaaaactgggaaaaatactacgtttcaagaactatactatacttgttattaaattctagtctcattagttgtttctaagcttatttctgcaatttcagcaaaccctgcttattcctgtgaaccaaccagtgatctctaactgctgctcaaaaaaaaccaaaaggaataagtaatgtaaaaatctggatcagtattctaattctgggcacattacaatcagctgacaacccggtatcagcttagttccaacagttgcccagttcataaaaagccttctaatttagtttacttaaaataacttattttgctttactcttgtgaaatatattactgttatactctttgtataagaatacaaaacaagcttactgaatgttttattaaacagttaactaatcttacagataccaccttttgtcaaaactcaaaagttataaataaaccttaccatactaacactttctaacgaagctcttctctaccgtgaatgcaagagacccccatagttaggccaaaatatcatcgcccctatttggcctaaaaaagttacaaaaaatagatctttgtccctgggcaacccttaggatcaaaggttctcttataaaagggagaggggaaatgtcaaaggtgtgctaaccacagcaactccatcttaaataaaagctgggtaaaatgaggctaggacccactgggctgcattcccagacgattaaggcattctaagtcacaggataagataaaaggtcagcacaaaatacaggccatgaaaaccttgctaataaaaggtaacagtaaaggagccagccaaaacccaccaacaccaaagtggcgacaagagtgacctctggttgtcttcactgctacactcccaccagcaccatgacagtttacaaatgccatggcaacatcaggaagttaccctatacaatctaaaaagggaagacatgaataatccaccccttgtttagcatatcatcaagaaataaccataaaaatgggcaaccagcagcccttgggactactctgtctataaagtagccattcttttattcttttacttttttaatgaacttgctttcactttgcactgcaaactcaccgttaatcttttctcgcgcaaaatccaataaccctcccttagggtctggatcaagactcctttcctgtaacaaaatggtttccttccttccgcctttcctttcctttccctttcctttccctttccttttccctttcccttcccttttttgaaacagggtctcactctgtttccccaggctggagtgcagtggtgtgatcacagctcactgcagtctcgacctccctggcccaggtgatcttcccgccttagcctctcgagctgctgggacttacaggcacgcgccaccaccacacccagctaaggtgtgatttcttgagatggggaaggctggcatataaacttgctggcggataaggaaatcagcttggaaactattggtttaaggtttccatgaagcatgcaaggtggggaagggctatgtattacatgattctgtagttcaaaggtacaattgctgttgagttaaaagtttgtgaatcattgaaaccaaagatggcaattaaagctttgtgggaagggatgaaatcatccaggaattttaagaaggggttcagtggaacactgaacatttagaggtcaggcaaagggggtgaaacttctaaggagcctgagaaagaacaggcccaagtggtaagaagaaaactaggatattaaagtagagtagaataccgggagagaagagggcttcaagaagaggctgtggggtgtgggctgttgagtaaaatggaaacagaaccctgagtattaaatgtcttactagatcctctgtactttcttcagctgtagatgggaaagcattggaagatttcataccgaggactgacttgaccagaaatgttattttcgaaagattccagtgtgggctgtgtgaacactgggcttagtttggaggaatggaaatctgttaatcctttctgctttctaacctgttaaattgccgtagcttaagtaaatgactgcagcactggtggttttgggggatgggagggggttgaagtttaacagaattggattccagttctgttccattgtcagctgcgggaccttgggcaaattgcttaatctctgttagctttggtttcctatgtctaatttgggtataaaaataatagccccaaccgaaggctgtgaggtataatgcataacacaaataagtcctcaataatattgttattgatactgtacttgtaagcatgtgtttgacttccataattactttatctcagtgaatcatcccttctcctgtggtagcgttttaacattagccttcaacaaccatgtccttaactttccaaccaaggtataaatgtaacagttctactctctctgggagaatttccaaattgtagtgagcgcctggctgtgcacaatttaaagtatactttctctgtcagaacacatgattatattggtttgtactttaacattttatttccagttcttatagccttttatttctctatctgagtttgctttgatagcagttagggtactagagccctttctaaggcagacattacctgggcatggatgaatgttccaggggcaaaaatcaaagagaccagatatactaaatcactgggggaaactttcagtgactcaacttggtacagagtaagaaacataagaagggtgtagccccttgtgcatttatgaaataatggagactgaaaaatgcttactaagcaaaacaaaaccaaaaccaaaaccactaaaaatgtgttttctgctttcacagtgactttcatgtttgccaaagtggtggcaacaaatcctgtaactgtctatgatcacagaatatttaaagacttttgccttgttaaagagttagttttcaggccagatgggtggctcacgcctgtaatcccagtgctttgagagaccgaggtgggtggatcacgaggtcaggagttcgataccagcctggccaagatggtgaaaccccgtctctactaaaaatacaaaaattagtggggcatggtggcagttgcctgtaatcccagctactcgggaggctgaggcagagaattgcttgaacctgggaggcggaggttgccgtgagccgagattgtgccactgcaatccagcctgggcaacagagcgagactctgtttcctgaagttgaaggaacttattggatggatgttgttatttctacttagaaagtctaaaacagtcaagagccaggccagttagttgtttctcacaaagtggaggaaagaagaggtgactgcattgggattggcctccactcttaggggaaagggggatttctaaatgtttcttgcagacaagagtggatgccctcttgggccttatccaaggagctgctaagagaaagaaacaaaccgcagtagaagttaccttgaattcctaggggttgtagaaggagtgagtgatgcgtggggtagactatggcacccacattcagcacagcaggtaacaggagtccaggagtgagtgccttctgaagaagccatgagcttaccatgtgagagagagagagagacagagagagagagaggtggctgtaaacatgggccaaacccagagagcatgtatgtggccagctaccaactgtgatcatctaagaattttcttattcccattgtttcctttttctcactacttaaaccccatagttcaagaaaatacctatcaagaggagcagagggatcagaggaggtgaaaaaggagaagaaggggctgatcataccttttttcacttattttctgatgctggtctatagccaaccctagctgggaaagggaggtggctataagttgaaagtttcaagtgcgactaatatgctgaactgggcactctaatttctgaattgggactgtgtttgataacttaaaatgattgtatgacatcatattattaagagttagaaaaataagtagactccttgacttgtcgtgtagggagtagaaaagaactttcaccattaagcaattgtaaagggatagtggaacataatatagaggtattctgtgactctactctttgagtcttgtgtgagtccagagacatatatacatacacaaaaagtgtgtgtgtgtgtgtggtgtgtagtatgtatatattttaatttcaaggaggcgttcgctgagaaattgatttctttaaatacaaaatattaccatgccagaaaaaggcataaaatgctagaaaatgatggtttaacaagagttgaactttcaaaactaaaaacataaaaatgtatccttaaccttgataggattaaaggaaatcactgtctttgatggtaaatgaaacaccaaacacttactttcttaatattttttctgacattttataattaactaatgaatatgatcaggctttattaaaattataaatatattctgtatatttaaatatactctcttcaataaaaagctgttatgagagcagagactctcttcctcatattaaatttaggttgaaaagatggcttatggagctagattgcctagtacagtaagtagctctgccacttaactagctgagtgacctttcattaaattacttaatctatgtgtgcctcagttttcacatctgtgcagtagacatcagaattgcacctgtattatttgtggttatattaaagctacagatatgcatatattttaagaatataaacatatatgtatatatagaaagtgttagcaaatagtttcctatgttattgttacatattctgatttatatctttttctctgctcttacaaacagagaatgaaatttcagaatgtctgaaatgttgcctcaaaagtgatgccgtctgctgtgaatggctactttaagaatgttgaaacaagggcactcaactcaattgtcaggggatgtcatacttttataatacttagcttcctgagcatatgattgtgtggacaaggagaacaagacacaggagagccccagtgtgatctttcagctcgttttgtgctctctgattgtatgtcagttgaaggaattatctggttaattccggctatcaacaacttcacgatgctgtgtcacaaaggaatctgactttaactaacaatctcccacattttattgaaagtgcctaaaatgtaatgtagaaagttaataattgccccaagtttcacaaagagctttttttttgatccagagtcttgctctgttgcccaggctggagtgcagtggctcaatcttggctcactgcaacctctgcctccaaggttcaagtgattctcttgcctcagcctctcaagtagctgggactacaggcatgtgccacctcgcctggttaatttttgtatttttattagagacgggtttcgccatgttggccaggctgatcttgaatcctgacctcaggtgatctgcctgcttcagcctcccaaagtgctgggattacaggtgtgagccactgtgctgggccccaaagagcttttatattagagaaatataataaaataaaatataagttaatatatgaatatgaaacagatcagtctacctcacatatgttgtattagaatgagcttttatatagtttatatgttttatttattcaagcatgtcaagtaagtcacaaactttgataatagtaattgtttccacttaataatggaatactcaagacacagagtaagtgcttggtgtttaatttatcaccaaagatagtgatttcctttgatcctaacaacgttaaggatacatttttatgtttttaattttgaaagttgatctcttgttaaaccatcattttctagcattttatgcctttttctgacatggcaatattttgtatttaacccagtagtcgaacattgcaactagtagtggactagagtgctatgtcgttttcctggttagttaccagattctctattcttccaaatgttaccggggaactcttcgggagtaattgtttaaatctgttgtacgaacaaacagctatgtgttcagaatggctgaatttatgttgatatcaaaaatggccaaatgatttgaaattcaaaatcgtgattaccaaagccaaattatttgaaattttataaatgcaataaatattaattagtaacaattaaatatgtgcgtaagaagcagtgctcttgtaagaagcacatctaagtatttggtctgttcttaggcaaatgaatataatactaattcagtaggtatgattttgcattctggagacttaactttttgactatgtggcttttgccagattgcttaacctttctgagtctcagtgttttaatctgtaaaatgagaataacctcaccttaattactgtgagaattgaagacatttgtatatgatcatgacattagcaatgaggaagaaagctcttaggacactacctggcctgtaagtgtttactaaatgattaatcttactattattattgttaaaggcagtattataaataagttattaaaccaaattaaccctattttcttcttttatctctctgcctatccgctaaaactgtagagagaatcaaataaggtgaggcagagaatatagattgtaaattttccagtggccacacaaatgtaaaatgctatcatttaattaggatgaggtatacaattttatgtttaaagtcaattaaagtgatattttccaaagctttaaacctttggcttctgatgtatcaaacacctagaaattaaaatggataatcttgatttatacagtgtttcagatgctcttaattgtagttcaattgaaattcaagagttacaatttaactctatctaaaatgccctgaaaatattcccactaagccgtgagttataacaggcaatttggaagctcaggttgtaaaatttatgtttaatggtattgatgatgctttgccttttaaaaacccctgagcaactaactgtagttttatttgatccaaatttatcttggttattatttccaacccagtcttagttgtcaaatgttttggagcaaaatctggtcatcaggaatcttgaaattctaccaagaagtccaagaagaagaaacctacttgaaatttaagatggttgttaggacagaggctagacacactaccaactcccataatcagtatgcttattaggtattttatggattttaccattctatgaaattgatagaaggtatattttattttgttttgttttgttttattttattttactttagagacaggggcttgctgtgtcacccagggtggaggacagtggtgtgatcacagctcactgcattcttgaactcctgagctcaagcaatctttgtacctcagcctcccaaggagctggctggcactacaggtgcacactactatacccagctaattaaaaaaagaaaaacaatttgttttgtaatgacagggtgtcactatgttgtccaggctgggtgtgttttctctacatctaaattataaaacttttactcttgagaacatagaacttcttttactatttctaaataaaattaaagataggaatatgaaagatttattcaacatgatatggtgtccatttcttataaaatccattggctctggagctgagtgtcagattactaaggttcattaaagctcttgctcatagctgttgttttgcttttaagaagtgaatttaactagcatgagaaatgtcatagaaatggagttgccctagtgtgaaactatgtcagtaacataaaatggccttcaaatttaaggccgtaattgatattacagcttcatcatgctataccgaaggaaaaatattctttaatcaaaggggttcatattgttgattcacttattctacttgccttaaaaatgctgagtggtaaatgctaggatttcttccgtgtaagttacacttataacacagatgtatctgaagcacaggtttgcaaagaaatgacaataaaagattcagcaagatgcaagaattctgttgttgtattccttagaaggtgaggaaagaatctatttttggaaagggcttgtactgctaggtaaaattccctttcttcttctattcctaaagaagagacttcaagaggcttttgtttatgtaaaaagactgaacttgagtaatttaacatgttgatatggaaagagtgcctatttctctaatttttaaaggatttgtacctttcttccatctctaacagggtaacaaatgtagtgttaatttagttgagttatactttctatatgagtttgctaacagaacttgacataaaagcctttgtgaagaagcttgattggtttggttgccatggcaacatggttgcatggaagaatgatttcctttaggaacctttcctaaacgctgttttgtgccctgtaacgatactgctagcttgccatcccttgtgaggaggtgagaggagatcactttcagggtcaactttgtgtcttgtgtttatagattatcctcaacaatcaaaagagtgcttggctcatctcattctttccatagctgaagcagttctgttcttctgtatacagtgataataggagcctctcgcagacctttatatcttaaaatacacaaagaaaaaagtgaatctagaccaatgatcatattctgttaagtgcatttcctaaagctaatgtctgttatggatttttaatttcctgcttatctttgtttgacattctgcaatttatcaataatttgtcctgtgaatgatgttactgttttgaggagacaaagggtttaatcagtaaacagatcagcaggggtttcatttaaaatccttagtagtggtttggtattctggaattgctgtaaaccctaaggcttacatttgagatttcctttgttatggggtaaatgtctgctctgttagcacagcaattgtgtacaaaaatgcatcaaatcactcaagtaccaccatagggtgtttttcagtggttaaagcaggctaatggttatttcacttgtacattcaataataacagcagtaaggcctattataaccatttttctaatcagccgcatgtttgcattttttcattttcaccccttgatttaggtccttggaatcagatattccaaaacagacttaatgactttaactaaagaattgtatcaacactgttggtaccagttatacagtgacttaaaagttgcctaggaataattttatgcaggagatgagggaaaaaaaacccataatctcaaactgatgggaatattttaaagattgcaacactttctaacttttgaccccatgattagtgacaaaatttgtatataataatgtgacatgattatattggagtttttgttttattttgatgagtaaatgttagaatttaaatttttgtaactgctaatggatgctcattttcaattgctaaatgaatcctttcatctgagttgcctgaaatgaccctgctggttaaacaaactattgggaaagactggatcacattttgagcctaactcatctcaatatttatttttgtgtattttggattttgtggattattttggaaaatgtatgtttcagtagcctaccattccctgtgattaaaggtaagccagttaaatttatgacagtagcagcagcagaggcatgatttgaagaacgggaaacagcttatatcagatgtgaaattttcaaatgcctgcttctactctatatcttctttccacatttctctctcactgtcccttttctcaataaaaatgaagagaaaatgaaaaaaaaaaaactaaattatataaagtgatgtcacctttaaatgtgagatatgacaattcttgtccactgccagaattggagccacaataaagctgagacagatttggctatagttgagaacagcatttattgaataagaagaggtagtttcagacaaaatttgcacatttgttctaagttactttctattgatatgaacgctcttctccagaaagctatgtgaatgcacattataaataaaacaagtttcaaccatggaagtactcccctcttattaaggttaagggttcttctaagttaactttattatttttgtagcctttgtctatctcatactagttgtataatccatactatttgtaaatgtatgtatggcaccacttttccagtgaaggacctcacttcttcctcatccttggttatacttggatcatcgcataatctacgtcacagatggtttgtgctctccaaactcatgcccttgtttttatctctgcccttggatggctgtcttctattttcactcacaatttcaacacattttgacttgctcgtgtcacctagggtttccgcctcaggtatgtcttcttccttaatttctttgccgtctttggtgctgttgacctcaccctttctggggtcttcctattggtctcagcttcaggtttgcagccgcccctggtttcctgaacattccttctgtggggtcttcccctccttctcaccctcctctgtttccttcacttaaagcgttctccgtgaagacattcttgcttagtcttgccgtctgccctcacgcattctgtagatgtgaatgagggcacttcatagccgcatatgaaattaccatatatgcagaagatgccctgctctttacttttagccttgactttctggctatagggagggcattaacttttgagtttcaggatggcatccctaggcttaaaaaaaaaatacttgcataaagccacttattatgtgtataatttgtatttagttctaaatcaataaacttttattgagcatcattatgtgtcaggtgctgtgctctggggagataccaaggtgcagaatccatggcccatgcctggcaatttagaggggagaaaaataaatacacctgattacacttcagtgttgtgtgacagaggaaggccgaaagaaatgtgaaagcacctaagagaaataactaactcagactcggagaggggaaaatggtggaccaggaccaaagaagacttctcagacgatgttgtcattttcttttaaatttcttcctcagtaagccaattctttctgtgatattagacagcagaactgtattgcttaacaaagtagctcaggaactcagcaaagcatctcttgtatatttatcaaatgagtaaatgtggcccttttttaagagaagcgagcctcacagctcatgaaaggagagaggaggaaggcccggcgcggtggctcgtacctgtaatcccagcactgcaggaggccgaggcgggaggattgctttagcctaggagtttgagtccagcgtgggtaacaaagcaagaccttgtctttaacagaagatttttaaattggctaggcatggtggcacgtgccttgtagtcacaagtaccgaggaggctgaggcaggaggattgcttcagcctaggaggtcaaggctgtagcagtgagctgtggtaaacgttaggagaaggaaaaggaatagcatgcattgtacttatttcctaagatgcattctgtttgtagcttctttttcaaacttttgaggtccttttgaattctgataagctattcctttgtggctggtgactccctctggcctcttcctccagcctctgcccccccgcccttcctcaatgcttcctcctcgtctggtctcatatgcagacttaataacagtgataattattctaccctccaggtcattaatgaaaaatgtccactggagtactgcccagaattgaacacattggagccccatttattatactccctctaaagctgacacttttccaccgatagcgccctgccaggcatgaccttcctgccatttcatagctatgcagtgtagatcctattttctcagtttattgatgattatatcatgaggagcggaagcaaaagctttgtaaaaatccgaatataaattgtgtcttgcttcttcccttgatctactgggctagtcactccatcaggagagattagattattttgacaggattgagtttgcatcaggctatgttacatattactcaagactgttttccttaagatgtgggcaactagatctttttctaaacaatgtttctgaggtaagtccaagatcattactgtctttaaaaaaaaagtttgtatattttattagccttcaagccccaccgagtcctcctctccagagtttgtaaggtttgtcaccttgctatggcattggctaattcctttgatacagtgggttgaaggtcaacatggactaaagattggaaggttggaatgaagtcagtttattgaactcttatcaaattttctccaacccctgcctctcttagttgatctttcttaagtcgttgcacatgtactttcagaatatattaaataactttatcatctacggaaattatttctccctttgagagtaaaaaataagtgggaattgatggatataagtttaccaaagcaggggattcttaattagcagatacatggaaactttacccaactattcctaggtctataagtaatgttattatccaagaatgactgacattattttctataagaacccatttatatagattcttatgctttaaaatatatatgtatacatgtgtagacctataaatatatatgtacatctatctgtgcatatatataattgctagaaataatgtagcagcttggtaacacagaagaccttccttcacttttttaaagaatggaagtctgttggggatcttgccattctacatttagctttccctaatgagtacttattttttctcttttgtttgtgccatatgtaggataggaacatgcagcctgctcctctgctatttatgttcaagtatccactcagctggtataaggagaaccttgatctttatggaatgtttcacaattccagaattcccccatctgtgttgatctcctcgaagcttccctgtgcagatcttcactcaggcctcacaagcctcaagtccccacccaagtggatgtctttcagatgggaaatgctctgagatccttagcgaaaggtggaaatatcaagaagagtgtgcataggaaacaaggtgaatttctaggttgcatgtaagaaaaatccagtttcagtaacagcaagagatgaaattgaattacgactgcgttgtttttctgggggcaaagatacttttctagactttttcagtgatatgaaaaagcacatatgttgagaatatatacttttaatagttgaggcagtatagcctttcagaaaaaaaaaaagttcatctttgtcagtgattaatgtatttgagtaataaggctctttagagcaggaattaagaatgattgttctgttccttagtgacctcaggactgtttcccgattgggcttgggttatggttatagctaacagagctttgttaaaaattatattcatttattcagttccacaaacactgatgggccttttccagggactaattcagttggcagatttttattgtactcctaccttaacccaggtgctggaggtcataaacaggttgtgctcatagcctaggggggtcaatggacttgactataaatggtgaagttgagtggtataaatgccagcatcttggtggtagaatgttgagctttactgtaaaggattggtactgggaagttgtcgggaagggttctctcaagccgaaaaggagatggagtccatgagtgagatcaagactgcgcccattaattaattgtttgacctgcactatgtttacagtttttcttagttgctggagtagttgctttttgtgccgtaagtcagatccccttggtcaacttcgatttcactcacagtggtgattctctgaatgctgaccgcaccctgcctgggcacagttgtttcctttctgttcagggctttctcccaaaccgaggaagctcagtcagcacttcagcaggtacagttggaaagtgtagtggaattaatgcccctaggacgaactcatagccaacaagggaaaggggcttggaggataaatgcccctgccttccctcatccacagggaagactgtgagcctctgagacctcacgaagaccccatggttgatttttattcttcctttgtcccacttttctctctcctgattattagagttagttctgaagaaaactactgcaagtccttttctcaggctccactttcagggtaaccaaaattcaaatagttgccaatatttaaaaactggagaatggcaaataaaaattcagatctctacttctcttgaaacactaaagacgtgatgactgttagagtgtgttcctttagagcgtgttcgataacccaagcccaatcaagagaaactgattgggcttcagctgatgctgaagagtggctgattcttaaaatgaggtgatctgaactttttaggacatcctaatgcccatgcagtctgaatctttcttcaaaatatccactcagacgctaaaagcaggggagcttgagatccagggtgatgtttgaattgaggctttcaaaggaagaggaagataacctttgaagaaggtaaccaagcaggagggagaaggccctacatggcaatggtaacatcatctcaaagccaaggaaatgggcatgttgtttatatcgccacaggattttttttgtgtgcaatagtctacctttttctttccaaagtctatcatactatggcaaaagatgtagtcattcaatagagttatgcaattctagctttccatcaattacaaaaaatatgactatctaccttgattaattggattgttatacaaacagccctgcagtagtaaacgtccagtgtgtggcagtggggcatatgtttgtcatatccattaggggagcacttggggcccagaggactgatgaattggcccacattgtcttactacacagctgtcatagcttctctgatagcaggtgatagttctgcaagagcgtgtcaaattggagcttatctcttatgacatctgttgatggaagctcccttttaggtttgaaccagacaatgaccttgatattcctggtgaagaataaaggcttacaattattgttttaagaaggagagacttgtagcttgtgcctcacacccgtcatatcaaattatcaggctgaaactgataatacaatgaacactggctctcgacagcagtgttgtatctgctggatttgtacgcagagtaaaccttatgccagctatatcatagaaatcaatggagataagatgtagttaacacctggaatttttcaggtatctgctcagagactctggttgcagagggcaacatctatttcataataatatctttgaggactaaatctttaagaagtggaaaatagtcagtggttgagctgagagttttacagatttcagggaggtgtaaatggaaagcagacagcttctttggaatatggaaaatggaaagacgttggttattgggttattggctccactgttaggcctatgagaccttggaggagtcagtcaacctctggaaatctcgtttttccacctgtaagatgcagatgccaatttctaccctggctaccttacactgtatgtcagagattataagaaacttggaagcacttttttttggttggcaaagaactgtataaacatacaacggtagtattgtttcagtctctgaatatacagatattacaaaacattatgtgacattttaacaactagtattttcaagcttttgttttgtggagatagatgaagtataggatgctggaatgggcaccaagcagaatgaggagatctgttttcaagtctaagtggtgtaacaactagcttggtgaccttgaaaaccaagctgtggtcttagttagtttcactggacagtggtctctgactttccttccgttcttttgttctatgaatagtggctactttttttttgcttaagcacttgtgttccatctcacagtgttatttcatctttgtgatcaggaagtgtaaacactgttcatgcttcagtcagcggtacttaattgcatataaggcatctggggagctctttgaaaatgtatatttcgggacaccatatccagagagtttgattcattgagtccagtctgggtcctaggaagaactattatcaacatcccatttaaatctagtgcaggtggtcttttgataaccgttggtgtagaacatatatacatttcatgttttattaatatttattaataatttacaaggtcaaaaagatattattttgattgttattttgtattgagtctactgctttacttccattactaaattggctttgcataaatacagtgggccaggattaaccaggattattgagtgtctctgggctttagtgtactatggttttgcatacgtaagtcatattctttctggttttctccatgaaagccaaaaaaaaaaaaaaaaaaaaaaaggtggggggcttttaaaattctactggcatataaattttgtatttggtgtttcatcagaatcattttagagttagtgaatgtggggttagcttagcgttttcccaaaagtgcttaccatgaaaaagacttgacgcagtgtctgcacggagtaggattgtggtggagggagcaaatgggagcagcactgtggttgctgttgttcacctctcacaccattcccctttaactaaagaaacctctattccagtggtatggtggcatccttgactcatgtgtgcttctaaatcctaaatcggttagacatgtgaacaggatgttgatgaaagaaaaagacaaaacacgatgatacttttgagtttaaagtggtgtcaatgatgaagagcagggggaaatcaattggggactttcatgaccttgtgcaaaatgcatagcattttcattttgtagagcatacatgtccccaagcagtgtttgaaatttaggtttctaatttatgtagaacttaacatacaagagtgagtacactagactgaattagtgcattcagtggaatacagattctctttagacccattttgccttgtctcgccatacataccactgttgcccaccttcattgtatattttattaaaggttcatctctaagttgaaatggaaggactgtggatatgaaacaaatttcaggaaaggagcagaccacactcgttggaactgttagtaagatcaagttctgaataaccatgaaagacgttttgtgttttatttcataaacttatatctaaaagggtgatgattaagatatgaggtgagctctaaccaaatccatattagagaaagcaaaatccttaaaaaaaaaaaaaaagctattcaaagttctttaaccattcacaaataaaattacccacacagaaaactagtgaaactttctaaataatagtttaattctctcctcatgtgtagttgctttgtttgtttgattatagtgattatagtgttcattagtattgattgggtaggtaggtgcagtggtttgtatctccaaataagctggagtctgtgaaaactcccagcttctattttcatctttttaaagccttacttctaactttgttgttgttgttgttgagatggagtctcgctctgtcacccaggctggagtgcagtggtgcgatctcggctcactgcaacctctgcctcccgggttcaagcgattctcctgcctcagcctcacaagtagctgggattacaggcatgcactaccatgcctggctaattttttgtattttattagaaacggggtttcaccgtgttacccaggctggtctcgaactcctgagctcaggcaatccacctgcgtcggcctcccaaattgctaggattacaagcatgagccactgtgcctggcctacttcccacttctttcagtatcagcagctattctcttaacataaatatttttgtcactgtaattgtgatggaacaaaggcaattcatgggtcttcctacattttagttgtcctacttactcctatgacagaattaggtttttatttccatcaaataagttatatcagtgcaaatgtatttctggcaccattatagtaaatcttagtacagtagccaagtggagggagtgtgtttgagtacttaatttgggcaaagtggtttttaaaatatatttctaacagtaatctaagtatcttctattaaaacccctttaatcagatggaacacattaaaacatcagaacagaacctcaggtagttacagtagagtgatcatgtcatctcttaagccagccaaggtatgaaattaaaatattggctagtcttaaacatatagaattaatttcaggaaggctttgtcaatacttgctggatatttacagataatctaatagcatacactttttaaagctacatgactcatagaagtcaatgtaaaagggggtaagatggttttgtttgagtgtagcaggtattatttacatctctggaagtgttgctgataagagataggtttgaatctgttcattacatatgaatattggttgtgtttttttcaaaaaattatatgattgcagtttgaattttgaaatcaatttactggtgatgtcagcattttataactctttggaaatgaaagtgtgatatttatgcacacattaatatgtgcacattaagttagctccttaaaaatcccccccccgccccaccaaaaaaaaaagtgtaagctggccaggcgcagtatctccatgcctgtaatcccagcactttgggaggccaaggtgggtggatcacctgagatcaggagttcgagaccagcctggccaacatgatgaaaccccgtctctactaaaaatacaaaaaattagctgggcatagtggtggtcacctgtaatcccagctactcaggaggctgaggcaggagaatttctttttttctttcttttttttttttttttctgagacggagtctcgttctgtagcccaggctggagtgcagtggcataatctcggctcactgcaagctccacctcccgggttcacgccattctcctgcctcagcctcctgagtagctgggactataggtgtccaccaccatgcccggcttattttttgtatttctactagagacgggatttcactgtgttagccaggatggtctcgatctcctgacctcatgatccgtccgcctcagtgccccaaaatgctggaattacaggtgtgacccaccgtgcccagcaggagaatttcttgaacccagggggtggaggttgctgtgagccgagattgtgccattgcactccagcctgggcaacaagagtgaaactccatctcggaaaaaaataataataataataaaaaataaaaattgtaagctgtaaattatagcattgatatcaaaaagattttcctattctgtctatatttatttttctgttttttttttctattgcaattgaggtttataatcattttccaaaattggcaagccactggctttcttactacgattattgtataaagatgatgtgcataatattttcatttctgataatgggattggattactctgatgttcatgttgccttcaaggatatgtagaatttagagagagaccacctggtcagaaccttcaaatggggaaaatgaattctaattgcagctccaacttgctttgtggacttgagctactcaaatttttggaactttagttttcctactgtaatttgggtaataccaacctcatagaattgttatgaaattaagtggggctaggcccacaaaaggaaggtgatcttggttcatttttctttcattcttcttatttttccagatactatctgtgaggtataggttctgatcccatggctttgatctgatcagcacaggtctcatgaaatgaagttccatgggaatttctaccaaaagcatgctgtaatcccttctgagcctccccttctttttcctctgttacagcagaaatagaaaaagctttctaattgagtatattcaccaggattctctttcaaatttagaaagcccaggatgttatgagatctgggaggtgttaaaacatcacattagtcaacacaagctatttttatgagtgtacctatctgtcttctctcctggactttgagctaaagtccttgtggctagggatcatgtcgcagttactcttatttcttcagcacactaaaaggtggccactcatcaaggtctgtggaactagaaagaagtaagagttttagagtattctgagtaagaaaaagttcatgccacacgtttctccagttaggagatacatatatattttttggaaggggtggggcgggagggggtgtgtttgttttttggagacagagtgtctctctgtcacacgggactgcagtgcattggcgtgatcacagcttgctgcagcctcgacctccagtgcccagcaatcctcccgtcccagcctcccaggtaattgggaccacaggcatgcaccaccatgcctggctagttttatttttttttgtagagacggagtcttcttatgttgcccaggctggtctcaaatttgtgggttctagtgatcctcctgctctcggttcccaaaatgctgggattgcaagtgtgagccactgtgcttggtcaatataaataaggatagtttgttttaaagtgcctatagatttgtgttattaagagaaatgaggggctgggcacagtggctcacgcttgtaattcctgcactttgggaggctgaggcggatggatcacttgaggtcaggagttcgagaccagacggaccaacatagcgaaaccctgtctctactaaaaatacaaaaattagtgaggcatggtagcacacccctctaatcccagttactaaggaggctgaggcaggagaattgcttgaacccagggggcagaagttgcagtgagccaagattgcaccactacactccagcctgggcaacagagcgagactccgtctgtgggggggtggagggaagaagtgagggacttcaaacgtaaaaaaaaaatccagtagatattaaaagaaaaaacacttttagtgtaagttttggaatattgtttaccaataaataggttttgcacatggctttttggcaataggcttttttccttatttttctgccaaaaaaaggtattatgaataggactaccaaacatgatttcgtactttttcttttcttttttttttttaatttgagacagggtatcactctgtcacccaggctggagtgcagtggttacaagtgagccgatcacagctttctgtaggcttcacctcttagactcaagcagtcctcccacttcagcctccaggactataggcctgtgccaccatgcctgactaattttttaattttttgtagaaccggggtttcactatgttgctcaggcgttataatttttataatataaatgtaagtgtaaagaactcaaaggttaaagataataatgctagaagatatcattgctaaaaggatctgaacagagtagattactaaagggagtgtcaaagagcttccaattgagtttgattttctcatcggcaaaactaatttcactgatttcagtaatcatagttatttatttcctcaggtaattaaattatagggaagcctaataattatggtatacattattattcatattatctaaggtgtacatttgctcagatcagagagagaaggggactttttttcacaaacactttcagatgtgtgtactcattcataaataaaaataatagctaacattggctataagatgactatgtgtcaattgctttacatgcgttatcttgtgtagttcttttaaccgccctaggaggtaagtataattattatgtccattttatttatttaattatttaatttcagagctgaggtcttgctctgttgccgaggccggagtacaatggtgctgttgtggctcactatatataacttcaaactcctgggctcaagtgatcctcctaacctcagcctcccaagtagctgagactacaggtgtgtgccaccacactaagctaatttttaaattttttgtagagatgtgatcttgctctgttgcccaggctgctctggaactcctgggctcaagctgtcttcccaccttggcctcccaaagcactgagattacaggtttaagccaccactcctagcccatctccattttaaagatgaggcaattggaagaatttaagcaatttccccaagaccacataactcctaaatgttagttgtgggttgtcagggccttttccgaataaaaacatatggccttaggatctacaaattgacctagaaggaaggagctagaatttgtaattggaaatattaccacttttgggaacttcctgcaggctgagtgaggccagttttcaggaaaatccagatttcccttaggcacaggctattactcagtttatttgtgcatctcctttcactttcttttgtgattcctttctttgcctttagggcagggagcgtcattaaggaaggcgattgtgaatgttcttctatttgagggcctttaggtgtggctggatagcatatgaagcgtattaatggcgtgagagtcagggaagcaacctcaggatccctgtgatacatggtgtctgaagtagagatttctgtattgctttctacactcagacttgtaccaaaaaacccttcaccatttcactttaatggatgcatctataacagggtgtgggggaacattactcagataatccctgtatttctttctctagttagagtttattaatctgtgactatggggggatggaaggaccagggctctgaaaaagcctacatttaaagagtatattaagagagcaatttaatcattatacagtctgactccagttatgtggtgatataaaagtttcagattggcgataataaataatattttaggattttcaaaatctttacccttacctcattgagaggtaaagtaagtgggaattatctcagttcacatttccctcctctcccatctcctccccttccctttctttcttttttaaaaactgcttttcagtttgtacagtatgcaaataactgtggtaataccattaagggttaatattgagactaaacagaggtcaggccacatggcacacagtgaaagaagtaacactaggagccaggtttaatgggtaacactcctgtacacttttaaaatattatttatttattcattttttaaattgagacagtcttgctctgtcgcccaggctggagtgcagtgaggccatctctgcccactgcaacctctgcttcccgggctcaagtgattctcctgactcagcctcctgaggagctgggattacaggcatgtgccaccatgcctggctaattttgtatttttagtagagacggggtttctccctgttggtcaggctggtctcaaactcccaacctcaggtggtccgcccgcctcagcctcccagattgctgagattacaggcgtgagccactgtgcttggccaggtttgatgggcaacccttatttcacgttatcatcaaaatgattaaaatgtattcagaatgactgaaatgttacctaaacatcagtgaaacaaatatctaagctccatttttaattccatcagatgatgccaaaatgatcaatatgagacaaagggaagtttattaactatagcaagatttgagaaccagtaattactatgtgagtcaataaaaactgccagtgcatttttatttctgagtttatcctgacttttgtgaccctttggaaggttagttcctgaactaccatcatcatgatcttgtgactccagcaagagagaaattgggaaaggagcaaattatatgtttgaaagctacatattattttttgcacatcttaatccttgcaaaaacaaacccactttgcagatgaagaaactaaggcttagagagattaagtatttgtatcatagccccatagcattgatgttcaaatccaggactgcctgcctaggtttcccagctcctacatttataatatcattcatacaatttttaccaatattattttctgagaaatgtcttttggccatttcagagaaagaatggaattgttacaggaaaggggtcccaatccagaccccatgagagggttcttggatctcctgcaggaaagaattcagcgcgagtccatagagtaaagtgaaagtgagtttattaggagagtgaagaaataaaagaatggctactccatagacagagcagccccgaggctgctggttgcccatttttatggttatttcttgatgtaatgttaaacaaggggtggattattcatgcttcccctttttagaacatctaggataacttcctgacattgccatggcatttgtaaactgtcatagtgttggtgggagtgtagcagtgagaatgaccagaagtcactcttgtggccatcttggttttggtgggatttcgctggcttctttactgcaagctgtttttatgagcaaggtctttatgacctgtatcttgtgctgacctcctatctcatcccgtgacttagaatgccttcactgtctgggaatttagcccagtagttctcagcattgttttacccagcccctattcaagatggagttgctctggctcacatgcctctgacagaatggctgacatgatgtcaaatagaatcacgtgttttttaaatatacatgccttaaaaaaagccaaaaaaatgaagtcattaaaacttttggtgttcagcagtcatcagaaaggcatgatgcatgcacacatacatacatatgtacttatatgtggaaggtagggaaatgaagaagtgatgattgctgtttatcacacctttggagccttgacaaataatggtagtgccgtcctatgcttgtatactttttgtaactcatggatatgaatgtttgtttatcatcttctctaaaaaattatggtggcagcactatatttattatttctaacagaatcttactggtatttgcctgaaaacaaaaagttttttgtgtgtctgggaaaatctgccctggattgactgaagtcacataccaacttgaaaagaaaaaaaaagtgtgtgggggagttgggagatcaaaacattagaagtgtaattaaagaaggaggatttctctggagcattggtagagtaaataagagtgacagatattcattacagaatgtatctaaacataaaagaataattcttttcataaaagaaaagttaattgaacctggctacatctgctataccatctttattaaggaaggcagaagttgaaagggcagctggagttttcagttggttgctaagactttgagctagatttctggaaagaaataacaacaaacttccttgcttactttacagatactaggaatctgcaaggtaacacttccttcctcttccctactgcctgtcaaccaaatgcattccttttcttttctctttttattaggctgatgtatttagtgcttatatcttccaaactggacaattccaggtctcttccagcagggaaacttcaaagaacttcaggggtcaccctgaggcagttctctttaatgaattctaagctgcctccagggattctttcttataccaactacaacaaaactgaaacactttctagcattatctgtgctaaggttccttgaggaaacctttaaggacagtgaacatgggaagtgattgctaccagactactggtgataattatctgtgtaaataaatacatgcatttattttaaaacagacaaatttgaaagagaagtttcttatagatacctgtggactctgacatgtagataaagagtattatagtaccataggactctaattaatattaaataaagcaatgcatgtgaaattaatatagtatctaggataaatatgctcagtgcattaccactttattggatctttgtattaatccttataataaccctgtaaggaaagcaggctgggcttatgcattcaggctttacatgtgaaagctaggctctgagtcgttattatgacatctcataggcacttaaactgcagcaatgagactaggacctagatactctgacttatagttcattgtaaatttatatcaatgagaagtctgtgactaaaataactgtatttattaaatatgatcaccgaagcactagtaggagccaatattgcagattaaatgcatttaactacctgtaaatttcaagaaggcacagctttcttgtatgaactgcagaattgcaactcccaccatcaacacttaacgtagagtagatgcttaatacacgtttgttaaatgaatggatgagtaaaaaagtcacagcttttagacgatatggtatactagcttttgaatgcaacaggaagctattctttattaaagatggttcagaatgatttgggtagatttaaacatcttccatttataatctttttcctgtgagtaaatatcagaacttctctgctgatttattgtgcttaggccagcaaacccagaattgtttggttttccattctctaatccgtttgaaagcagtattatctgcattcttggcactttggtatgatttaaactgttaaaaaatttttaaagtgatgattatcttgattatttcttaaagagttgctggagaactggacttaatgatcctaggatttaccctatatgatcaggttgtttagttattttatttaaagatctaatgtattaagacttgattgggaaaagagacaccaaagaagaaaaaagaaaatttgatccatagatgtatacttagtcatataaaatgttctaattatcatataatgaagtaaaaaaggagagaattccattctataaagcatatagggtagaattccacgtaagaccagcataagactttgagctttgactcaagttaccatttctcttgcaagatagattctgttaaggttgaggtcaaaggattgcttgagtccaggagttcgaggctgcagagagctatgatctttgccactgcactccagcttcggtgacatatcaagactctctaaaaatgaaaaaaaaaaaaaattctgttaaatttattttctgagagtctgtcctgttctagacactaaagtgaataaatacaaatatgagaagacacattctctactcttgaggaccttggagtccaacagagagccaaagacaaatatgcaaatatctttaatacaaagcatagtgggataaatggttcagcttttgctcctggtgagatcagtgacaggaaaatcacatgtagttggtggatgagatagagcttcacagatgtgatagtgtttgagacagttccagagagtttctgctggatagtgggatgtttgataagcaagatagaaccctgtggtaagggatctcaagggcaaggcgatcttcatagtgtgtgatggtgcagaaagaacttttcctaactgcatcatatatcgcttagacatcctttttgcatatcatcaagattctgtgtgctagcaccgaataaacaaatcaaagttaagcaatctatttgatagctttggaaaatgaattgatggtggaagagtttggtattcatgacttttcctttaaatgagcttttcatattattgtacattatggttatcgtgagaagaactaggagtaaatctcttggccataaggcaatcgtattaggatttacgttcatttgtagcttgaatttattttatttatttatttttcatggtggggggctttctggcaaaaattggaaagcctgctagacaaattcgaaaagcttgaatttattttataacatgatcaaatcttgtgtgctttaagtctcttgaatatgtactaatagtaaggcgtatcatgttatggcagttttcagtttatcccaaatggttggggaatggactgtttcaattaatctaatgttatagtagctaagagattacagaaaattttacttggattattcaattccataaactagaaaaaaaacaaaaattttaacatggaaaatactctgaatataatttgaattgaattttatatttaattatttagaaagctctttcaagttctaggcgatgtttgagtttaccaatgaaagtgtttgttatcctttattttctagaaaataaattatgggaacttgacataatcctggattaaggaaatttgaatttctcaaccagaagattagagcttccatgtttagtctcctacataaatctattatgtgaataaaatagaaattgtactcattttcaaagccatgattatcaggcacatgatgatttgatgtgataagttatggcttttaagttactgtcatccaaataaaaaagccacagataactgcagagtttttaagaaattaaatattgggaggagagagacagttaaattccatatttctacttgatagtcacaagtactctgatgactgataagtattgtaggctgtgcaatactcacttactctgagctgctgataattgtaatttagtgggaccattcttacatcccagtgtcagcctactgaagaacattttgtattaatggtaaaggtcaaatgtttcacaggcttccactagcccctattatagaatactgttcagttttatatatttaaatatttatcccccaaggaaatttgaaatattagattccagtataattaaaatttacttaaaacttggcaattaagaattggggcagttcatctctaattatcccttcatctatatgtttttaaacatgcagatatagataaacatgtatattcctaaacatctattggcctatagcattttctgctgtggctaccaacagtatgcatagattatttggaaaggcttaacttcatacgtttttgttagaaacctaaacctgcctttgtggtcatcatagtttatcatttggcacttaatttcttcagaagtgttttcttatcgaagttaaaagaactttgctccatagtgtaactatacaaggtaaaaagtgccttttctttttttttgaacatgcgacttggtgcatacttttatgcattttgtttgagcttatttttcaaaatgagagtatattaacaaataatcttctcctctagatcttatatgttacatagtgaacagtagcatagattgctttagataactttgactttagaattttacgcgtttccacttcataaataagactttgtaataattttctaactctaaaatttttggactgtcttaaaaggacattgcaatctattcttacgtgggctatgatgaaaatattactgagatagtgataaatgatatattgattgctgttactccgtctccacaacccaaaagttttcatctatcagtccagtgactgtggtattggtggtggtatccaatgtgtgaaattaattctccatcatactttcttttgtgtaattcctaagtaggctatttaattttttcattggctgggtgtggtggctcacacctgtaatcccaccactttgggaggctgaggtgggcgaattgcctgaggtcaggagttcgagatcagcatggccaaccgtggtgaaacgctgtctctactaaaaaatagaaaaaaattatctgggagtagtagtggtgcctgtgatcccagctacttgggaggctgaggcaggagaattgtttgaacctgggaggcggaggttgcagtgagccgagatcatgccattgcactccagcctgggtgacagagtgagactcatctcaaaaaaaattttttttttcttcatataaaataaacataggggtggatgatactaatgttttcccattttggtagtgcccaagaaattaaaatgacgcctttaaatgaatgcggaagatttgaaaaggttccatttttgaggctaagagatgttatgaattcaagaaatgtaagtgcatgccaagaagataaacaactttgttttaaaattgggttccaaataattaatcagcagtacaaaaaaattgacttatgttcctttgtatactgtcactcattgaccatttatcccaaggcatttggacagtttgatgtttttttttttcatgatcataagttcatatgtaatttttccctaaatcctgagtcattgcattgttgctgcaattatctaaaataacttactcctcggtttgctctttcttgttaagttcctctgaggcaagtcagtgaacttaaaatctctttgaaaccaagacaactctgtaatttatttctcattttagggggaagttatgttgctgccctcaaatttggcttctgctgggggccatgacacatgcctgtagctccagctacttgggaggctaagacaggaggattgcttgagcccaagagttggagtccagcctgggcaacataatgagactttgtctaaaaaaaaaaaaaaaaaaatggcttctgtgaatataaatgtcactagagagtgtgaatataagtgccactggacagtctactgtaattatttggaattctttcaaagtagtgtgatatagataaaagatgattttctacacattttaccagagtgtaacctaacgggcagcagtatgtaaaatgggcttaagtattattttatttccatatcctctggttcttcagttgcatcccctttctgccttaagttaaacatattgcacttccatctgctctacactatagatgattcacatttattttttgcagtgatattttttaaatgagtttagggagcagatgtttttgcattcatacttgccttccttttcctgatgtctttccacaaatacagggggaaaaaatgcattgctgctgtccttggtgaattttgcatatctctttgattcaggctgctgcactgtaatgcatgataatgtgacaactgcagtcaagtaagacgtttctttagtttcctagtactctatatcaatatcacagctgtgctgcagggaatcgaagaacttcttcagctcttggtaattctcctttgggtaaaagttaatccagccagacctcttcctctgatagccttcagttttgagactgattttagacaggtggttatggatttataaatgaactcaaaaatacaaacctagatacatagtgtatctatagcacactttcagtataggtttttttttctgttctaatatccaaataaagcacttgcgttattttaaattacatgcgcaaatgttgtcagtcttgtctgtctttttaaaaatgatgtctaacagaatattatggttatttggcaaacctctgcaaacaaaagtgttctgaatgcaggtgtaactgtgtagagtaggaagagcactggactcagaatgagaagacttagacattgtcatatttattgctttatgacaaattatcccaaacctgacagcttacaacagtatatacttattatctcatattttctgagggtcaggaatctgtgtagttctggctcagagtctctcatgaagctgcagtcagaatgttagatggggctgcagtcatctgaaggtttgactggggctggaggatctttttccaagatggaagtttgttgacaagcattcttacttccattttggaccaaggaaccctcaattccttatcagttgagttccaccgttggactgctcacatggtagctggcttattccaaaatgagtgatcaaaggaagagagagtaagagccaaagatagaagctgcttataacctaattgtagaagtaacataccatcattgtatggcatgcagtaaccctgttacaatgacagggctacagacaatatgtgcatagttggaagcagggataattgagggccaaccaggaggctggctacccaggtacgagtcatctgtttgccgctaaagcgctacaggaccttacataggtcgccagcttcttgagcttgagtttccttattggcagcaggggcattgtaccacttttcctactgatcccttgaaatgtaaagatcttaaatgatggatgtgagagcattttgtaaatgtgaagtagctgtaactgtgggggttgattaaggaatcatattactttttagcagtaataaaaggaaagaaaaaagagggagagaagaatggagagaaatggagaaaaggaaaaaggggcaaaaaaggaaagtgtgtcttttatgagcaaggacgagaggtctttacctctagtggaggcttttgcgtcttcttctatcaatagttaaatttaattgctcacaaaatgtgtgcttaaatatatcctcgagatatataatttcattttttaaaggattaaacaacaacggaaaggctatgacaagcccctcttctcagctggggcagatttgagtaaaatcaaatgaatttaagtcagtagtccaaaagctagatttcagtcatcagcaccaatatttcctcattgtcttcctcaaaaatggaactgaatgctcacctccattataaatgcttctgccgcccattagaaaaggacagctaaggtagccgttagtatttccataagccactgaccttggctccgtataaactagaatctagaaagtgactgcatttattatcatttttaatgcgtatgttctggaactcatttcccctatggatgactttcagtttcattttgtggcatccaatttgtggagacatcttacttttagaatcaaagtaacaatctctgtagtacaataggtgactggagaccatttaccaagtggagtcataagtacttcaaattcatgtgtccaaggccaaatgcattatcccctcaatctaccctctgcatatacatgctatattgatagttatttgacgaggtcattttgacgttgtctaaaaacgaactatttcagctttttttccgcccttaagaaatgattgtgacagataatttcacacattccctcataattctcacacatttcttgcttcattacctcttcagtccctgaccttcactctcccttttatctgagacctgcgtcagggaaggataaaggtctggctgtccattgcagtcattccctggccttaaaacacattgttttcccgcattttgatttgatcattttgaaatgttccctaagttaaaacacctgggtcaaaagagcttttagcctgtctagtatccgtccattaaaaatgacttctcttcaccagtcacctagttagccagtcagcatcctcagtcatctcacgttcctttctttcccctcaaatctcatgttcagtccacaaaccctcatgatagtagctctgaaattcctttggatttctctcctccagaatcgcttgaaactgggagacacaggttgcagtgagccgagatcgccccactgcactatagcctggaagacagagcaggactctgtctcaaaaaaaaaaaaaaaaaaaaaagtctgggcatggtggctcatgcctgtaatccgagcactttgggaggccaaggtgggcagatcgtgaggtcaggagttcgagaccagcctgaccaacatggtgaaaccatgtctctactaaaaatacaaaaattagctgggtgtgatggtgtgcgcctgtaatcccagctactcaggaggctaaggcaggagaatcacttgaacctgggaggcggagtttgcagtgagcggagatcacgccactgcactccagcctgggcaacagagcgagactctgtctcaaaaagaaaaagaaaaaggaaaaaaaaaattgtcttctcctctgcattgtattctttctacatcctttgtcactgtttctcatgtttaccattttaatttccatgtaattggcctctttgaggattctactttcttctgcctttagttcactctctccatagaagccagttgccttaaaaatcctgatgtaatcttgatattcaccagcttcaaatatggtgtgagtctttattggctatagcagcactgcctactatcactttcctcaataacaaaagcgttctgtatcttctgttttgtccagtatagagctagtaaccacacgtggcggttgagtactttaaatgtggatagtgagactgagggaccgaatttttacttttaattttaaattaatttaaatagctttggatagcataggtctatagaataaagtacaacatttctgttttgtcactacccccttttttttttcctttccctacatactaagcaaatatacaaattgtatgtatctaatgtaatattttgcaaccttttaacctcaatccacactaaaaaatgttttctcttgtgactaaggtatgcttagatattcatacatgcttaacaagtattaatttatcatctagtacgtacaaagcattgtagatgtatctgtgaataaaacagatgcaggcacctgtagtcccagctactcgggaggctgaggcaggagaattgcttgaacctgggaggcggcggttacagtgagccaagatcgcaccactgcactacagcctgggcaacagagtgagactccatctcaaaaacacaaaataaaacaaaaaacagacaagattccctactctcctgaggctaacactttattggacaagaaagacaatgtataataaataataaatttatttatttttttataaatgaggccaagtgcagcggctcacacctgtaatcttaatgctttggaaggcagaggtagaaggatcacttcaggtcaggggttggagaccagtctgggcaacgtagtgagatcccgtctctacaaaaaataaaaaaaatattaggcatagtgatgcgtgcctgtagtcccagctattcaggaggccaaggcgggaggattgcttgagcccaagagtttgaggctgccgtgagtgatgatggcagcactgcaattcagcctgagtgacccagtgaaaccctgtctcaaaaaaaagaaaaaggcaagtaaataaataataaacacaatgaaagtgagttgtatagtattgtatagtgtattagaaggtatagtggaatttatctgtcatttccatatggttctttttgtgtcttgtttaagaactgctttctaccctccagattcaaagatacactctagtcttttctaaatgttttatagtgttaattttcacatttaagtcttcaatccacctggaatttatttttgtgtatggtgtgagacacgggttgaattccaccccctcccgatatgggatgctaattctctgctattctggttttttttaaagatgtttctgattgtaactcattaaattgattttttttgcccctcaataataaggtactagcagtttaaaaaattgctctactgtttctaaaccacctcttaaatgcccagtggcatttacattgccaataacggaatttaaacttgaactagctaaaaacaaacaccaaagaagacaggagtgctaatatgggtcacagaaccttaaggcagggatgcagccttaggaatagattgaaattctactgctatgtgtacatcaattcatacatttttctacagagcaggtcagtgggaattacggctactaacagttcctgagctttacatatcatgtatccaactactgaaggaagtctgtttccatttatgtcccacattttcattgacacattttgggtcagacaaccacctctgtgccaatcagctatggtggcttctgctgcaaaatgtggcagatgagaagagagaacttttgggccaaatgctgaaaaaacaattcattagtagaagcattaagtataatctgtgtctcggggtgcctttactcatactctaattgagcccataaaatggcatctttggtgatgcctttggagtcatccttcaggcagtcaactggcttcctctaagcaaatgcttcttactggcctctcacagtactgcttcttataataattggaatgactcagtcctgtgtctgttttagctgtgaactgtgatgcatatatatagctagataaagttatttttatgtaaagtaatgtgacattgataaggtccagtaaacattaaattggtgatataagaacatcataacatgtaagacatcttgcctgtactggattaaatttccatgaacttccaaagttgtactgcacattgcatcaattcctgagtaaacagttggttgataaatgaattctgttcttcggaagtgggttggaagcaataggattgacttgggctatttttcctgatattttaaatttgattttgcacttgaaaacagttatggctgattcgaatgataagaaatgtcatcagtgtagatgtttgttttgattttcctccataacttttcctttgctgattttaagggaaacgtttttaggctaagttaaaaaatatcatcttggccgggcgcagtggctcatgcctgtaatcccagcactttgggaggctgaggtgggcagatcatctgaggtcgggagtttgagaccagcctgaccaacatggagaaaccccgtctctactaaaaatacaaaattagccaggcgtggtggtgcatgcctgtaatcccagctactcgggaggctgaggcaggagaatggcttgaacctgagaggcggaggttgtggtgagctgagattgtgccattgcactcctgcctgggcgacaaaagcgaaactccatctcacacacacacacacaaaaaaaaaaaaaaaaaaaaaaaaatcatcttatatgaaccaaaaatatttggctatgtttttccattatggccatggttactcataaccattttttgctttcttaatttagttgtcctaaatgaattttgaatgcagaataacagatgtgatcaagcacagaatgttttcgatacatcctgttattaagaaaaaaatttctcccttattttgatgtaatggaacattttcacaaaagtaagtaactaaactggattcatttacttctcaaagttagcaaatcttttacttctcaaagttagcaaaaagcaccttttaaatgtaaataacacttgtagatagggttaaaatgagttttaaaaaaaggtgatagggtgcaaaatgcttcctttctagaggttgaaattatagtaagcaagattatccatcattcatttggaagatgactggggtggaggcagcatgagttgtgttgctggggcagacatgacataaagggtagagtcagtacacatacttgcaaagatgtagttatgagacctaatagggacctctctcctgtcttcctgtcctgtcccatctctccttccttcccctcctgtcatctccacatgactcccctctaatcttctctcctgctccgtttctctaccttcttcaactttagatatttcacatatctttccagggggattgagaaagatccagatggatctaggctttattcaatatcttttttttaaccaatatagattattgtgtacacccctgtcctagacattaatagactagaaaaaggcacaaattatacatgtcaactgggggaaaatgagaaggtaaaaaattttaagataaagggcagggaacaaattgtcatcgtcagaaatgagggatgtttaaggggttagtacccatttttaatattagagaaataataatcctcaaagcagctttgactccatattgctgttgctcaagtagagtaactagaagctgagtaaagctagaagttgtgtgttgaaagtgttgctagaaaaatctgcttaagcagcatgagtgtctagcttcccaaggtaactatggaaaaggatgcaatagcaataggaatgtgtaagttctgggctgtttaatatagttttctcaggtcaggcgtagtggctcatgtctgtaattctagcactttgggaagctgagacaggaggattgcttgagcccaggagttcgagaccagactaggcaacatcgtgagaccctgtctacaaaaaaaagaaaatattagctgggcgtggtggtgcgcacctgtagtcccagctgccactacactgcagcctgggcagcagagtgagaccctgtctctaaataaataaagtagttttctcaccatgctttatatttcctcagcagacacctaggtatcataattgaaataaacatttccttaggtgagatacttaaaatagattcacgctctgggaatcagtttgttaatgaaaatacacccctcgccccccgcccccccaccttttttttccctgaggattcaggtataaaactccaaatgtttgactgggtgtgatggctcatgcctgtaatcccagcactttaggatgccgaggcgggtggatcacctgaggttaggagttccagaccagcctcgccaacgtggtgaaaccccgtttgtactaaaaatacaaaaattagccgggcgtggtggcgggcgcctgtaatcccagctactcaggagactgaggtgggagaacagatcttttgaacccgggaagcgaaggttgcagttgagctgagatggagccactgcactccaagctgggcgacagagcgagactctgtctcaaaaaaaaaaaaaaaaaaaaaaaaagaactccaaacttttccttttttgtctgcctggaacaaatttcaaaacatagtgcctaatacctgcaaaaatagaaataaccacggcattgaacacacttcagtaattgttttagttgaatttataggattaaaacaatttcagtgttgactgtttaacaaaatgaaactcatagttaacacaggaacaagttcaattatctctgagtcgttaatttatgaatggttccatggccattttccatagtaatgctgaatccctcccaccctaccttgttcatattctgggtcagtatctgaattgccactagcggtgaacaatgtgtatgaggtacacacacacacacacacacacacacacacacacacaacaaattaagcggcttctcagactgcctgtctggtgtttgttatctatctgtagcaattggaagtgattctgttgggccatctaaagtgcacattataaaggaaaaagattttgcttttgtttccttactagtagccatagaaacttttaaaaaccatctgtaatacattacaggagagtttttgtgttccttatgcttttgctagtttctatttgtattatctgtatattgactataacctcagctaccctagtttgaagctttactttaacttactgaacttgaaggaattacagatatttttactcaatggccagcataaccactccttgtttagccacagtacttttatatggcttcagtgtgcttttatttttgtactttatttgttaagccgactggcagtaattctgtgacatggctttgactgaggagttgtagctggtagccacagcctagctgatggtctttaatatggaggcagaggggctggcaggaagcaatagtaaggcgattcacattagtttcttttactgcaagtgtgaatacacactataggtcatcaaaaggatattcaggattttgtattgtggtttggacagaaccatgactatgtgaatttactgaaaaggttcttgttcttttgcctttgtagctaatcatatgtaatacaagtcccctactccagccagattaaaaccatgggtaattccttttgcactaactcttaacatcttcaatagttatgccggtatgactgggtttctctttcattgattagtgtttttttcccctgttattcttcatcatctccttgtttcagtctcttttaaatatgtgttccctcttaccaaatttcttttcttgtacatatttgtgtctatacaccaagtcctgatttttggtgggctgtgggaggccttgttgtttctattgaacagcttcataaggagcccagctgttagctgtcaagggttttctcttttattagtctcagaaggcaggactggcagggtgcagcatgttggtacaagatcccagctgttgtaatggtgctctcggagtccctgatcatttgaaacttgaagaaaatttgaccttatcatggaagttgtttctgtttgttcatttgtttgtttttgaggggctcgcagtgcaagataaaaagatgtaaatgataactgtaagatatggaggcagtatagagaaaaacgcgtgtttctgcttttcaaactttttagtagcagacatttttggtatggagagtttaagatacaggggggatgttaactaatgtggatgtagagaaatttgtcctggcatatctttatttggtaagcaggctaagcaaacttagcaaaatttattcacgctttaaaaacatgagataagagctctttctcagaggcacactcttaaaagttttgccgaattggaaaggttctgacgctgtttaattaaaagaaaaatgcaataaaaccagattctgtttaaaaggattttgcttctttatgtagccttgtctttcaggttctctgggtggcttctctatgccaggatccttgggaatagtttgataagccgaccaagttattgaataaagagaatcatacaccttaagcaatgaaaatatctgcctttacttcattgtgaaagattgacagacaagaacacacgtaatagcatgcatttacgtttaagaaatgaaatttatttaaaactgggaaccttgagagaaaagcttggttgggactgagtcattacccagttaaaaataacctttccaggtcatgtcgttttgtttgccacagtgaaataagtttatttcagcagaatgaagccattattagcttggcagagtccacttgtcagaattttatggagcacaacaccgtttggctgggaaattcaataaatactgtaatgtgagaggagttaaactccaagggctgaaggggcaaagagtggaggatttgttgctaattcattgtttcacagctccaataagaaagcatgaggatatatgacgaattatcattagaggtcaggcgcacaaccctttcgtgaattaccaaagcagcaggacttgtgagtaaaataaaaactttaagctgtgttaggatgtatagcactgaaggggtagcgtaaatattgagtgtctcgatgctcaagttttttatttttcttttttggagggtaatatgtcttctttacctgccctcctgctctatctgggaatttgtaaaggaataaaatacagttgaaaatcctatgacagtagaatccagccatcagaccagtactgcaatattgaaacggaactgagccgtttgtcatcttaacaatctgggaaaccaaagcagtggccactctcaagcaccagtgggcttcaccttgaggtatgaggtagtgtgttctaatgaccagggtatggtgggactaaattcctacttctgtcacaatgtcaccgttgacaagttatgtaacttaagtaggcctgggcttttttatctgcaaaacggtgtcaagtaatagtatttatttactccatagaatcacttggggataaaatgaaagaatacatataaaacttcagtacagcatccatcatgtagcaaaataaaccgtaatgacttcatacttttcagttgaatttgagtaggaaacaccagttactttatgatatacagaaagttactaatactaggaaaagtctttaactttgtgggaaattaataactccaacattgtgctctatttatgtcattattcattcacttgtgaatgtcaatgtacaacttttttatataattacaatcattttgaactttttttgttctgactttaaaatggatttctttatgaaaatttccgttcttcgttatgattcatatatgatattttcaagtttaatattctggtcatgttgatatgctgtaatttgctcgaacttcttgtggtgggttgttgaatttaaaactgaaattgagtcttgaggaatgggtaagatttagttggatggagaaaaactgcaagggtagagaagaaacctattttgagataaaacatcactgcttacctatttggagcttttctggctacgtagactattgaatttcacatgaaaaagaagtgtaggccaggcgtggtggctcaggcctgtaatcccagccctttgcggggggccaaggagggcagatcacgaggtcaggagttcgagaccagcctgaccaacatggtgaaaccctgtctctactaaaaatataaaaattagtcaggtggtggtgtgcgcctgtaatcccagctactccggaggctgaggcaggagaattgcttgaactcgggaggtggaggttgcagtgagccgagattgtgccactgcacttcagcctgggcaacggggcgagactccgtctcaaaaaaaaaaaaaaaaaaagcgttaagtatttctgttttcatgagtgtctcagcactgaaataggttgagggttcccttcccatttaccttgaaaagggtgtttggcatatgttttagccatatgatgaaaagaaattgaggatataaaattacagttagataggaggagtaagttcaggagatgtattgcacaacatggtgacacagttaataacaatgtattgtaaacttgaaaattgctaaaagagtagattttgaatattttcaccataaaaaagttgttgactacagttaataacaatgtattataaacttgaaaattgctaagagtagattttaaatattttcaccgcaaaaagtgaggcatagatattttaattagcttgatccattccacaatatatacatgtatattttgtatatgtacacatatgcaattttataccataaacattatggtatgttttataccataaacattatggtatgttttataccataaacattatggtatgttttataccataaacattatggtatgttttataccataaacgtaaaacattatgtatacataataaacatacataatatgcataatatatatacagtttttgtccgtttgaaaaataaaaaaaaaaagaaattgaggatgtccactgctaacaccatacttttaaattgatttactagaatgtcttatggatggaccatgagctgacccacttgctggcctgttaggcatacagagtgacatggaaggacctttcacaatgtgataagttactaggaccttaaatatagagaagacactaaacttgttttgggaaaacgtactcattgtaatatgaaagtatagtttgcatcatttgcttgtcagcctgaccttcctgcatcccctgcacagtctgattaagattcagagagccttggaattcatttcatttcattaaagcactgccccagagtccattattgcaaaatattagcatagtgctccatgtgacctttaaaagcttagaaaatgatagagtttgactctttctttattttagtgctttggataatgcttttttcctgttttcctatactaatgagttgtactcttactttaaaacctgccttctgttttcagtaaatcttttgacatatctttttctcagctaggacacaggtctcctgactgtgtctttcttctttcccttactacctttatctcctaagggtattttccttggaactggtaattttcactcaaatggattaatatggataccacaccacaggcttcagagacagcttttaagccttctggaggagttgccaaagtcatttaaagagcagccccctgactcttaagattctttagataaagagtgcacctctggacagctgattgccccctgccgatgataaattctctttcttgtatcattccttcagtcttgaagtggtaccaaggcaaagccttttgctggtcataaactgcagaatcttttaatcagggactggaaaaaaaaaagtggttggtgaaattggagctaaccatcccgcatcctcctattgaattgtacttgtaagtacagttaaacctaaagagaagatttcttcagagtgtaatagctcccctgggtatttttcactggagcaggttaatttatacttacaatatctgaccacagctgatcaatagcaaatctgtgatgtgcagaaggaagcactggagatactgtaagcaaacgtacctccacaattgatacacatacaaccacttccgagattatttttggcacaatctccttccttttctggcatctataaactggggtttaaggatgacttatttgtttctttacttacctcaggattttgaggatagaatatttcttggccttgaaggtcatgcatgataattcatgttcacatgaggtagattctcaggccttgcctgagtctagtttttcattctactgactgacacacactgagagcctggctctggggttgcttcgggtacctcacagagagaataaaagcaccttggcttggcagaaactaccatggacattttttgttagacttctccggtacctccttctcccagtgttgcaaaattaatccctccgtgtctgaggaaaacattacctagtctcaaacactcaggaggctcctgattaaattagaaacctgagtctagtaacaaagttcaaattcttggctattgtgtctgctgtgcctagcgcaggttgagctcagaattggtatttaaggaatatttttacatgtttacacctactctcggggaaaagggatggattggtaagagttcctaaatttatcaaatgagaacctcttgaataaatggcctaatcctgtgcggtggaataattatctagaatttttactgaacacaaggtattatactttataattttgtgtcaataattatgatctggtgaatttagagtcgttttatttccttttgtttggaaaatgctattcttagtttttccccagaagggagatcctttacagatattctcagaactggagcactgagggcttatgactttgaatgtttgacactttaacttttccctcactaggattttgatgttacattgtgcagtaagatgtaaagaatattatggttagtaacagtaattattcagttcacctggttaccactgctaatcaaaatccaatggaattagagtctttgtaagataaatgacatctcttgttgatcatacccacagtccaaggagtatccttaggaccaaaaaaaaaaaaaaaaaaaccaacaaaacatcgacataatgtgtgagcaaatatgccttcttgggccctgctgactgcagcattcacaaaaccccacgatttggctgagtttgtggaacgccagcctgaggcatagaagcttgtttaccgtgctgattaaaaggaaagcttgaaatggctgaggagatagtggcatctctggctctgtgtgtgtgagggagagaggagcagggatgggagaattagagaaagagagtgggccttggtagtgttattcctagttgtaataatatgtatgacagtctttggtggtgaatgctagctttacattctttctaataattggaaggataaaattaacatggaaacccaaccccgggacgacacattaggttttattgaagccccgccccacctcccggccccacccagcccatgacatgtgatgttgaaaaggctgacagataactgagagatgttttcatctctaaaggaggggctgggtaagtacttggttgccttggttaatggtagaacaggttccaaaaagaaaagaactggaaagggagaatgaattaaaatggcttcctattgtattttgcttaacagattcttgttgttctttatattattcgctcgctctctctgtcttcctgctgttatttttctgtcagccttctgctatgggtatactgtctttccatcagggtataaagggactagttctcctctcatctcctgtctttagcccagggcttgcctctgacattccctccaccttctttttccctttgagctttacgtttcagagtggatcttaaataagcttttacatgatttagagtgaagatatcataaagaatcattgtgttgctttttaacactgctcttgaaaagtaattttcttggtggtggtaataaaacaccttttaccatgtgttgagcagtgtggtaaattctttacatgtgttacttcactgaatccattgagcaaccctatgggctctgtatgatattatttccatttttatgtgataaaactgaagctcagagtggatgaatattgtagccacggtctcagagtggacaagtgggaaacactccatggcctcctagtttcagtattactgatctttctaagcagatctcctttctgtttccagtagaaaagggcttaagtaaacagtggaatccacatctcttaggcagtagaaggtgctttcctcaacaaagcagaattggtcctgtggagcttggaagtcacggcccaggacccagcgcaagaatgagagcaaaaagacaccagtgatcttgcagcatgaagtcagtttcagtgttgggcagattcgcagctagtaatctgtccagacacggtcgctctgttatccagaggtagcgagaacttctcagaagttagaggaggctgagctgtcaggaatacaacagatattggccaggcaaaagacaagacttgaggcctaagataaatcaaagaagaaaggaactttggtgtctcaaaaatatgataaaaaggcaattatctcaagttttaagaagggaataatctttattactaattttggctcattgtagtgaaatgttataatttgccaatcagtttaaattgtctagcctgtggctatcacgccggccttaaattagaatacatacatacatatatatgacataaaaccacctaaacagtaaaaagtagcatgaacctttcagatggaaatgtaatgtattaccacagagcaacagtagtttctaatctgagagcccacatctgaattacttctgctgagaaagcaagtaaccaatcctagacattgtattttgttttgaaagcattgatatggaagacgctctgtggattggttaataaatacctcaggatggagcccaaaatttcttctgttgtatagaggatgtttttcatggtgggttgtaggaaggatttcatgtgaaactacaatttgataaaaaatgagagataatcactatgctttgctccagtcactaaaattaggtcccataggatcatatctttggtacaatgaatataggactgcataaatcaggaagtacagtaaataaggctttcaattcaatttaatatatgaccagctctcttttatcactgaccttcataccactgaatgtttacagatgtgtcatttatttaagattgctaagtgttggactgacttacaaaaattaatgtatgactcactcaaaatgggatacacattctcaggacagttttaggtatcttaaaaaacaaatgcactagctgtaaactttttcctagattatgaaatttcttttgacagaaaacataatccacaaaattgtctttatattttgaggaaggaggtatggcaactactttcaaaattacgtaaaaatgtcttgctgttaactactgctagtttacattgatgtcatttttctttaatgctctttttttttccagaaggaaatataaaagacaaatgtattaatttgtcaaccagttgggtaatacctctgtttaaatttcattcttaagcatactagtttaacaaaaaagtttaaatgataatttactctttgggaggtggaagcaggagtatcacttgagcccaggagttcaagatcagcctgggcaacatagtaagacccccatctctaaaaaacaacaacaaaaaattaggcgcggtggcacgcacctgtagttccagctacttgggaggctgaggtggaagatctcttgaggctaggaggttgaggcagcagtgagccgtgatcctgccactgcactcctgcctgggtgacagagtaagaccatatcaaaaaaagaaaaaaatgtatatatatatgaatagaatatatttatatactatacatatgtattacatcatatttatatattatacatatattatacatatgtattatataatattcatatactatacatatgtattatataatatttttatattatacctatgtattatgttatatatttatatattatacatatataatatatatataatacatattttttaaagggtaggacttcaaaaaaaaaatagcctattctaaaaatttaaatgtctttgtttctgaatggaatccctgcctctcaaatgtcctgttttgtggctatcactcatactgctgctaaaataatcttacagagcccattggatcacccccatcattgctttcattttaataaatacttattcttaggctgggtgcagtggcttattcctgtaatcacagcactttgggaggccggcagatcgcttgagcccaggagttcgagaccggcctgggcaacatgacgaaatcccatctttactaaccaaaaattagctggacattgtagtgtgcacctgtagtcccagctacttgggacgctaagtatcaggatcacctgaccctggaagatcaatactgcagtgagccaagattgcaccattgcactccagcctgggcgatgtgagtaagaccctgtctcaaaaataaaaacaaaaatgcctacttttgaggtgtctagtttaactttgacaacatcccattttacccatggcaaactgagccttagtatagttgtatgccttgtgcagggtccaatctcaccttttcactgtcccaaaatcagggtgcggtccttctactcttccatcctgggacctataattatttctagttattgagccaaggaaattctatgatagtctctgggaacatttgttattgtctgcttttaaaaatcaaagaaaatgaagcactaccaaaccaaatcttcatttctttttaattttaactcatagtttcgaagcattttttgatttactgtccatcaactttacctactgctaggagttaggactggcccagcctaaatgaaacatcaagctgttcatgtgaatagtagtttatatcattgttactattcttcattcctgcagattattgcatcatttttttttttccattttcaaattttattttttagagagacttggcctcagtatgttgtccaggctggtcttgaactcctgagctcaagtaatcctcctgccttggcctcccaaagtgctgggattacaggtgtgagccaccatgcccagccaggttattggatcttagaaattagtggtttataattgagataacagagcatcatgcaaaatgcccatgcagtaaacctgtgtatgtaccccttgactctaaaataaaagttgaaattataaaaataatatttgagataatagaaagtacatgtgactaaggcctttccagttttttttgctcccaatccaaagcattagtatattccatacctgttatgtactgcatctcacctaattttggcctttccagggatatggctttgctctacatattatgcagagagttcaaagttatccatccttgtttatttcctagtccacagcaagaagactatagcagtgtccccagtcttactgcctcaggaagcatgaaagcttaggcaacattttaattaaatgttgccccaggtctttattcttgctgagaaagtaaacaaagcttaaacagaccatatcagaaaaaaagacccccctgaaatgttgtttttaaaaattatgcctcaccttctgctgtttgctctgacgtatgagacattttttaatgatgtattttattttaaataccaatacaattaattgattcaaagttcattccaaagatgttagtacctgcatcacttaaggcatcactggacatagcaattaattggagacttgtgggttattatttggccatggcgcccgatcaaaaattgttcctttctgttgccatccctagtacagggtggtagagactttaatttttcctttatattcactatattttcaattgaaaatatggcaccatataatgaagtatcttcgtaatcaacatttgaattattgctaacctctaatatattttctccctttaaagttacttttcatggctgggcgcagtggctcatgcctgtgattccagcactttgggaggccgaggcggggggatcacctgaggttgggagtttgaggccagcctgaccaacatggagaaaccccgtctctactaaaaatacaaaattagccaggtgtggtggcgcatgcctgtaatcccagctactcgggaggctgaggcaggagaatcacttgaacccaggaggcggaggttgcagtgggccgagattgcgccattgcactccagcctgggcaacaagagcaaaactccgtttcaaaaaaaaaaaaaaaaaaaaaaaagttacttttcacatgcattttggttatgcgtgtgtaacattgttgcatttatgttacatcataaaatcctttacaaagtctctaaagctccctgttttttcttcatcttcatcttgtcagctctctcctgtaatctctaatcttctccctttctgaaggcactgaggtctttcatgttttaggattttctctgtagtgtttttattaaataatatgttattcaaattagcaattgaatccaatttcttataaggtatgctacctaaaaaagatatccggacgttgaaggaaaccaaattgagcatattggttgaaaatgcaagtatcatcccagttaagatatatttatcctgtgcaccccaactttttgacaccctgtattatccccagtttacaaatgaggaaacatatctgaggagcttgtccaaggtggggaaatagatatttacataaatagctgtggtacaaagtaatgggcactgtaacaggagattggataatagatggctcctttgcgcgttgaggagggctgcctaactcttcttggggttggagtcaggagagagggagaaggtagctggaagtgtgtcatgtaaggaaagcttcacagacattacatttgtgttgatcactcatgaatgaataagactttctcagtagccagggcagaaaagagagttctagacaggaaacagcatgtgcaagtgtaatgaaagaatattttgtatatttgaaactgcagctattttattttgaatcatagttattgtaaacaagtcacaagattagctagcaaagtagacaagatttaaattatgaagtcaatttctaaatcaatgtaaagagcttggaatttattttaatgatgggaattcaatgaagtgttttaagcaggggatttacattatcagatttttgttgtgaaaagataattctgacttcagctttgagcaagtaggatagggaccaatttattctcctgtgtgaaacaagccataaaacagataaaatacatgcaacagtggtcctcaagacatgggacttcaggtcctgaagtacagtgccctctgagtgatgagaaaccaacaagcgagtaccatgattgcctcagcttactgcctggcgagagtttctagggtttaaacagaagagatcaattaaaacttggcaaactcctgagttgggaagatggggccgagtgtctgggtaggctaaggcagctggagtctgcaggacatagtaccaggacagatagctatacagaaagagctctggagatctacagaggcttcctctctggttgatattcaagagagtgctgaccagcaaatgcatgtgaacaaactacccaaggctggggaaagaaccactcaaaaagactaaaggaaacaatctctggagcttgcacagggctgggaatattgcctgctcccaccagagaggaaagctccataattcataggccattcagtagagtacattcatagagtaattcatagggcattcagtagagtagaacaagggttttgcttcagaagtggggaaaaattgactttaggttaaaccctaagctgagtcctaactaaagaatcttaaaaacaaggcctaaagttatcaaaatgtttccaagaatcttaactgaatctcagaacaaaaagcaagaatatttatagggacacaaaaatatctagcacccccaaaataaaattaacaatatctggtatctaataaaaaattaccagatatagaaggaagcagaaaagttatactcatgagaaaaaaaaatcaacctattgaaactgactcagaattgacacagatgttagagttagcagacaagaacattaaaacaagtttttaaaaaattatttttattatttttttagagacaaggtcttgctctattgcccaggctggattgcagtggcgtagtcatagctaactacatcctcaaactcctgggctcaagtgatcctcctgcctcctgagtagctgggaccacaggcatgcaccactacaccaagctgatttttcaattttttgtagagatggggtctcactatcttgcccaggctggtcttgaactcttggtctcaagcagttcttctgcttgaggtttttaactgtacttctttatgtactgtgctcctttatgttttaaaaagtaagtagtgacatgcaaatatttaaaaacccagattggagctcttgagataaaaaactacactgtctgaggtgaaaattagagaagatgagttaatagccaacaagacattacagaagaaaaggttaatgaacttgaaaccatcacaataaaattatgtaaaaataagcagaatttaaaagagttctggcctcaaaatctgtgttgttgttgttgttgttgttgttttttcaggaaggaatagtttttttttaagttttaatttttgtgggcacatagtaggtgtatatatttatggagtacatgagatagtttttacaggcatataatgcataataatcacatcagggtaggtggggtatccatctcaagcatttattctttttttagtaattattcttacagtctgatatttgctaatattgattagttgataaagcatttggtttatgacccagcttttctgcgtgaggtacactgcgttgggcttttttataagatgatgttagtaaatgactgatggctgaattttttttttttttttaaagccatgcacaggtcacagctgtggctactagtttggtcatctaaaacaagggttgaatgcttataattgaacatatgtatacgtgcatgcaatttgaaaacagtgttctcttataattatcctttaagtattcgacttttctttttagatgactttggaactttgagtaaattttatattcataaaacaaacatccaatacctatttccactccacaaatctccaagtgacaaaccaaagagaaaatttacattggaaatttatgaggtctttgggttttactgaatacttatttaaagtccgtgtgtcactatactacactgacttagacttgtcacctgtttttggtgggaaaaagatttcatgttttaccatgacacacaaagcactactgttagatatattaaggaataaaacactttccttggttctaaattctaagaatttttaaaagtacagtgatagtctttagtattttgtgtacacggacttgcatacatgcctggttttcctccataatgggaaaaacttttgtaaataactaggaaaatattttacaaatcagtgtattcagttagaatagaaagaattttaaatttttaataaagaataaagactactatcttttttttttttgagacggaatcttgctctgtcgcccaggctggagtgcagtggtgtgatctcggctcactgcaagctctgcctcccaggttcacaccattctcctgcctcagcctcccaagtagctgggactacaggtgcccgccaccacgcccggctaattttttttgtatttttagtagagacggggtttcaccgtattagccaggatgttctcaatctcctgaccttgtgatccacccgcctctgcctcccaaagtgcaggtattacaggcgtgagccaccacgcctggcataaagactgttatcaaagaaactgtgcaatgggaagttttactccgttcaatgaatgctgattacatcttaaagttttcaggtttctattgtgttttgcctttcaattgagtttgaatatttgacgtttttgcccattaatatatgaacattttttggaaaagacttcagataattagtggaacatacattacataaaacatacaatatatatttccacgaaagtatttaatttaaaaaaaggtcaagcaagtatcaagtagatctgtttttggatcttctttgagtttggtctgaagtgtaagattttggatttagtgaaagcttctcagtcagtttcctagagggattgactacaccattgtctaataataattaaatcttccatattacacagtttagagagtatatttaatgagagaaaaatgaattgctgttgaatagaaaatagacaaagctcatagaacatattttttcattctttgaataaattttcttgtattttctaattatttgattgtattagaatagatagtggatcgtgtttttttttttattacactatcatagcaaattgagaaggtactttctttctttctatttatttatttatttgagacggaatctagctctgtcatccaggctggaatgcagtgggcttgatctcggctcactgcaacctccacttctcccggttcaagcaattctctctgcctcagccccccgagtagctgggattacaggcgtgcaccaccaagcctggctaattttgtgttttttggtagagacgagggttcactatgttggtcaggctggtcttaaactcctgacctcaggtgatccaccggcctcggcctcccaaagtgctgggattacaggcatgagccaccgtgcctgaccggtactttcaatcagacagttttcactcatagctgtcttagcactgtaatatttggcagatcatttcttattcctatttacgtgaatgtccattttttaaacccattgtgtatctaccagcttgcaattactggcatccttggattgggagcaggggagtgcggtcagatttctatgtatttttttttttttctaattgtaaattttgaactatttacaagcaaaaactctccctcccctctttgttttagaaatataaaacaataaagttttttaagagatagaaaactgttgaacagagttgctttccttctgacatcaatattctcacagtagaaccattacatttttacactgagggctgatgtttagagagaaacctgttactttgcaattggtattcagatgagtggtgggggacacattttttcatttatcacattaagtttttggcagttttccactacttgcaagaagaagggagaaccacacaactacaaatgcctttgttgtctactgcctcggccaaatcacacactttgtggatgttcaataaatattgattgatgatgctattcactgaaaacactctcaggttaaaacttggagtgagtgcttaacattctcatccagctgtaattacgcttttgcaattttcatttagttctcagtactagtgtttacaaaactgtagcgttgtgaggaaactaaacaaagatatataaatagtgagtgagtaaataaagaaattccgaatgaactcaaacaaatactagacacaaatgtttcctgatacaatgcctagtaaacattataacataaatcatttatctttattagtttttcttcatgctgcacatttaaatatataaaaatatttccactgttacataaaacattttccttgggtgattcataaatcattgacaaaagttggcgttatgctaacacacagaattaggtgggttgcttttggctaaacacctcccctgtgcctccctgccatgtacacaaacacccttgaaacacgggaaatctgtttttattatatagtgctataacatggtaagaacggcattagactacccttagtaagtcagtgtactagtcccttgcaaactgtttaatgattattcagtgagtttcatttttcttatatcttaaaagaagagctaggttacttcatttctaatattaattccagattataaattctgtacatatttggtttatttttcttccaatgaagggttttggactatatctttatggaatcattattagaaggaaagtaagttttatgggaaaaataaaacagtaacaacagtagtcttctgtagtgtctaatccattagttacattttttactttttagctgggtgtcattttgtagttaaaggtttaatgactcttatttcttatttttaaaaattatttatttattttgagacaggatcttgctctgtcacccaggctgaagtacagtggttcaatctgtgctcactgcagcctcctcctctgggctcaagagattcttccacctctcagcttcctgagtagctgggactacaggtgtgtgccatcacacccagctaattgttttgtatttttgtagagacaaggttttgccatgttgctcagactggtcctgaacttataggctcaagggatccacctgcatcagcctcccaaagtgttgggattacaggcaggactataggcacgtaccattatacccagtgttattttattttttaatttttttaatcaagatgggggtctcactatgttgcccagggtggtttcaaactcctgggctcaagcaagcctcctgccttggcatctcaaagtgttggtattatagatgtgagctatcacgcccacacttaatatcttttaaagacgcaaattcaggccaaatagtaacaactgtctttgttcttccagaccctactgtatttgagaaattggtgaaatattttctttccctctgaccttttttaattaccgtagtatatttgttgtaaaaaatttgtaaggagtaaaacttcctctttatcctaattctcaccatgtttagttatatatgtttcctttttcatctttcccatacacagcagtgggtcttttttctttttactgtaacttaaatgagaccatactgagtggttctcaacttaagttatacattggaatcacctggtaagtttcaaaaatacacagatgcctgggtctccccttgaaagattctgacttaattattgtggagtatgacctgagcatccgaattaaaaaaacaaacacaaaatttttaactccctgataattctattgtatggtcaagtttgagattcctaacaaagcttttagagtttgttttctttgttgaagattgatcatggccacccatctattatgactcaacgtatggtgcaccctcactgatagtcactcagatattttctagttttgccattacaaaaaaaatgctgcaacaaatgtacatgtgtctttgagttcctatataaatgatctttgagtagagttgtacaaggggaaatactggttcaaaaaatgtgggacgccgggtgtggtggctcaaacctgtaatcccagcactttgagaggccaaggcgggtggatcacttgaggtcaggagttcgagaccagcctggccaacatggtgaaccccatctctactaaaaatacaaaaattagctggttgtggtggtgcacacctgtaatcccagctactcgggaggctgaggcaggagaatcactcaaacctgggaggcggaggttgcggtgagccaagatcgtgccattgcattccagcctgggcaacaagagcaaaactccatctcaaaaaaaagaaaaaaaagtggggaaatattttatctaaatctcttacatatgcggttcttcattttggttttgtttgatttgggggcattatctatttctctttttcttaaagcttagggtcagaaatatagcataccagagttgaaaggaaacatatacagtaagtcctcacttaacattgttgataggttcttgaaaactatgaccttatgcgaaacctatgaagccaatttcaccatcggctaattgatataaacaagagttaagttcctatggcatatgtctggtcacaaacacatcacgaaacttctaaataaacacttctaatattaaacattgaaattaatgtgagctttatatacatttaagaaagattcataaaaacaagtaagacaattatttacccaacttttggtgaatccatgagtgatgatgctcctagtggtggtgggttaaatcaaggaataaatgtttgcaaagtgaaaattgtaagaagtgtcctttcccaccatgcaattcaaaagcaatcaattacaaacataggtgagtgcttttgtgctgcagtgtttattgtcgtgtatttgtatgattatagataaattattaattttctatttgatagtaatttttaatcattcatttgttcattttccaatgcacttattcaagttcagaattgcaggaggctggatcctaccctggcagctcagggtgcaaattggggacctgaccctgcagaatatgccgtcccatctcagggtacactcacacatacttactcactgacactgggacactttagatacactgactcacctacagtgcacatgtttaggatgtgggaggaaaccaagtacccagaggaaacccatgcatacttggggagtatgcacacactccacaaagacagtggcctcggctggggattgattttttttttttttttcatcagtggtaaaacgaaatggggttgaaccaaatgatgttacctgaggacctgctgttaggttttcagcctacatttcccacctagtgtaaggaaactcttggtatggacactaccaatgactatccaccaagagggccttaaagacagtccctgatgctgggctattccaattgtcattttttcctacatcaggtttagaactacctgtttatagctttagagtactatattttgttgaccagaggagtcttagaaatcattttggttaaaatatttgttgtatagatgaagaaatgaggcccagaagctgtggatacactgtccaatatcaaacagctgaaaagtcataatgctgggtttggagaacaggactcattcttgacccactgtagcttattctgattacaaattgtagtagttagctttttctgactactaatactgtagtagttagctactgctgccaagtttaacaacttaaaacagcatttattatctcacagcttctgtgagtcaggaatatgggagtagcttaaccaggtagttcttgcttaggatctgttacgaggttgcagtcaagatgtcggccagagatgtggtcatctcaaggctaggctgggggaatattggcttgtaggctctgctacttggcttttggcaggactgataatacccgcttctaaccttattcacatggttgctggcagggattggtttttctcaccatgtggggctgtccacgggctgcctaagtgtccttagaacatgaaggttggcttatgccagagagaatgaagatggcgggagattgcacccaagagggaagtcatggtttttatataacttatagtgttattgttattgcatcacctctggcataatgttattgcattacctctggcataatctgtttgctggaagcagtcactaagtctagcccacagtcaaggggagtggaattatgctccatcttttgaggggaagagtatcagataatttgtgtacatatctttaaactactacacatatgtttaaatcgtatttagcatttggtaattgcaaaatttgtactttctgctcaaagggcgttttatttcacttcctggccctgaaaggaagctagataatcattttatcataatcacacaactgaaataaacttctggaattaatagagcagaacagtgttttaaaggttgtctggctaataaacaggagataatattgggacccagaattataactcattaaatgtatcctcatgcccaatcatgagatgtgtttaattattaaatgattacatattaatatatgcatcatgtgatctctattgccatcaaataagctgctattattattattattattattattatcattattattattattttgagacaaactctctgttgcccatcctggagtgcaatggggcaatctcggctcactgcaacctccagctcccgggttcaaacaactctcctgcctcagcctcctgagtagatgggattacaggcacgcaccactatacccggttaattttcgtattttagtagagatggggtttcaccatgttggccaggctagtcttgaactcctgaccttgtgatccacccaccttggccttcctaagtgctgggattgtaggagtgagccaccatgcctggctcaaataacccattctttagagtgtcccataatggtccgtatttttagtgtcagatccatgatccctaaaatcttaatgcctaaattccagatgttttaaatctctaaactgtcagggtgttactgggaacataaggtaaatgccttgaaaccaaacaataatgtgtttttaatgaagaggcctttctgtattgctgaaatctgaatcaagagttttcctctcttgcaatagccttttcataccaccctttgtaatgaaacatatggctcacatcacagtaaaatatgtagagtaggaagaagaaaaagcatgtttcacatacgtgtcatatctgatgtaatgccatatgtacaacaaccatagaggactgagacttaactgcagtcctggaataattagagtgagagtgtccttaatttattttaaatactgcaaatggtttcacattttgaagtaattaacactcccttcacttataatatttgcatttcattattaagaaacaatccctcaataatttttaatgaactcttgaaactgatatttaaaaagcattaattttctgaaaataaattatcaagagaatagttcagtcttgtcttgaatttaccatatttagtaagctaatgagagagaatttttaaaaaggaaatacattttgtggctttttatgaagtgtgtatgactagctgtctttgtgctcatggtctcattttgatgtgggacatttttatttgatataagagaggggtaacttatgatcattctcttctagaaaacgaaaaacttttctcaaaaatagcaaaattccaaaagaagattgtgaccttttttttttttgttttagggaacatcactttctcttaggtgtgctatttctttcctgtttttcaaaacaaaaatgacatttgtagcaatgcattatagtgttatgttatactatatatgttatatataatgtatatatgttatattaatacataattattgcctttatttttttgagaccaagtctcactctgtcacccaggctggagtgcagtggcgtgatcttggctactgcaacctcctcctcctggatataagtggttctcatgcctcagcctcccaagtagctaggattacaggcatgagccaccatacccagctaatttttgtatatttttattagagatggggtttcgttatattggctaggctggtctcgaactcctggtttcaggcgatccatccaactcggcctcccaaagtgctgggattacaggcatgagccactatccctggcctaccattatttatgactggagtcttatagtctgctctactgtctcaagctaacaaatgagaacagagagaaagagtgttttctttttgagatcttcagtagcttgaaaccatctttggcagagcatccaaaaagcttgatttttcagtggctactcctgctggaatctgggtttatatctgagccaggatcctgagcctacctgaatgctcaggttggttattaactacagagactcattggatagcctgaagaatggcctgggcatttcagtgtcacgctggaaggaggctccatcccatgctgggagatgagtaggcgatgcatgttccagttaccctctttcccaaggcattctgtgctttttctcaccgctgggaggcaagcttttgggggaagctgtgtactggctcacttatctatatagctatatctctgagtatcataaaaatttctccctgccataaagagagacgtttttcctatgggttaactggaacagaggaggtggagaaagtgcttttagtttcaagggtcagaagttaggagaaaacccataaatatttcttttcctgagcactcatcatgctgcagcaggccattaattttaaaagaggttttctattgaaggagcccgttcatctggtgacatgataggttagtttgtattgctttctctcctccgtgccagagagaagtgttagaaaaacaaattatttattttattatatgaaaatgcttgaaattgaattaaattaagaaaataataaaagatttattctcattatttattattatttgatttgtaaatctgtattctatcaacatagctgacttctgcatgctttaaatatttccatgaaggtgatatatgcagttttattgatatagtcctaacaataagggtgcttcttttatactgtcagtaggaaacaaaaccaaacaaattcccaaaagtcaatctcgttttgatgttcaaacttgatctctcttgcctccatgaaattagttatgatacagttctattgaatgcagaggaaaaattattgagaattatactaatatatttaatttagtggggaatgttttcctagaaagacagaacctttgtatatatatacacacacacatcccctaaactgctatagtatggacattaaaaaggttagacttagtcttcagtctcaatctccctactcacttttcccaccagtaggtatattttaatgtacctaaattgggcatctgagtttatttgaccctctgtgattcatgtgttaataatggtgccttagggaccttggtttatagctcaccagagaagctagggataagagactgtatccacatgtaggccactttgcaaatatatttaaaactaaaactgtaatctcatcttccttcttccactactgtggcagaatttagtgacctttaaaatgattttcttctgaggattcatctctttcccattttctttaatagaccctacatcttttcatttctcgtccttgaccatggttattattaacagtattattagatgtctataaaattatccatgtagatgagctttacagttagcgattagttatacgttcttaggattgtaactccttaggagacacatttgatgtattttagttctttctactaacctttgcagctccgctttctgtgctgcaaccctgggttttaaaatctcatgaaaaagcatctatcctccaattctaatttagcttgcttgctctctccatccatggtcattataaacagtaaccatattgtgtggtatgtcactttaggaaaaaaagcacacaaagaaatgttataattgtgaaaaagacagaagtctttcagttttgttagttataatatatgttatcactttatcaaattattctttatttaaccaccttttttcttctgctagagtgtcctagtctctttttatagctaccatgttaaaacttctattttctgtccccaccttacttgataattgcctttttgccttattaggatgcaaggacaaccacatttgcctctatttgtaaaatgtttttggcttatcttttagatcatttatatttaggcaaataaatgaaatcagcttctgtctttttaaatttttctacctgtagcttcatcccacagtcatctgctgacacatgagatgtaaaaagcttggtgtccttcttgccccaaattataaaccttttagtgaaaaaagggactaaagattaaatgattcattcatgaaatcatatattttaaaaatgttattcctattatgcagtaggcactagaaatagaagtggaactactcacatcttcactaatcccaaaattatttcagcaaggaaccatagtacaatttcctacctcaatttactttctactttacttgtacgagataaaaccttttgtttttttcttgtgggaagccagatctcctagaataatcactagaaaggccattgcattcttcagacccacagaaacatcaaagggagatatacattcccattaagaatcaaagtgatagctctgctagccagactaggcacctccataaaacatgcatacatccccccaccgccacacacacacacacacacacacacacacagacagagagagggagcaagggagagagaaaatgcacactgagttctccatttccacattttgtaatgctgacattcaaaaaaattttgaggaaatagaaaatgagtaggtggggatattaatagctcagcaatgaaataacatacctgttatttttaactagaatagtgaattcataacaaagaattgtttaaaatagagattagcagcaaaagtaagtgaaataagaaaccaaacaaaactccaaacatgaatattgatctcacttatttttatctgtttagatactataataaggaaaaaagctgatgattgaaataaaattatttgtgtgtgtgtgtatctgtgtgtatttaaaattctgactaagcttcttcctttaaaaaggtgttaggctggccaggcgcggtggaggccgaagtgggtggatcacctgaggtcaggagtttgagaacagcctggccaatgtggtaaaacccggtctctaccaaaaacacaagaattagctgggcgttgtggcgcacgcctgtaatcccagctaccttagattccagctacaagcaccactgagtcccacatctgaggagattacaataatcttctcctgattagtagggagaagggacacagacaaactttgtcatggaatctttcaacaaacagtgtctggataggtcctgtcagttagaggatagtaaatcgaagcatacaaacaaacacgagtccaggaaataatgtttcagcacaagggaaagaatgcttgtctggagacctcggaagaagagaagaaccacttttctcaataggatttattataggaccaggagagaatttcaagtgaatgttttacttcctcagcagaaaggaagaagatatagtcttgatgaaagagcagaaagtcatgagcagcaggatggagtgaaaagaaaacatagtgaaatgagtaggaaaagaagattgatgaggacaaaaaaaaaaaaaaaagaaatgtaacaggaacaaaagatgccaacagcagattaaaatactgggagctagaacagagtaagattgacagtgtaaaaaatttgaaaaattattatgtaaagtcagtgtattgtcaggtctcacaggattcagaagaccagacaataccttgataaagatgagagagatgaaaacaagagagagcagagaacagaagctttaaaatattagttgcctcctccaagacacaatagagatcaaaattacaattaaataacattaggccgggcatggtggctcacacctgtaatctgagcactttgggaagccaaggcaggaagatcacttgaggccaggagttcaacatcagcctgatcaacatagtagaaccctatctctatgaaaataaaaaagttaaaccttatctctacaaaaaataaaaaagtaaggtggtacgtgtctgtcatcctagctacttgggaggcagaggcaggaggatcgcttgacctcaggagattgaggctgcagtgagccttgatcgtgtcactgtactccagcctgggtgacagagtgagatgctctctttctaaaaaaaaaaaaacccaaaaccaaagaacacctttgtgagcttaaaaaaatgaccctgttaggccaggtgcggtggctcacgcctgcaatcccagcactttgggaggctgaggcaggtggatcacgaggtcaggagatcgagaccatcctggctaacagggtgaaaccccgtctctattaaaaatacaaaaaattagccaagcgtggtggcacacgcctgtcatcgcgccattgcactctagcctgggtgacagagcgagactccatctcaaaaaaaaaaaaaaggttattttctaatatctcgttctttcctcctctcaaacaagaaatgtttgtcttgttgtagcatattgcgtagaattttaaatgagctccataaatattgacaattaagtcagaaattctttttaaaaaaacattttgtaaactgtaaagtatgagttcttagtcttttcttgcttctttgttacttctgtgtgacagcccaaaatttatgagcctttcattctagcatttctctaggctgttttatttttattctggaatgtggtgaggctttggatctataggtctgtaaactcatagctttttattttttaaaacaaaatgatatcaaatatcataccctaatttgtatataacataaggtatcagcttttcccatcctgaactcacagagttcagccctgatgccttaagggatctattgtatgtaatgagttaacttctttcctatgcatctagagtggtactacatttgtaccatctcaggagaattgaggagtcactcaaattatattctgtagggcatgattatcttgtggaaccgcagttgagaaaggctgactacattttgttttgtttttaatgataatggacagaagcttgtttcctcaaaatccttcctgcatctctgattttaatgtgcttttgtggctcactgattttgatgaggtaggctggaggcagccattatttcatttcacacagatggaagttgaagcacggagatgtcaggaattgtctccagagccttcttgaaataagataatgagaaagtggagaatgtaacacccattcagcccaaccaccagtctgcttctgtgagatccagatttcaaattataaaatgaatgtcatgtgttttatatagatagagatcccaaggaaatcagaaatgtctcatgccatacaggtcaaaattgggattatattttgatggcaaaggtttaatttgaataagttttttggaatgcagtatcatgagttgttattatctagttcaccaatatccacatgacagctcattgctatcagtatagttctaatctttttcctttaagacattcaatgtttttatgtatatatatatatgtatgtatatatatatgtatatatgtatgtatatatatatatatatatatgcagaatttatatatatgcagaattctaactccaactctatcactacttttcctgttgatagtttgagatttattgttccctgggatactcagccggtgttgaaggtctcccacaaattggctttactcacatcttaattccttcttacacccaaactgtatggtatatggtatttgtaaaatagccgatttattagtttctgataatgttttgaacatatcaacatctaaatcttatgctgattattgatacgctttttactcaaaattctacatattctcattcaaaccatgtatttgggtcttaacacatattatcgtgcttttctaattgttcacattccctatattttcagataagcaaatttattagaggcattgtccttgtttgacctttttttgtttgtctaacatgtattagcatgatctgagaaacagagagttgacaataaatatttattcatagattattattattttgagatggagtctcactctgttgcccacgctggagtgcactggcacgatcttggcttgttgcaacctctgcctcccaggttcaagtgagtctcctgcctcagcctcccgagtagctgggattacaggtgtccatcaccataccccgctaattttttgtatttttagtagagacagggtttcaccacgttggccaaggtggtcttgaactcctaacctcaagtgatctgcccacctcggcctcccaaggtgctgggattacatgcttgagccacagcgcctggcctggtttatagattctttggagccatatttcaactctttggctttatcactaaacaatttctttctaactacttaaatttttttttaattattttttccctattaatatttaaagaaagaaaatacatgcttctgaaaataggttattattttggggatttttacctcctttcacttgcctgtataagtaccttggaaattcctaagcatggactaggcttggtgattggaccttaattccctaacaacgttagaactccggagctttataaaacccactctcaaatagcccagtattgtttcctacaaaaagtaaacactgtagccaactgatacagctttaacatggataccacagtctcctttgatctgtgagttagaagaaattgcagatggatttgctgtattgttttttatgcatcttgcaaaataagattattccatgcatgttacatatatgtactttcacacaaatcttgcatgtttaacaatatttaaaaaaaatctttgtctttgtggaacttcagtctcccgggggtggggacaatgacaacaaaacctagcaaatctattatataatattaacatgttgagggtaacaaatgctataaaacagagcaaccagggaaactagaggcagagaaggggagtgatttggccaaggcatataagaaagtcagtgctgaagttggtctagaatctggttctttgactgtctcggttcctttgtttgcactacactgattctcttggccccaggggccttccctctacccatttggattctttcttcaagtttcattatcttttcctctaccagtatgaactaaaagtctgagatcatattttcctcttctacacacatactaatgtttatcattcagaccatttatttgggtcttaacacatattatcatgctttactaatattacatattgctgtattttcagataagcaaatttattagaggctagttactgaaatcagtctttagagtctcagtgctttgggctggtcatttactgttctcccttctgtatatgtttccaagacaatttgagttcaattctactttgtgtgtaactttgacttttattattcttagtgatcaatttagtttcttcaaaatgattagaaggtaactaagacaaactatgcattaataagctgtttctagaaaagctatattttctcagcagaaattttaaattttgattgctgtaaacaagtatttgattttatgaatatgccacaatttatttattcactctagtttggatgaatatgtaagttatttctaatttgtgctgctgttttttttttttttttgagacagagtttcactcttgttgcccaggctggagtgcagtggtgtgtcttgggctcactgcaacctctgcctgccaggttcaagtgattctcctgcctcagcctcctgagtagctgggattacaggcatgcaccgccatgctcggctaattttgtatttttagtagagacagggtttcaccatgttggccaggctggcctcgaactcctgacctcatgtgatccgtccacctcggcctcccaaagtgctgggattacaggcgtgagccaccgcacctggcctgtttgttttttttgttttttttttttttaataataacatctaagttattgttgagtataacctaatgaaactgctggttgatgtggtaggtatatgtttagcaaaacagtttttcaaaggagtttttaccagttggcactctaaccagcagtatatgagttttaatttgcactgcaaccttcccaacatgtactggtgtcgagtttctgattttaattattctggtgagtgtggagtggtttctcattttgatagtaatttgcatttctttaatggctaacattgttcagtcctttttcatatgttcagtgaccatctgggttatctcttttgtgaattgcctgtttaaggcttttatctccaccccatttccccaaaaggatagagaatacaatagaaatggatagcttcagggctgttgtggacatatttcttgcaaatatctttttccactctgtagattgccctttcttgataatatctttggatgaacagacattttaaattttaattaattgaaatttatcaatctttattgtcattaccttattttcaaaacatgctttgagaaaggctacaaagatattcttttgtgccattgtctataagatgtattatttatctttcacatctaggtctctaatatgttattttgtatatggtgtgaggtagagggtcagtgtatgtttttcttcatgcagatacccatttaacccatcaccactgattgaaaagattctttttccattgcaatacagggacatagctgtgtataaatcatctgagagtacatatgggtgggtctgtttctagacttctttttctgttccactattttgcttgtccttgagctaacacttcaccatcttaatttctgtggctttataataagtcttggtaactggtagtataaattctttaccatttgtttttctataagattgtcttggctattcttgtgtttttgcattttcttataaattataaaattagtttttctatttcacaagaatagtatgctgaagtttatattgggattacagtgaattcatagataaacttgggaaagattgacatcgttataagaatgagtcttttttttgagatggagtctcgctctgtcacccaggctggagtgcagtggtgcgatctcagctcactgcaccctctgcctcccgatttcaagtgattctcctgcttcagcctcctgactagctgggattacaggcatgtgccaccatgccaggctaatttttgtatttttagtagagaccgggtttctccacgttggcttggctggtcttgaactcctgacctcaggtgatccaacctcctcagcctcctaaagtgctgggattacaggcgtgagccaccatgcctggcctacaataatgagtcttttaagctgtgaacatactataatcatccatttatttaagtcttctttaatttattgatcatgctatctaattttctgcatagaaatcttgtgaacttttgttacatttttagtgttttatatttttgatgctgctataaatagcacatttaagaaatacctaattattctgaatacagttggtttcttatattgatcttgtatttagcagccttgcaaaattcatttatttatttcaatagttatcatgtctcctcactttttcacacattctagtaactagtcaagttgactagctcctgtttaaggagaggcacatacaacatgctgttagaaaccggccagaggagcacagacagattgttcaaaatatcattcctttaagaagcttgagtgaaaacttttctgcttttaaagtatcaaccctacttgaattgtgggatttatcccccggcagaacctgcttaaggaaaatagcatctaaaattatgctaactactacctgtcagtgtacttggtgaaatcagttgacatctcagatacatacgtcacttccattatatcaccagaaaggaacatcatgcttcatggttttagccagtggttaaggacattttaggacaattttgctgtccctgagctatgtggcagaaaatatttataatcggaaaaaggggccaagaggcacaaataagttctgatattctaaatcacagaataacgtaccttactttaaagatctgaaagctagtgattttattagttggttgctgccagaagaccaaattaatttagatgtaaccgtaagaagccaagttacctacctgagtatttaaagtagggtaaatgtactgaagaaaacatacacttatttatctttgttttatagtgcatgaggaaaatattaaacacttttgtattgtcagcttttgatgtataccaaaccatccctaaacttagtagcttaacccagtacccacttaattatctcaattctctggatcagcagtttgagctgggctcaacttggtggttctgctgttggtggcccagcttagatgatcatgattggacttactcttgagtctgcaaccagctgtcaggtcttctggggaatgattggtctacagtgggtcagttagctagttcatctctgctccccatggtctttcatcctccaccaggctagtctgggctcgtttgtgtggtggtggtgttacaggaaaggggtcccgatccagaccccaagagagggttcttgagtctcgcacaagaaagaattgagggcgagtccatagagtaaagtgaaagcaagtttattaagaaaagtaaaggaatgaaagaatggctaactccatagacagagcagccctgagggctgctggttgcccatttttatggttatttcttgatgatatgctaaacaaggagtgggttattcatgcctcccctttttagaccatgtagggtaacttcctgatgttgccatggcatctgtaaactgccatggcactgttgaaagtgtagcagtgaggacgaccagaggtcactctcatggccatcttggttttggtgggttttagcaggcttctttactgcaagctgccttatcagcaagatctttatgacctgtatcttgtgcggacctcctatctcatcctgtgacttagaatgccctaaccgtctgagaatgcagcccagtaggtctcagcctcattttacccagccccttttcaagataaagttgctctggttcacacatctctgacagcggtggcaggggaccccaggtcagcaagtggaagggaccatgcagagcttcttcctgatgtttcttgggtttcttgaggctcagggtcagacgcacacaacgttgcttttgtcccattcttttggccaaggcatgtagaaaggtcaatccaggaagggaatagacttttctacttgagaagcagaataaggtggcattattgtgtgtgtcaggttctacaccctccatataacaaactgtctcgttttataatgcatttttaagacagagggttaaatactggtagtctcaaatctatttaggtaactaataagaaacactgaggagttaaatgacttcatgttggggtgttaaaagccttgcttcaataatggaggaaatcctggagtgaagactaagggatgaaatgtaaaagataactaagactgaaaagctaatttggaaagatagccagcaattgactcacagcaggccttggcttctaaatcctgaaagaaagaatgtttgaattattggaagggccctgttttctaatagcctgaattccagtgtactattgggtattagtatcactgctaacattacagagtttaaaatgttcaaacaaaaaaggctttgatctacaaaacttcagaaacctaaaaatatttttttttcttttcttttttttttttaagtgagtgtagaaagcctttccggaatcacagattgaaaagtgtggccatagagatccgtaatgctgaccgtttctttgtacatgaaagcagattttttccatttgcgtttttcaggaacgcaaatgagaactaatgtcaggtactttactttttaagtaaaaattctaaagtgtgttaaactgctctatggaagagaaatgggagaaaaaaagtcatttgattttgtagggcaggttgctgtgtaggaacagagaagggcagctgaaaacattaaaaagcgacacattatttctgattgttttctgaattgggaagaggagactgccataggatcactgaaaagtgaaactggtgagccttttataaagggtcaaaagacttcacaatagagcttaatggctatgtccaagtaaatggattggaagtctctacagagacttgggaacagggagggcagtcgggggaggttgcatttttttagaccattggcacacagccactggagaagtcatctaaatataaatcagaccgtgtcactccatagcataaagccctccagtgtcttccactgcatttcagatgcaatccagtctctccactgttgcttacaggccctgtgcaacctgggcccactttattttcccagtctgcctggtatcattctctgctgggaatctctgggctccagccacaaccaagctcattcctgcatcccagcctctgccctgggcagtctgtgccttcacatgggaagcttttctgcatttcttcttgtcattcaggttcaggcttacatgccccacccttctctagggtcctttcctgtcaccctattctaaagtctcccctttcttttcccacataccagttatttttctacccctgttaacttgctgaattttctttcgagcacttaccaggtaccttaaaaaaaacttacttggccgggcatggtggctcatgcctgtaatcccagcactttcggtggccaaggtgggtggattacttgaggtcaggagtttgagaccagcctggccaacttggtaaaaccctgtcgctactaaaaatacaaaaattagccgggcgtggtggcccgcgcctgtagtcccagctacttgggaggctgaggcagaagaatcgcttgaacctgggagacagaggttgcagtgagctgagatcctgccaaggcactccagcctcggagatagaatgagactctgtctcaaaaaattacttgtatttttctatctcctagcaccagaatgtatcagtatcagggaacttgcttttttttttttgagacagagtctcatgctgttgcccaggctggagtgcagtggcgcgagcttggctcactgcaacctccgcctctgggttcaagcgattctcctgcctcagcttcccgaggagctgggactacaggcgaccgccaccacagctggctcattttttgtatttttaggagagatggggtttcaccatgttggccaggctggtcttgaactcctgacttcagatcatccaccctccttggcctcccaaagtgttgtgattacaggcgtaagccaccgcacccagccggaccttgctgtcttgtacgtttattataagtctcttgtccctatcaccttgcctggtattcagaaatattcatggaataaaagaatgaaggaattcatttttaaagcacaaacactgtttgtgtgtaaagttattctactttaatgtagatggtttacaatgataacatgaggacattgtctgaaaatcccaaacaacagtgtcttctctatgtgttataatatgtcttgttgacatcagctgtcacatagagattggtggacagactagtaaaatatgtcatttttgtctatggtcacttaaaatataggtttaaaaaaatccaaacttcacctggtcatggtggctcacgcctgtaatcccagcactttgggaggccaaggtgggtggatcgtttgaggccaggagtttgagaccagcctggccaatgtggtgaaaccccgtctctactaaaaacacaaaaattagctgggcatggtggtacctgcctgtaatcccagctgctcagggagatgagacacgagaatgtagaattgcttgaacccggaggcggaaattgctgggagctgagatggtgccactgcactccagcctgggcgacagagcgagactctgtctcaacacaaagaacaaaaacaaaaaatcccaactatatctagggcaatgggcccctaattatttatatggcctaggaaaagaattatagaacttctactttttttttcttatttttaaaatttctaattctgtgtttgaaaatgtatttagttcattagtagcatagtaaatgtatataatatataaatacatattttcacatgtgtgttgaaataagcactaaatttgtgtgatggagtgtatggaccaatctaaagtgcaagttagaaaatgatgaattttctttttttatgatggagttttgctcttattacccaggctggagtgcactggcgcaatcttggcttaccacaacccccgctcctgggttcaagcgattctcacacctcagcctcccgagtagctgggattacaggcatgcgccaccatgcctggctaatcttgtatttttagtagagatgggatttctccatgttggtcaggctggtcttgaactcctgacgtcaggtgatccgtctgccttggctgttcaaaatgttgggattacatgcataagccaccacgcctggccagtgatgaagatttatgcaatgaatagttttgaccctagtgacaattacgggaagaagtaagcgcattttctttttctttttctttttcttttttttttttttttttgcagttgcaggatttaatagagtgaaatagaatgaaaacagagctcccatacaaagggaggggacccaaagggggttgctgttgccggctcgaatgcctgggtttatatcctgatccttgtccctcctgctgtgctctcaggcaatagatgattggctatttctttacctcctgtttttgcctaattagcattttagtgagctctctgattggttgggtgtgagctaagttgcaagccccgtgtttaaaggtggatgcagtcaccttcccagctaggcttagggattcttattccgcctaggaaatccagctagtcctgtctctcagtccccgctctcaacaggaaaacccaagtgctgttggggaggttggctgacaaccgctctaactgcttcctgctgaattggggcatagtagttgttgtgcagttgagatttcctcaggaggggtgccttcaatgtcgttaacatcggagcatgggctagcaggccggtccaggggtccgcggtagatcttagtcatggactgcatctgtggctccatttgaagaaccatatatattacagcttcgattctggaagagacacacttaacaaggaggttaaagatacagggattgaaatgtatggcctgcagtgcaggggattacttctttggcacactttacaggccctgactatctgcttgatagttttgaaaaggcctggtctagtaaataataatttggccatctgatgggtgctatcaatgcctaagtgaaaggtttggtgaagggttttaagtaatttccattggttagctgcaggcaaaagtatttttccttcttcggtggctagccatcctgaggggaggaaactacgtcctcgtgaggtccttcattctatttcttcttctgagtactggggcttggtttcctggaagggattaccccatactaagtgtccttctgtaagcatttctaagggagggtcctgccttgtggctcttttggctttaatatctgcttggcggttcctttttatttccctttccttctttttctggtgacccctgcagtgtaagactgccacctctttaggtttctgtacagccaatagtaatatcctaatggcttcctgatgtttgataggtgtttcctcggaagttaggaattccctttctttccatattgttgtatgggaatggaggactaggtaagcatacttagagcctgtatatatatttatcctttttccttttcctaattctagtgcctgagtgagggctattagtgaagtaagcacattttctaaagtgtggctgttcaatttttttaaacaaggcaatataaatattcatgattaaacctatgatttaaaaatattaaaggaaacataataaaggaaagggtcagtctatattcagtttgtgatggaaacattgttaggtacaccacaaaagatagagaaattcttaaaaagatggcattttaatttggggcttgatcctgcaccagataacaattaggcattccctgcacttctcttccacccatccttgcacatctttgccagccacactcctggcttgcttcctgaacctattcctactcattttagaatgactactcctctactttgaaatataaatatctgggtttcaaaaggcctatgtgagacccatatccaacagataaattttgtttgtttgtttttagagatggggtcttgttatgttgcccaggctggtcttgaactcttgacctcaagtgatcctcctgcctcagcctctgaaagcactgggattacaggcatgaggcatcgtgcctgacccagcagagaagtttgatcgatgtttttattcaacattttcttttcttttagtttaatgggctgttcatttaagataacaattggtttctagaaagtttggtgttgagaaagttactacagctagtttgctagcaggcttttaatgactttaaactccctttttgatatccatattgtgtattttgtttcagtattttatagaagtacaataaaaatgacagtactttaaaaagtctttccagaggtctcaaatatattttctaaaggagtgagtattggaataatatttttttcgctgccactctgatacatcttggtatgggaaatgcatagtgcttttattgctgcaggaaattttcgtactttattatcaaatcactttgtaacgccaacttcttttgaaaaataaccattgtgtatcttcatttcttctttcaatatggccatgttgccctcagcaacttcgtaataaagtgcactcaggctgttgtctctccactgagataaccagactgtataactctgtgaattcagaatctaacccgttcccaccttgtcacaattactcaacatatgtccttgctgacatttaaattttacagagaaaaaaaaaaaatcgattgggcatggtggctcatgcctgtaattccaccaccttgggaggccagtttgggaggattgttttgagtccaggagttcaagaccagtctgggcaacatagcaagaccccttcccaataaaaattgaaaaaccaaatgtggtggcacttgccagtattcccggatactctgggggtagaggcgggaggatagcttgagcccaggatttccaggctgcagtgacctgtgattgtgccactgcactccagcctgggcgacagaacaagaccctatctaaaagagagagagagagagagagagagagagaaactccataaaatagaacttgatggtaatatgcaaaataggtataccttaaggtggtataaacatgtgtctgcatgttattcgttcaattacaaacgtgagaatttagaaaatctattactggttaatcatttttccttccaagcacgtctataaacttttactctaagatacacaggtacataataacaggtaccaagttaaagattgaccctttagaaaatttttgactcataggataaactttcatttgtgaattatttattggtctaggacagtgactgccaaataccttcattcagtgagattctttcatcctgccttcctataccccgcctttaaggttgccttcccctttcgtttatgcccattgtaatattgtctctttgctaattaaaggagggactttttctttatgttgatcactttggaattaatcatgacatcgcctcagctatctatttctgttgcagtaagtcagagatagtaaaagtagatacaccatgctatagaagaaagaaaattggttctaagccctcctctgagactactcacttgtgcattttgaggttattaattccattatgtccttgtacttcatgcattgtctgttaaatgagagggttgcccaaaatgatgttatttttttcttctgatttttatcagtctgtggtttcattgaaggagggagtagatgtgaagagggcactaacagtaaagatgagtgcaatataactgaatgaaatatatgtacagagtgagagaagtgaagagtgtattttggatatatatatggttaatatttgtcctctttacctttctttagattttatgtttctgtttggtttgatagtcatttatttagtttccccacacaacctattttctctactatgtaaattgttaatagtatcttagagagatgtgggaatagtcatgaggacaacgttgggattataatgttctgcctttaaaatttattttttatttcaataggtttttgaggaacagatggtgtttggttatgtgcataagttctctagcggtgatttctgagattttggtgcacccatcgcccaagcagtgtacactgcacccaatgtgtaatcttttatccctcaccctgctgccagcctttcccttgagtccccaaagtccattatatcatttttatgcctttgcatcctcatagcttagctcctccttatgagggagaacatgcaatgtttggttttccattcctgagctacttcacttagaataatagtctccaattccatctgtgttgctgcaaatgccattatttcattcctttttatggcttagtcatattccgtggtataagtatactgcattttctttatccactcgttgattgatgggcatttgggctggttccatatttttgcagttgcaaattgtgctgctgtatacatgcgtgtgcaagtatcttttcggataatgacttcttttcttctaggtagatacttagtagtgggattgctggatcaaatgatagatctactttcagttctttaaggaatcttcacaccgttttccatagcggttttactagtttacattcttgtcaacagtgtagaagtgttcccttttcaccacatctacaccaacatctattttttaaaatattttttcgattatgaccattgttgcaggaccgaggtggtattgcattgtggttttgatttgcatttctctgatcattagtgatcagggagcattttgtgagcgtttttccatatgcttgttggccatttgtatatcttttttgagaattgtctgttcatatccttagcccacttttggatgtgattttttttttcttgctgatttgagtttgagttctttgtagattctggatattagtcctatgtcgatgtatggattttgaagattttctcccactctgtaggttgtctgttaactctgttgatattattattattattattattattattattattgttattttttgctgtgcagaagcttttttagttgaattaagtcctatctatttaatgtttgtttttgttgcatttgctattgggttcttggtcatgaagtctttgcctaagccgatgtctagaagggtttttctgatgttatcttctagaattgttacggttttgggtcatagatataactctttgattcatcttcagtcgatttgtgtataaggtgagagaggtatgaagagaatattctttaattccactttccttagccatttatgacagcctttcaccgttccactattgatctctattgctagcagtgatatgagaaaacagtccttgaaactgagtatttctttcctgagactgttcccttagagaagagctaagctcccatcatgagacatgggaaccatatctattcactgactgacatcagtgcaatgtctgttccatttaacagcttcattcttttaattggtgacaatatttatgctgcctaagcctgtgaactaaacttttaaggcaagccaactttggttctaacttaggacaaaaagggaaatttgggtgtcatccatattcccatgcccagaaattcaaatctgttttgagtttatgtatgaaaacacctaaaattggtgggtttagaaagcaatgtattagattatgtcttaaaagtccccccccccttttttttttaatttggaatttttcctctgtgccaatgagctgttctaggacagggtttcccacctttggcattgctgacattctgaatgggataatttcttgttggggggcaggtagttgttctgtgtgttatagggtatttggcagtatctgtggcctctacccttaggtgccatgggtcacccttcttgcgctgtgacaacaaaaattgtctctaggcattccctgagggagagggcaaagtcacttttacagctggcccagagatttgatcaccctgaggatggagctaccaataaatattacacctgcgaggcgctaaattagttttctttgagctatcataatgaactatttaaaaaacaattaaaaggtccttcactttattcttaaaataatcctaaggaaaagagatcaatgtagattattccctttagagagtggtaaattctcctcaaagtgaatttttaaaattgcttttcatagtaaagaagtaaaatatgtattgccagacttttccgtactatgtattgatagggctaaaacaaataaaatagatacaataataaataaaacctattacccataacatttgaaaagtaaatgtattttacagatattttgcattcattaagaaaacctgttttgatttttaaagatgacaaaatcagttatattgatgtagaaatgatagtttcatatccatgtattcttgaaaaatgccaagacagatcatgtaaaatgttctcattataaaaatgataactatatgaggtaatgcatatgtcaattagctaaatttagtcattcctcaatgtatactatatatacttcaaacatcatgttgtgcataatatatacagttttatatatcaatttaaaataaaacaacaaatcatacattactattaggataagatcctattgtaatgtgtgcagtctgtcatcaaggaaattttaaagcttgactgacatattagtttattggtcataactaatgtcttatagcttgatgtatataggttattaaaagtgaaatatagggaataatatgaaattttggaacaggtgcataatcgcttcatgataaattaggcttatggtgatactcctagcatgaaaatgtcttgtctagacctcttaatcaagggcatattaattacttcttttgattggttgaacagaatatcctaataaattatttaacataaaaaaagaaatgcccggtcaggcgcggtggctcacgcctgtaatcccagcactttgggaggctgagatgggccactcacgacatcaggagtttgacaccagcctggccaatatagtgaaatcctgtctctactaaaaatacaacaattagcttggcatggtgatgtgtgcctgtagtcccagctactcaggaggctgaggcaggagaatcgcttgaacctgggaagtgggggttgggggttgcagtgagccgagatcacaccactgcactccagcttgggcaacagaatgagacttcatctcaaaaaaaaaaaaaaaaaaaaaaaaaaaaaaaaaaagaaatgcctgagattaaaataatagaatccatgttctgtttgagtggaaagtggctggattgcatatctatctacactttgcgagaaagatctgtttctcacttgtacagtgtctttttggatgaaaggaacaaatattagagttccaacggcatgttgaatagacttgtattttaaccgtttcattgccagtttctactggcatcacataaaactagatagaagctatgacatgcagtaataactgaaagaaattttagattctttttctaaagctatccttcttttcaaatcagaattatagttctatttgtaggggaacaatagatacaaagggagatgaggtttttttttcctttctatctgttcatttctcacggcatacctcatttttttcttcccaaaggagaaagaaacaatcaaagttaataatgtcattttgccatccttgaaaataactaatatttatatgtgcttccaatgtaaagccacttgatatcttacagggatgcatcaataataatttggaaagtgaatcataaactatagaaaaagctcagaataatagctattgacttttttttctctgtgtattagagttaggcatataagggatcttttaagtgtctatattgataggaattgttttactcttcgggtattcttaaaattcagttgatttcttcaaagaatcattgtgtgcttatagtcccctggggtcttcatattaagtcatagcctaagccaaaaatgagatgattgaattatcactttgtgtttatatgtaatagctcttaaactacctcttgttgtttttcctaactgattgtcataaaaacatgtttagggcaaaacagaaaaatttggagtttttgatttgatgtgctgattatgtggagtataattttgaggtgttacaagtttcatacaaataatttcttatatttttaggtttgactattttattcagaggtgcttggtttgtggttgtttttcatagttttattaaattcaataaccttgttcaatggccccttttctcagtaatattttccgtaattgacattaaagcttttggtgccctgcatacatttaagaatgtgtttcccgtatccctcgctaatattaatcgaatgtggccattttataaaaactatacaactatacaaattatttcatgaggatgtttagaagtatgcttgtcctttatgtctatagaatgtggcagttctttgctgccagaagtagtgagaaatacaatgaagtatgaaacgccatctttaacataatttttcctttaatattaaaggaacattcgttaacactatttctacttggatattttccagttatatactcaaccacttattgatcttccctttgcattcttgatcagatgagattgggcgtgttcagggtagtttggtcatagactgatcttccctttacattctatgaaataatttaaaaaaaatgaaatcttttatttggcaggatgagggacatgggtgggttagtgtattagtctgctttcacactgttgataaagacatacctgagacactgggaagaaaaaaaggtttaatggacttacagttccacatggctggggacgcctcacaatcatggtggagggtgaaagtcacatctcacatggcagcagacaagagaaaagagcttgtgcccggaaactcccccttacgtaatcatcagatctcatgagacttattcactatcatgggaacagcacaggaaagccctgcccctataattcagttatctcccactgggtccctcccataacacatgagaattcaagatgagatttgggtggggacacagtcaaaccatatcagttagtgagtgatccaaagcttaaatgggtatcctcacataacacagtgaatctttagtgtctggttattgggaagccaaggactacgagaactcagaattctcacctcattgtttcagtctacacctccaaaaaacactgactttctgttcagtgctgtaaacctgtagttgtagtctgtgctgtccaatagggtagccactagccacatgtggctgtgtaaatttaaactgaactttaataagataaaaactttacttcctcagtcgcactagctacgtttaaagtggtcaattattagtcaatgcagataaaaaaacatttctatcctgaagaaagttatatctgtcagtactggaagattcttgttttataccacgttaaaatatttagatggctcccttctcttggaaaatccacaagtcagtgaaatgttgaaagtttgcttttgggttctcttctcttttcatgtacttgtgttgtagctggacactgagggcctagggaattcctggggtgccccctgaagcctctgtcaggtttgctgtaggctccaggcccctcccctccttcaggcttcagccagagcagccctgcttttgtctgttttacaaattggagagtcctagcagcacatcgtttgtacaaatggatccttctcttaaataattagaagccacattcagctgatttacagaggcctggtttgggaggtagataaaaagaagtaatttggggacatactccttcccataccatcccccaacttaatgcatatcttttatgcatgtatgttcaggttaaatatcattatgatattgcttctgagatgtctagacttgagaggatgggtttgttatgatagaaaaatgaaaaatgttcagagataaacaatgatacctagttttaagtgacagcagtagtttttgtttttgtttttttaatgcttaattctttccttttctgttcccgttttcagagtaatgatttggttctctaactttctcctagagtaaccagtgaaatttttaaaattatgaactcatagattataatgtgatttgttgtagttctttgcagttattattctttttgtcactcagatttccctacatttagctgataggcacctcatcatcttggattttttttttttaatatagcctagtagttccgacaacttccttgcttctggtatggcaagatgttgactaattttctacatttcccatacaaagcctataatctgccattttctaagggactctaggccctagtttgtctttttttaaagaaaattttaatacagtatttagacacaaataacagtatagaaagctgaaaaaatagtacaaatccttcaacattcatattggtttgaatatgaatatacttattacagaaaagtgttacaatggtaagttgaagaaaaagagttggataggtgtcactttatgtgatcgcttgaaaccgtgatttgttaaggcttttaggcaagtgcgctctttgttgttccatttcaaattatattacatgcatcgtattgccctctgaactgttagtttctccaaccacccatgtacagatatacagaagctgatatacaattcagttaattggaattcagcaaaattattgtttcataagatctttgtggtatgagaaataagaaaccggggagttataaattttttgaaattgtattttagattcatatacatggttgagttctatctgcatgtccctgctgatgaaagacagagagccgggtgcagtggctcacatctataatcccagcacgttgggaggccgaggcgagcggatcacaaggtcaggagttcaagatcagcctgaccaatatggtgaagccctgcctctactaaaaatagaaaaattagccaggcgtggtggcgcacacctgtaatcccagccactcaggaggctgaggcaggagaatcgcttgaactgaggaggcggaggtagcagagagctgagattgtgccactgcactccagcctgcttgacagagagtgagactctgtctcaagaaagaaggagcagaacatataaaaatcaaagggttggcttctgctgaggctattggacaaatgctggataatgtgtgatggaagtaaggtaaaacgtggtacttttaatatcactgaacctccttgctctttttttttttcagagtacttagcaagccttactatagattaatggaaactccttataatattcttttatcctgtttatttttggtttaattattttcttaagaatccatttccaatttttgtacctaaatttaaattccaccttactgataggcagctagcatttcccttttggcaatgttgctgtgtaataaacaagataaggaatggagattagctggaatgaacatttagaatacgtttcatcttcacacctctgacctcctttgggcacaacccatttaaggataaatatgtatgtttatacctgcattcgtttctagagtgctagatcctatcactgttgctagtccaggagtaacatttgaaggttcatttgaaaaaatttggtcttcttatgcacttcagctgagtaggaggaaaagccaaatcacttcttccctgagtgagcattcataggtctccatctctgtgatcacacggagtcattatgtagcagttggctctgatacgcttgcacagacacaaattgagtccgacaggactgatgtctcctggactttgctgtcatttgaaatgctggcatgaggatgggagcagtgaaagcgggaggaggggaatggggaggggagagctgattcctttagcacttttccaatgaacttttgagatttttaacatctgatagctgtgaactgcttgataagttgattttcagaggcgattgataacaatagctgatttggaacagctggccagcttctggattcaagaagttttccactgtaccacttgcttcttcatgccaacccactgtttaaaaaaaaaaaaaggagactatctaatagaatggtagagtgattcctctcctttttagttttatctttcctgcattcaaaccgcttatgaatactaataaaaaaggtaatatctttaaaacaatttttgttctcatgcttaagctgagtttcagaaatgacatactatggtatctgcattataattctttttaaagtacaagttattttagtggattaggttattgctggatatctctagtatttcctgtcaaaaattttgtatatgtttcaaatatttcagttttaaaaattaaaggtatgcagtttcattttgcaaatgaatactgatagtcattttcagatattttctgcagtaatagaggatgcagtaggatgtgatctactctctttatttttaaatttttcattaagagtgtactctgcataagaggctgtgctagatttattgagggttctataggtacaattatttaacacgtgaagaattatacttcaaatgattgcttggagccagtcattgcctcccttcctaattcccaccagtaccaccattactcttaagtcctgtgtcacttctcacctgaaactcttgctgtggcctaatagcattctctaaatcatccctgatccagttgtcagttaatctttccaaagcctggttccatggttcctctgctctaaaacattaaatggctctttttgtagtttgctgaataaaggccatttgacttagatcgccatccaaggctctctgtgacctatttttttttaaagtctgaatcttcttttttttttttttttttgagacgaagtctcacttgtcacccagactggagtgcagtggcaggaccttggctcaccaaaacctctgtctcctgggttcaagtgattctcctgcctcagcgtcccgagtagctgggattacaggtatgcaccaccacgcctggctaatttttttgtgtttttagtagagacggagtttcaccatgttggccaggctggtcttgaactcctggcctcaagtgatcctcctgcctcggcttccgaaagtggtggaattacaggcgtaagccactgcgcctgactctgaaccattttcttttgcttcatcttctggttttcctaatagaagatggtttcccatgacttcaaccagaaggttctcaaagtgtggtctctggactggcagcatcagcatcacccaggaacatgtagaaatgcaaatttatgcaaatatgtgacccagtcctgtaatcctagcactttggtaggccaagagtggtggctcatccctgtaatcctagcactttgggaggctgaggcaggcagatcacttgatgccaggagtttgagaccagcttggttaacatggtgaaaccttgcctctactaaaagtacaaaaattacccaggcatggtggtgggcacctgtaatctcagctacttgggtggctgagacaggagaaccacttgaacctgggaagcagcgtttgcagtgagccgtgattgtaccactgcactacagcctgggtgacagagtgagactgtctcaaaaaaaaaaacagaaaaaaaaaaacaaaaaaaaaccaaattattgaattattggatccccaccacagacctactgacccacgaactctgatggtagtactcacgcatctgttctaagaaggcttccagggggccccgtgcatgctgacctttgggaggccctattccaaccaaaccaggaaactcaggttttccaaagttcctttcccactgccctgcctttgcatagaattcctggaatgccttttcgtcatcttgttaaaatcctggttaaacttcaaggcctagtttgagacactatttccatgatgtcagtcttgatcctatcttttatagcattatctggttttccttcctggcgctaatcacttattaaattgtactaatcatctggtgtacctgctttattttccctactaatctggaaacaaaaataatagaacctgactcatctttctgccttgagacaccttgtgctgtcactcttgatgccttgcacacagtaggtgctctaaaaatagtttgtggctttttgattttacagagaagactgaggaaattaaacccttgcccaggaggcatataaaaatcctgttaaatgaaagaggctcatgctaactattgttttgacttattgatgccaaactagacttgaacattgatgtgtcttcagggaagaagccaaatatgctagtgtaaaaaattctaacctctgctatttacctggagaagttgaattagccctgtcatttcaactgatgccaaaaaagcagcttccattattgtgtcagtaatagacttttatcctgcatggaggaacttctcttaaatctttctcatagcactggtgtgcttctttgcactgatgtatttacgtaatgtttcataagaagtgacagttccttttttaggtctttgcccaaaaggtggcataagcaaagaatgaaagtcaaggtggttggctttaggagagcctaaaattgggaatgcgagagctcccacgtaacacaaacccggatagtctaagactcctacattttacaaaccaagttatttccttcctaatacaaacaaagtatgacagttacaatttattgtgtatttacaatggattgtgtctgtcatggtgattgtgatggaaccaggggggaaagagtaagaaatctaagcacttttgtgttttcttccttttcttttctcttcctccccgctttcaggctctgaaagtgttccagctgaaatttcagatcggacagactcgctgcggctccggaggcagtgattccaagctgctcgcgcacgctgctgccaagctgcaggatggtgcacgtagccaggctgctgctgctgctcctcactttcttcctccgcacggatgctgagagtaagccattctccccttctctagggggctgtgaccataatgagtggttttgtttgcagttggcaccaggctcagggcctctgaatacatttcctttggaagtaaatcctgagacactgcgggatcctccttggctaccagccagcctttgaaagagattattgacgtgacttcctcaccatttcctctccgttttaatgccccttttcttgtgcatctaactgctcctcctgtttatttatttttttatacctcttatcagcctggtagcaaagatattatgagaccaaggatataactcaaactgaggttaaccagttggtggtgccaataagtaaacattgttcagacccactcaaaatttctttatttttgtggatcattccgtgtttagaaaaatgcacaatgtcacaatgagcctaattaaacttccaagccccttgtagctgtcatagcagctgttctaatgtactgtttccgacagctgtcgtcgagtacagtattgaaacaaatcaagcagaactgacaactttgtggctggatgaagggtctggaagtatgaggagaattctgtggactagagacaccaaagcttggattactggactcaatttatgaaactgctattgtggtccattaacttgacaattaatgagaagatcacatcttcctaattaggaaatcattaggtctaccttgtttacctgcatttattttcccatctgtcctgtggctttttggaagagatagtattggagaaaggcatgtctcggccttgtactccctgacatgtgtggttccttggtagtggtttagttcatacatgagttagccattttctttgggaatcacctagtatgagtaaaatgtgtgacatctgcagtcattaacatttctctccactatttcagtgagattaaatttgactcatgttaaggatgtttccaagacaagtatcctgtgtcatcttggcccctttctattaattgcattttgacaggaattccctcacgagccaccaattgcttcatggaaataggagctctattttctaaagaggtattttgagaagtgaaaggaataacattaataagaagatacatatgtaatatgcatgttttaagcacaacattctctggttaataatgtatatagtttcctaattagcacttgggagtgtcaacttaaggtgaagccaaggaatttcgagtctaatgccagcaaataattaactgggaaaagacccaaatgttagatgttcttgttattttaaagccatttatgtcaaagcttattttaaaggtgtaatctaaatttagtttattaaagagaaattgagactatggttttattatttttgtttggctagagtgcaaaagtaagttgtttcaccattgttaatttttggcaaaagcccatttagaccctgggagcccagtttaatgtcagatcacagctagagtttttcttaaagttactagatataattattgtacgtccatgaagttatatttccagataactaaaaatgttcttctactgaggagtgatgcctttgcttaattctctggtgaaaagtggcagacagatgtggagtttagaaaggaagacttttaaaattgtgtttgaaaaaacaatcttttctgcagataaccgtcatcttactggttttctcctccatcttcctctcgttcttcttcatcacacttcttatgctgtgtagtcttacaaaagaaatcacaaaggcccttgttagcaatttttagttaagatatttatcatgctgtatgttttgtgataccagctttcaaccttaagatgtcccttgaaaaagaatctactccctctcactcctcccattatagctaaaaagaggaagcaggcttcaacttggccaaatcaattttgattagctttgtccttgtctaatcagcctccatgtagtatattttccttttcacagattcatttggcactcttgaatagcatgtgtattctgaaagttattgacgaaagaggaaaatttaaccatatcttttaaggtacattttaaaagaagaagggacatccatttgcaatctaccagaagatacctgtggtttgtgaaagcacatggtagagtcggagatatcattttagtcactaaaaatgtttaaaaacaattggtaaaataggatccagattataacttatcaaatactgtcattaccttttcttcaaacactgaaataaaaataaagttataagtaacactacagaaaaatttgatttattcactatcatatataaagataatatttttcaggcttttattgcctgggtcactgatttgttttcttatgccttcattagcacatctagccttctttgttttcccttttacctaactgtgtttcgtattgatccaaaggatcaagagttattaatagtagcttgtcagagtcattttagaactctgaaataattttttcaaatgtttgtcctcctttgaaaaagaagaccatatggggatgggaatggaaagaaaccactctagtttgccatgttaatttaatgtgtccaactcactctcttttgaaatgattaactccaaaaagcctgagagtcagggttataatctgctgtatagaatgtcatagcaaagtactgggtgtgatgttgcattaaggaggagggctcttataagccttggttcaaacctaggttggaaaattgtgataatatccctcagcagaaaattatagtctttgccattgccagtttaaaatgccttgtatatccactattatttgaaaaagctagacgtgtgtttgtatctgatttctgttcattccggtgtcttgaatggcccagatgattttgcttgttgtttcttgaatgcatgtctggacagtagagctgtgatctcagggaagggcatatgcgacttctgttcgagcagcatgagtaagctcttcttcagggctggccaaccagttttgtggtttaggtagtgctccgagaaccattcggctgtaagatgcatgcagattaaagattcatatagattatagtaatgtaatcctcaggtgaatgtttttcttctggatgagttttcataatagcttctgttagttgtatttcatacataaatttcgtttgctatttaccagtctttaaaaaagaaaaactaaatgcagaccaagaacctactgttagcatcttctttgtcagaccagtttcactctaacgaaatcacttgtagcatactgttacattctagacctgagtttacactgtggtcattataattaaacctgaatgtttacctgatctcagaaatagaacattttttttaaattgtagagacacactcttcataatttaattcctcagatggtttagttcatccatttacttgttgctttttgtcatttttccacttcagattgtgaatacttcttcattctccttccttattgttaaagagccttgctgtagtcactatatactcgcaatatttctttctttttttttctttttttgagacagagtctcgctcagtcgcctaggctggagtgcagtggcgcgatctcggctcagtgcaagctccgcctcctgggttcacgccattctcctgtctcagcctccggagtagctgggactacaggtgcccgccacctcgcccggctaattttctgtatatttagtagagacggggtttcactgtgttagccaggatggtcttgatctcctcacctcgtgatccacccatcttggcctcccaaagtgctgggattacaggcgtgagccaccacgcccggcctatactcacaatatttctgtcttttatggaagcagtgagtccctcctcaaacccctttggtattatatcactgtagaccatggagtttctttatttctttgacattagagcatagactgacatctgtgttgtaagataatcatttgctatcttaagtatttcctgatgggcagcatagagtagtggttaagaatgtgagctctgaagccatagtctggttttgaagtctggctgtgatttggtaaatcatgcttttagcctcagtttcccatatctttgtcattttgatcaatcttgctctttgcttcagttttcctatttttaaaatgtggatgacggtgatggtcatgatataatactcctgggttttgcgaggatttgctgaattaaaagaaaactcatagattagcagataacacaaggtaggtgtttcgtgaatgttagctgttattatatcattattcaacaagatttagcaaacagttttattgagcacgtgtgaagcactgtgctaatttttttttttaatttgacctagaggttatcaaaatttgggtggtggataagccaggttttcttgtagcaagttaaagtctccagcttgcttctctgcaaagtcctatatgtaggagttcttataaacccttgcttccgggcattaaattgaagatcaagaggggaaatatgaagcatatctactttagtctaaagtggttaaaaaaaggcttcttagaattacacatttaaaattaatttggcttgggtagaatggatagtagaaggcgtttcctctgtttgtacggttgcctcttacatacattttattgagcagctcacaggaaggaactatagaaatttactgtaggtaaacacagtaatacagtgcctcttcagaaagctgaaggtagggggtgagcttggtgagaaagagagtgagtggccattgatatgaccaggaattatcttgcaggaaaaaaatacattttttagtttttttgagacagtctcactctgttgcccaggctggagtgcagtggtgtgatcttggctcactgcaacctccacctctggggttccagcaatcctcttgcctcagcctcccgagtagctgggattacaggcccctgccaccatgcccggctaatttttgtgtttttaataaatacggggtttcaccatgttggccaggctggtctcgaacttcgaacctcaaatcatccacttgcctcagcctcctaaagtgctggtattacaggtgtgagccgccgtgccagccaaaaacatttttttaaaggaataggaaaatgatgatgttgaaagcagggcaaatgattgcatcttgcagaaattggcgagatcttcccaaaaaagttaggaaaggaaaggataactttcttatattattaaaatgcatacatttcagtaggcagagtcagtttacaccagaaacatatcttattaaaaagattttggtttttgccatgtgtggtggctcacgcctgtaattccagcacattgggagactgaggcaggaggatcatttgaggacaggagttcaagatcagcctggacaacatagcaagacctcatctgcacaaaaattcttagaaagtaaaataaaaatgtctttttgtttttgttttagattatgagtgttatctctatcatttaagtatcctttaaaagataaattgcttgggatgatgaaaatgttcttttttttcgagatggagttttgctcttgttacccaggctggggtgcaatggcacgatcttggctcatcgcaacctccgcctcctcggttcaagcgattctcctgcgtcagcctctctagtagctgggattacaggcgtgtgccaccacacctggctaatttttttgtgtttttagtagagacagggtttctccatattggtcaggctggtctcgaactcccgacctcaggtgatccgcccgccgtggcctcccaaattgctgggattacaggcatgagccactgcgcctggcctcaaaaatgttcttaagttagattagagtgttggtactgagtataaacataatatactaaataccattgaattgtatactttaaatgggagaactttatggtatttgaattatatctcactaaagctgttaaaacaaggaaaaaaaacagccagttgtggtggcacatatctgtagtcctagctacttgggaggttgaagagggaggattgcttgagcccagtttaaggccatagtgacctaggatgacatcactgcactgcagccgtgtgacagagagagactctgtctcaaaacaaacaaacaaacaaacaaacaaacaaaaaacacctaaaccaaaacaaaaagcaatttctgcttaccctagttctttggttagagtccctttagtatatgcaatctgaaagtaacctgtatgtttacatgataaacacgtagccatgtttatcagccttcattgtttctcttttctctaaattagtagaggtgtggcaaaattactccctcttccttcctcccctcactttaaagtagctaaattagcagcatccagctgtctgaagcaaggaaagtattccagctattttactgatcctttagcctcattgtggagtttctgtggctttttgaattaattgctcccagcagagctgtagctacctagtaagattaagactctgtcacaaaatcaacacgtgtacatttcaaagcattttttattgagtatagtaggacttgcttttttaaacaattccaaagtgtgacctgtttgttatctctatttgggaataggccctaaactctaaggatggaacaattatcaacagtatttgtgaactaattcttattatttgtaatagtctggtggtatttgattctactgttgtgtgatctcctggttttattcccttaacattcttaacttctttaattttcctctcattctgtttctatgtacctgatctacttctttttcttttccctttcttttttgagacagggtctggctctgctgcccaggctggagtagtgcagtggcacagtctccgctcactgcaacctccacttcctgggctcaagtcatcctctcacctcagcctccctagtagctggaactacaggcacgcgccaccatgcttagctaatcttttttttttttttttcttgagatggagtctcactctgtcaccgaggctggagtgcagtggcaccatgttggctcactgcaaactccatctcctgggttcaagcaattctcctgccttagcctcccaagtagctgggattacaggtgcccaccaccacacctggctgtcatatatatatatatatatatatatatatatatatatatatatatatatatatatatatatattttttttttttttttttttagtagagaccgagtttctccatgttggccaggctggtctcgaactcctgacttcaggggatccacctgcctcagcctcccaaagtgctggaattataggcgttagccaccacacccggccttcttggctaatttttatatttttttgtagagatggttttaccatcttgcccaggctggtctcgaactcctgagctcaagtgatctgccagccttggcttcccaaagtgctgggattatagtcgtgagccaccacacccagctgtacctgacccatttcaagtaaccttgacttggttgggagccccatcccctcctgcctacgtagatgtgtttcttgttaattcagaaactccaagccagcctctatcatgaagtgaagaattaaagagaaaggtcctgtgattggatggagataccattttagaaccaattctttaacctaaaatttagtatattcttttttcttcagtttgctttagcttcacttatttcttcactaaactgtgtgtgtgtgtgtgtgtgtgtgtgtgtgtgtgtgtgtctgtctgtctgtctgtctgctatgtggaaagctctgtgtgaagtggtgggaatataaaaattttaaacagtgtgggcctacaccagcctgtaatctatcttcagaattcatagctagtgtttaggatgctctcaagcaatcttctcagactttgtctctcggcagtaagtaatgcataaagaatgtggaccctggagcagagtgcttgtgttcaagtcctgcttctgctgtataattactctgaccacagacagggtacaaatctctatgtgtctctcatctgtaaaatgaagataaatatagcacacacttgatacagttatcacaaggactaaggaaataactgtttgtaaagcattttgaataataggattaaatattcactaaatgttgttagttgctattatgcctttttttctcattagtttgtgtcatttccaaattagaagcatctttgtttagatctctgttggcatatattatcccattaacttcacaatttgagcagaatctttttaaaatgtaaatatgtatatttatatacatttatgatttcaagggacattgactgattggctcattcatgtctttcacagtcccattaataaatgtttattggacacatttcccgtgccaagcattgagttaactactgaggataaaatgtggattaaaagcaatatgatccctgcccctaaaaagcttaaactctagtggcatagccaaatatttaacattaatttttaaaatttacattttctaacagtaacaagcattaaagggaagaaaataagcagccaagtggctcatctgttctgaaaagtaatccacagctttcctgagggagtgatttattttttctattttgaaataattttacacttaaaagacattacaacaatcatacaggaattttccatgtagctttcattcagttttcctaatattaatatattacataatgacagtacattatcaaaaccaggaagttaacatttgcacagtactgttaactaaactacatgtgttatttagattttaccagtttttacatgcacttatttttagctattattattatttattttggacacagggtctcactctgttatccaggctggagtgcagtgacgcgatctcggctcactgcaccttctgcctcctgggctcgggtgatcctcccacttcagcatcactagtagctgggattactggcacgtgccgtcacgtccggctaatttttgtattttttttttttagagatggggtttcctcatgttgcccaggctggtctcagaatcctgggctcaagctctccacccaccttggcctcccgacgtgctgagattacagacatgataaaaataaatgagcctggctaagtggtggagactgggtaagacaaggctccataaaccttgttcaaaatcttggtttttattctatgaactgcaggaatcactgacttatttttaagctgctataggaagacatttacaactttaaaagagcaatgaggcagcatggtggaaaaattctttggagggaggccagccagagtggccttgagatctgttaagaggctagttggaagttacggagtagatgtggtacaagggaccagggtgatagaggtttaaggaggctagactgcttgacacttaaacattttttaaaattgacctttgtgaagaagcattattctaaaactgaaccaccaacagattgttaaaatttagagtgaaggagaaaaccatgttaagaagggacctaaagtgtattcagtaccttataagtaatcctttgtttttaacatggcatttaaaaaattccccccaaatttatctttactcagtcttgtaatttcactttttaatcatgaagttcagatagttttatctaaacttatctttttgttaatatctgttaaaaatgtggaatccagaatcagtttaaaacaatgaagttcagtgccttactacaaaagacattacaatttagctttgttctctcataaaagttttaaattcactgtacaatttgcaataggttttcaaaaatcaacatagtactgtggcagttatttacagtaactacagttattaaatgtggctttaagatacactaagtacttaaatcgtcagtttaaaaaatagcacacaatctattccttttaagctaaaaatacggaaagtataacaaatctactaaaccaagtatgttttcttagtttttttgtgtgtaaagataaatatatagagaaacatatacttaaacctttttaagatgcttataaaggagtgagagaaaaataaaatgccattgtttgtcactaaaagtcatttaaacctttaatctacagtgattttaggttgatagaaactcctctaatatctatacttatcttttaaaacaaatttcagtaacatttcatttaaaagtaataatacttttcattcagcgcatgactacagtgtgcctccaataagccagatccagattcctgttaccacagactttatattctagttgggatgttgtggagaaaggagcagtgcagcaagacatggctatgggcaacaagtcactgaacggcgtgactttggagagtgataaatgctgcaaagatcgtaaaacagcatgatgtaatatgagagtaagagaggatatgaagggagaggataggtcttggtttggtttgtcatatgtcaaggaaggtgttactgagtgagatacaacacttgagccgaagaatgggaagggtccagctatgaaaaaatggagttcagagcatccaggcagatgggggaatgagtgtaaagaccttagtgcaaggagggagcctagtgtgttcaaaggacaaaataaggtccaggagacacatcatggggccctggaggtcgtataaagggttcggattgctgggctaggtataggagagtatgtagggaaacacatatattattgggacatctatttattaaacttgaattaggtactactgttctctactaggacaaaatgtgtatatatttttccacaaatagtgcattgaaggtttgatacaacctcctgatcaagttataaactcactgtctaaacagcttaactgaaattttctttgcaccagccgatatagacttgcaacaccaaagactttggtaaataaaagcacaaatgtctgcttttagctcgttatctctggtcagttttatttttcttttaaagcagatgatagttttacattggaaacatgcaattaagtctacactttccttcatcaatatccatagctgcagatagtgaaggacggtacatttgtaaagtaaggctgttattggagggtgatggtcaacatagaattgcagggaagaaaggaacttcaatagggcttttccctatatgcttccattttgtcaaaattacagcaataggattcctaagtgatttgttgaagtccctatatagattaaagctttttaataaaatatttcctggtaaacttcttccatttaagaaaaaaaaaaaccctttattgtttatatgatttaacatatttggatttattttaagaccaatgggaatgtaaggtaatacataaaatgattattaaaccataacttaaatgttttctctaaaatagtacatggtgttagtaaccagatttgccttaaataatggctcccttgcctaccaggagcaattttctcaattctcctgggaggataattgagaataggtaggagaattctgaccctttggcaatgctcacagctctcacaggctcctgtgaagtttaaatgagatcctgaatgtgaagtcctgtgaggttcagttttcattctgttctttctctctgtacacacacacacacacacacacacacacacacacacacacacagagtaatacttaatgtatggagaaatcagctatttaacatttttgacctattgagatgatttttcttatcaaggaattctactcaggaagcagcttacagtccagttgtgacaacccagtggtctctcaacattgagaactgtcccctgaggggggcaaaatcacccaattgagaaccactgatgttgcttgtgaaagctttggaacagaaggttggagcagaggttaggagagatagataatgcccttctaattaatatggggtttggaagggagaaattttgttagaaatatgatagacctttcacaagctcttgaaatcagctgtgcgaattgggaaagagaaatcgtagttctgtgtaatatctgtaaaaccagaagcagattgccttatcactttatgtctcagtttttgttgtctggagtattagatgataattataggattgctgtaaagacaaaagcaggttaagcaatgtaaggtgtttagtactatgccttgcacatagtaaatgctaaataaacattagccattattataaactattttatggtatattaattttgttaatattttatttttatcaataaaattaattttatcttaattaattaccacagtgattgtgatacctttcacttgaatacttgaataatgatttaaacactttatctttcttttttttttttttttgaaatggagtctcactcagtcgtccagactggagtgcagtggtgtgatctcggctcactgcaacctctgactcctaggttcaagcgattcttgtgcctcagcctctcgagtagctaggattacaggcatgtgccaccatgcctgactaatttttgcattattagtagggatggggtttttgccatgttgggcaggctagtctcgaactcctgacctcagatgatccccctgcctcggcttcccaaagtgttgggataacaggtgtgagccactacgcccagccagtttaaacactttatcttcttaatctcatttgttcctgaatattctaagtgtaggcaacataatttttatcctcctcacttctcagattaaaaaaaaaaaaaaaaatccaagggtcagagtagatgacctgcctagagcaaaaaggtgaataggtgatggggaaggacctaaaacacacactcatgattccctgtccagagaagaggcagaacagctgaaaagagcaggcaagagagctcaaaatgcacagcagccagagggcccaagagatgccagtgggcatcaggtccagagttatccaggttcattgtagttactatgcccctcattgatagtcatcttcaggccctagagtcatggaggaaagttatgtcacagtcacagcttacacactgtgtaagaattgagaagcactgagtggcttttagaatggcttctaatttcaattaaaaaaaaacacatcaatttggaaatttttgatttctgtgtgactagtgtttcactataaaatgatttccattcttttattaggctttcttgttcttatttgtcaatttgattataaattgtcagcagtaaggtctgctttcaagattttgtcattgtgatcatgttgtcactttttactcatcatcatggtgtggtaaattggaaatcatggccaaaatattttacagttcctctcatcaaggtgcagtccgtttccccactccttgaatgtgggttagtcccctgactggctttgatcagtaataggagggtgcagaagtggtagtacaccagctctgggcctggcccttcagcagcctggaagcttctactttcactctctgacatattgagtcatcatagcaagatgctcaactgccctgctgaagggaccccacagagagggagaaatactcagccagcccacacctgttgcagctgtcccaggtgaggagctagatataagagccaagccatcttggcattccagccagagtccagcctcttcttcatgactataagccatatgagtgaccacatgggaggtggagtttaaaatcttctagctgaggcctggagggaagaatcatgtgcaaagaaatctttgccttaagccatttttgaaggggtttttaacacagcaataaatagctgaaacacatggtgattactgttatcaaaatgaagcatctaccagcttgaggaacaatcttagacctgcagtttcctctggaactgtaacacagatggtattctagataacacacttttaaatgcaaggttttttttttttctttttcttttttttagagtaaatgaacacattgatatacattagctaaagccctacttggcgctaacattttaaaagccttatacattttgcatgccttttgaccagaggtcagcaaatgttttctgtaaagagctatatggtaaatattgttggctttgtgggtctctatcacagctattcaactctgccactgtaacaagaaagtagccacagccaatacaaaataaatgggtaaaacagtattccaataaaactttatttaaaaatacgtgcagtgggccagattgttcaagagtcctagtttgatcactcctgcttttgaccttactcacctgcaactcctcatcagacaggagaaagtggagaatatcagcaaaggaccttgtttaacctgatgaagttagttaaagggaagagattagtttgattagcctcctttatcactttgctttgttagtaatgtttattgggagcagattaattagaagaaatatgttcaaggagcacatctcttgataaacatagatgtctaatggcgcttaacctttaaaatgtatgcagaaaaagctttgcatgttattgctcttcatgtcttttgggggtgcttcaggtattcagctgttagtgccatttcaaattgcaaactcctgaaaaatgaataatttatcagctgagggatagttttcattgcacggtgtgcctgacatttggagctatgaacatcttaaaaaagaggaaaaaagtgctggaaagtattacatttgcttggaaagttgtaaggggtctgtgaagaaacagtttgtaatcatgggtctcgaagcctgagattggtttcataaaggcaaataaaagcacaaaagtcatggtgaatttgatcacattatagatgcttctggtgtagatatactctgtaccattttggtgcttataaatcaaaagcaaaataaaactaatgagaaaacaccattgatccagcagcaaacgctcggaaataacactacgctccatcgtgccagcaaactgaaacgcttttgtgggaggtgggaatgagaaggttcagaattggaatccctggctcacgtgggaaaatttaagaacgaactatggtcagcttgtcctggcagtaaataggaggcacacgtttctgcagatgtaggaagggcatacctatattcttgtaaggactgaggttgtttagaattgtatagagaaggcggactaattagattaaacaaaactcttggcttaatatgaaggaaaatgactaatagttaagtctattcaactatggtgtaaactctcaggggaaagagtgagagccccacagcatgactcatttgatgtaagcagcagaaaccactgtggagaactactatttctgaaataatccaaactacatcagaaaaggttataaaaagactatttagcaactgaacaacacatacttctttttcatttcaattgttgtgatttggagtgagagggaaacgaggggtattatgataattataataaaacagttacttgcgttctgagatctagtttctctagagagcttgtagtttaacaaatgaatctgacacccctactgggcagggaataattggcttaaatccctttggtgtatttactcaggccactagattgctttttctagcctgaagaaagctttgacaaattatgatcaccaacattttgctagcccaaaaagtgctttctgattttccagctttacaagcattctccccttctccctttcttacttcacagctttgcctttcaggtctcacctcctcttccaggtccatctttttctgctgtcttcatccactcttatttagtgctcactatgttgcaggcatttgagttacaaggaagatagacccaagtcactgctgtcagactagtggtaaagataattataataaagggaattcagggcaggaggtagatatatgcacaggatgctaccaggagcgggttccttattggaatttacagggaatgttcataggtgtgccggagacagagaaattgtggagggcattaaggcaaagctaatgatcttggaacttgtccggtaaaacggtgattctcaacttgataaaacatcagaatcacttggaatagaatgtagacatgtaggccccacaccaactaatttaataaaaacatgtgaaggtgaggatcaagcatagctaatttaaaaaatgcccctcagtttattctcaagtgaggctgagtattacaaattactagggaacccagtgaaagttttaaactgggaagtgttgtggcctgacttgaattttcaataggtcactggcagctatgtggaggatgcgttggagggtggaagaccagttaggagactgctgtgaagtcaaatagaatgagggtcttgaggatctgaactgtatttttgaatatgggataccaaaggaccctatacaaaacttattcaagaggtggaatttgcaggatgtcatgatgagttgactttataagtgcttgatgagtcatagaagggacagccagagaggatgagacgtaggttggggaggatacactttgtgtatttctcttccatccctgcttctccccccaacacacctaatgcacattgatacggtttttgtgtctctcctagaggtatcatagttttcatatgttacttttagatgtatttgtctaacttttctttctttaattcttttttgagacagtgacacactctgtcacccaggatggggtacaggtgcaacccctgccttctgggctcaaggacatcagcctccccagtagctgggattacaggcacatgccaccatgcctggttaattttttgtattattttgtagacaaggggttttgccacgttgtctaggctggtcttgaactcttgggcttaagctatttgctccccttagcctcccagagtgcccagcctaaaattttcaattctcatacaagtttatttattcatctcagattctgcctcacccccaaccccctacattccaatactgggccttccatacagccagtgaccaggagagtaacattcattattgaggtaggccagttcaactgtttcgaaagtttgtgttgtatctcatgagggaagccaccacccattctcttcttcctatttgggagtgcatgctccggatcctttgattttcctagtgcagcttaaagtctaggtttatatgtgaaccatcccctaggttttacaataatattgaggctaaaggaagtacatctttgggatggatctcgtctgcgactataggctttcaatctctgtgtagggcctctagaaatttgtagaactgaaatgaataaaatttctcaataccagcagtttccagctatttctgtgcttaacaataggaaatgtaagaattggcagcaaacatttgggctgattctgtttgtgtaaagtgaattagagaatggattctattacctagtatcttacactaaaatatgaagcagaaggacacatttgaagtactttaaccacaattacatagatacttctagtgaatgtgaatttgggatgatgaattattcatttaaatcctttggttctccttgtaggttctaacaatgccaggtttacagaccttaggtgtctcctagcccaagggtggggagagaggctccccctctcttctcctggtttcatccatcctctggagtcaagttattaggttattaggttggtgcaaaggtaattgcggttttcgcaattaaatagcttggttgctggagctccttttttctcttagggactgctgtggctacccaatgtgaagccacagacctgttaaggctaaagagcaggtgaacagtagttcagccagtgaattagcatttcaagggccagtgctccaaagggcattgcccaagtgagcagctaagtagaagcaggaatttactcatactgtaatgtctgtgtactatttctgtgaaaatgacttttgaattgtctgaaggctaaacatttggtgctaaactttaaacttatctattttgttgtaattgtctctagaatgtactttgcctgtctcaatattaaagagatcaaatgaaacatgattgctgcttgattattgaggtgacactaattaggaatatcaatttatatttttctctgttaagaggccctgaggaatgactgtggtagatcgttggcctgactgttgcatttttgtaggtccgtatgtgttttataactttagttagaagaaatatggtgtggtgggaagagcattggtttttaaataaaatgatctgagttcaaatcctgtattttgctatttactggataagtggtcttggtcaagtttgttaacctctctgagcatatatattttttaattttatgcagcttctatatattctacacctactgcccgccagcatatcgctggatgctggtggtatgatggcaagatgggaacaggtagggtctgtgcactcctgtagcttccaggctaatcttaggttgctcatctgtgaaatgggtgtgagaacctcatcctgcagttgttatgtgttgtgtgagaattaactgggataatgtgtttgaggtcctggcagcgattagaggctcataattggtcgatgtagctgtaggatttgctttttctgctgagcttagttgatgacaccttctaatttgctaccttaaatttacagcagctatttttttttttcatagatcttttgtgcattcacattttaactcacagatattgttcaggtcttggaagtgtgagctttctctctttcttcttgaatgtcttgtatataggtccttaagcaactcattcatttcagagatattctttttattctaggcttttgagatacaacagtgaccaagacagacaaaaaaaaaaatcttgcaccattaaggtcgcattctagggggctctaaattatgaaattgaacaataaatacaatataataaacaatacaattgataaataggaaagtatattatgtgttcaaaggtgacctaagtattatggtgggagaaagaccagagtaagggaaatcaggagggtgcatgatgggggtgggtaggggttcagatgtgatttaaaattgggtagtcaggtcagtgagaaagtgacatttaagcaaagatttgaaggaggtagggaagttagccatggggaggagtattccaggccaggaaaacagccagtccaaagaccctagggcaggaccttgactagcaggttctaggaatagcaaggggaatgaatggagaaaatgtaaaggattaggagaaaaaccttgtacagagatcctataatggggaggtattctactgcgcaccaagctatctggaggtcaggcttcctggaagcaacaggagtatttaggagtttgctagtgatgttgggatttaagagccaacaggcagaaaaaaaagcttgtgccaaggctcaaaggaatatgactagtgtctgcaaagggcagaataaaggaggccgtgatataaaacaaaacaaaacaaaacaaaaaaaaacccaataagctgttaaaggggaaaggtaaagatgattatatttgtgctttgttaggattactctgattacaatatggaaaataatcattgctcttgatggcactgataactgagacacaaaaattttctcctgaagtgatggatgtccaagaacaagtagattatatagatcatctctttaggtttgtgacccgcttctcatctgatccaccttaggctttaattagggccgttattcattattatggccaatagtaaatttcttgccaggatactctgacttgtagcattctgataggactaactgattcaaagcctgaaattgagtcactgtgtaccaaggtcaggcctcactaattctcaccatggtcctccaagttatgcgtcagtggataaagatttttttttttttccaccggggcgttcctgagtttatttggggcgcacccgggcgagggccctgcacctagaagaaggtgttgggcctcttggtggtgaatcgtggcttgtgctgaaggcgcaggacccggtggggcagcgggaacttgatcttgcagtcgtggaactgcttgacagcctgccggcgtcacttgctggccgcgatctcttccaccatcatgatctgaatggagtgggcccgggcgcggtgccgggcgcccatgtctcggtagcactgggtgacagcgcccgcggtggtcaggtcccggtattcccggtacatgttgtgggtgccgctccgggagtcacagcgcagccagatcccgaagttcttcacccgcagcggggacttctcaaacacctgaccacagtagacagtctcccctgaagacttcttcattttctttaactgagatacgaagtaccagaagcgggacttggcgacgacacgattaggtgcaaagattcgcatgcggtagaggggcggtgtgtggcatttgggagtgggcaggcggcgacccactactttgtactctcttagtgtgcccgaggccttcatggcgtcctctccgcgctcgccgccacccgcaaaagctcagtggataaagattttaagtggacaattggagactcagtttaggagcgaactggataccaaatttcagatcaaatgtttgaccctgaaattctggcactgacagttatgcaggagaagttgtgttttgttatcgttgttgttgtttttaagtctttttaatcctctcagattctgttttataaataaaaagcacacacacatacctagatttctgagatttttattttgagatttgtaacatattaaagaatcaggctgggtgcggtggctcacgcctataatcccagcactttgggaggccgaggcagggggatcacctgaggtcaggagtttgagaccagcctggccaacatggtgaaaccccgtctctactaaaaatacaaaaattagtcaggcgtggtggcgggtgcctgtggccccagctactcgggaggctgagacaggagaatcacttgaacccaggaggcggaggttgcagtgagccaagatcgtgccactgcactccagcctgggcaacaaggagggaaagtccatgccccccaccccccaaaaaagaattgatacgatctttgcatattcaaattttattaacatgaaaagactgaatacagtagaatatgtaggagatcagctgtttgattagataaattatcccctgctggaactacctgtaaaattgctgtattttcagtgcattctgtctctagctttgtaaatgactgttgttctggatcctggaggcagtatctgtccactttcacactttgaagaagcctttacatgctcatcctgcccagcttctttccaaaaagaaaaaaaaaaaaggcacatagtgacgaaaataacaccagtaaaaagtttttacaaaacctttcagattttaagattgtttagtgttgttcattattaaagacacacaattgataaacagtaagctaaatatttgtaataaataatgacttctttttcattcagaacaagaaaatactgttgatacaggctgtctttactcttacaatatccagccaaaagactgtttaccaaaattactaaggacagctccatccctgtctccttcaatatagttatgtgatacatttgtaagacagttatttcatttgtcacactctgcattgcatctccctccctcccctacttcttggtcgatttaaaaaaatttatatagagtaaaatccactctttgtgttgtactgttgtatgagtcttgacagatgcatagttatgtattcattactacaattacatgtagcagttccttcacttcagaatttccctcacactgccgcaatatgtagccttttgggtctggcttctttcactgagcagaatgcatttaagattcatccatgttgttgcataaatcaatagatcattgcttgcgtagcattatatccgtatcacagttttatttattcctttgggttgtttcaaatatttggtgattatgaatgaagctacaataaacatttatgggctgggagaaatacgttttatcagtctctggtgtggtggtttatggactttctaaaaagcaaaaccaacagatacctgggcccacctcccaaccaacctaatcagaatctctgtagatggggtctgggctaatagatttcataaaagctccctacatggtcctgctgggcaatcaggctgagaattattgcttggagacgtgatctttgtatttttggtaaatgagctctcgaagggtttttattattatttttgcttggcaaggtttagtaatttgagtaatataagattatgcttcatattagttgtttttcttaaggacttaatttcatttcaaggagagagttactgtatgctaattaaatcaaggcctttttaaaggtacatttattgaggtttaagtagtcatgatagaaatatatttataatatgccaattatatccctcaagaatattttaataattatatatttgattaaaaggcgtacttgttagctatacagtataattatatgtttgaataaactattactagaactaaatgagcttccttaattaccaagacaattattttatattgctgatgaaatatattattatcttacatatatattggtagtgattcttacagtgttttataatgatatttaacaaccagttaattaattatgttgagttatggcatgaaataacattaaatgttactataaattggacattttggatatctgacattaaaataaagtaagatactttcacatctagcattaattacataagaacacatggagtttaaattaatttcccaaacttagtagaaatgttacttgaaagcaatatattttgataatcaaagtgcttaccaaggtgaatttttatttcagcctaaagtttaaggctagttttattcgtttgatggagatcctgagaataattctgtgaacactaaatgtttgaaggcccttcatatgtaaagttctcagaaataaagtctttttaataagacttatctaaagtatttagattatactaattattatttctgatataaaatcgttaattgttaattctgacataaaaactcatttataattatgaaagggcacatttttgatatcctattactgttattattattgttatttttatttatttattttttgagacaaggtctcactctgtcacccagactggagtgcagtggcacaatcactgctaacctcagcctcgacctgttgggctcaggtgatcctcccacctcagcctcctgagtagctaggagtataggcgcctgccaccattccttgctaatttttgtattttttgtagagacggggttttgccatgttgcccaggctggtctcaaactcatgggctcaagtgacccaccgccttggcttcccagagtgctaggattacaggcataagccaccctgcatggccttattttttaatatcctcttgatttaccttttgaatgttattagctaatgaacatgagctgaatgtacttgaccctgagacctttaagagagccaagtctttcagaaatttgctttcttgcaaagggttgtagctcattaccaggagcatatatggtccactattgccaggaaaaaagcttctaatattagtaacaaagagctaatatttattgggcacttaggatgtgcgtgcaccttgcttcacgcagattatttaataacaatcatgtgttttaagaacccttattagcctagactttaagatagggtaaattgtagtttggaggggttaagtaatttgtccgtagttgttcgctgtttgttcataataaataataagctgtgattcatacctaggttgtctgacttcagagatcacatgcttaattcctgaggcactctctattatcttcatttgcccatctttattgcacttaaagatgccctatttacctttcccttagcacaccaaacatattttataactctagtcacttttttcctctttgattcctgtatttggttatgtagactgactcttccattaggatctaaatgatttcttttttattttaatttttttatattgacagacaacattatatgtatttactgaatataactggatattttaatgtatatgttgtagaatgactaaatttggctaagtagccaatgtgttacctcatgtaattataatttttgttatgagaacactttacatccattctgttagcatttttctttttctttttctttttctttttttttttttttttgagatggagtctcactctgtctcccaggctggagtgcagtgatgtgatcttggctcactgcaagctctgcctcctgggttcatgccattctcctgcctcagcctcccgagtagctgggactacaggtgcctgccaccaggcacagctaattttttgtattttttagtagagacagggtttcactgtgttagccaggatggtctcgatctcctgacctcgtgatccgcccacctcagcctcccaaagtgctggcattacaggtgcgagccactgcgcctggcctctgttagcatttttgaagaatgcagtatcacattttctgtagtcaccatgttgtacagtagatctgttgaacttattcctcttaagtaaaattttgcgtcctttgaccaacatctccccaacccctcccaaccccctacccagcctctgatagccactattccactttctacttctatgaaatcagtttttcagatcccatatatgagtgagatcatggagtatttgtctttttgtgcctggcttacttcacttgccataatggtctccagactcatccatattgttgcaaatgacagcatttcattctttttttaaaggctgagtaggatttcactgtgtacataataggacgttttctttattcactcatccattgatggacacttaggttgcttccacatcttggctaatgtgagtattactgcaataaacaggggaatgtacacatctctttgacatacctatttcatttcctttgaatatatagacctagtagtgggattgctggatcacatggtagctctgtttttttttttttttttttttttttgagacagagtctcgctcttgtcacccaggctggagtgcactggtgcgatctgggctcactgcaacttccgactcccaagttcaagtgattcttctgcctcagtctcctgagtagctgggattacaggtgcccaccaccatgcccagctaattttttttgtatttttttggtagagacggggtttcaccatgttggtcaggctggtctcgaactcctgaccctaggtgatccgcccacctcggcctcccaaagtgctaggattacagatgtgagccactgcacctggcctgtagcttcatttttcatatttaaggaacttccatactgttttctataatggctgtactaatttacatttccaccagtagcgtgtatgggttcccttttctccacatcctcaccaacacctaccttttgttatttgataacaaccactctaacagacatgaggtgatattaaataactttttctatgttctatttgcacattggctgagacatggtatactctcaataactggttggctgaacaaagaacagatataaattttatacacggcatccatttttgttggattgagatttcccctttatttcagaggtgccttagaaggcatttggaaagtgagtcagttttcttgcatggtgcagagctagcttagcctgtgaggtataaaatcttaatgccttttatccatgggcaagtttgaagttcccctaaaagcatagtgcaatactgctggcacatacaaggaaacttgcactatgatcatttttattctgagagagacaatacacaaccagtataggtaagccgagagatgtggtacctgggagatgacagatgtgaacactgtggtatgcattatatggtttcttgcttgaggaaaaggttattgaaaaatatttattgtagacaataatagattatactttagtagtggccatggttaaacccaatagtaggagaccttttctctctgtgaggaacacccaatataattagggaatcagatcattaagccttaaatttcaaagtagatgtaacagatggaaaggaaaaactagaacttagactactcacctccctaactgcctgcttcttgtctgtacttctttcttaggaaatatatgaatttcttagcccatgctaagtaatttaaggaacactttgtcccaagaacaatgtaatcaagaaacactgctactttctgctggatgtttgaaaggggctttttatttttacatggttactctgaagtaactcaaatcacagaagctggctgaccaaaagggcatgttcctgtctttggtccattacttgcttttgagagacataattcaatttaagatctgcatttctgatggagaaatatccattgcccatccaggtaacatcctttcacaaccttctgtcaccaaagaattattcaagtgaccttgtatgtttgcttaaggttgggagtgaccacatccctggcagttccgtaatatacccacatattttattgctgcaacaaagacatagagtatagtccttaaggtcctatactcaaaatagaaagtttggataaagctaattgattgtaggcttgctgttgttcattatcttaattagtctaggtaattaaatcattaattgattggagctgatccctgctaaaggaagtaataaaatagtaaaactcagtgcttttctgtttgatcccataagaactgccatttcagttcttcattcgcctcttcatttgtggtgttttgtgctgtccagcggggacagtggcacgggaggataatgctaacctgtggacattgctgttgcttcagaggcatgctgcagtgaaatcaggaagcaatcccaacctggctgtggttaattaacactggacgccaagctatgcagatgcaatgcattatgaagacaaccctgactcttggcaattagctttcattgtttgttgtgctttgcttgggtacatctctgagactgtgaatttccatcaaaggactctgacatgcattcctgcctggcatatgctcacgcatctctgctcctgagatgagcgcttttttttcttaagctcaagttcagagccttgggataatcgctctgtttcctaaatatatgaagttctttttaaacttcaaagccacagtaggggaaggaaaaaaaagagagaccatgcagacttagatggcttctagtgaattgaattggcaaaaccatgaacacttgtctttagctgctgaaatgtgagatgcttccataaagctatttcaagtctgaaaagttgctttttaaaatgaatctctaatccaataactacaataatattcgagtcagactaaataaaggaaaggtaaagcggtaagaagttgttttaccttgggataaatatcaaacctccctgaaaatcctattatatctaatttcagaagaacttccgtagtaagcttggtttgatcaagatcccttggaaacgaggcagttttctttttttttaattcagtgttctttcttataatgtttctcttgaggagaattgtggaagtaataaaattcataattggcttcttttctcctttgcttggactaagtgagtctggcagttctttgggagaatttgagtcctgtacttttctggtcgacaagatagcagtagtgaagcagcagaattgagttgaaatgaatgcctggcttggaatttacacatatggatacagtgctgactaaatgctccgaatcacagttggccatttttattactattgatagagctttcagagaactctgctcatggaaaaatacacttaacaaatataaatgctaggtgctattaccaaaagaaacacctagggaattgcctttactatatcagcagtagattattattactactgttttaatctagtaagtaataaacatgtgatacataattataaagacattttctaccaagacatgtatgtgcttcctttaaaactattttatgtgaatatgataaattattttttattctcaatttgttatgtgtttaactgctgtctaacttaagaagcagatatatcttttatgtcttctttgctgttgcttcttatgaattttaagagacaaggaaatgttggtttagaaatggaaaatgatgttcccaagtaatcaggaaataattcaaaatccaaaactagtattacttgataccttaacttctgggaatttgtttcttgtatgtgctcctctgcatttgttaaaattatagaatacttttgtttcaaaacaaatttaggtacagaaattagctgggcgtggtagcaggtgcctgtaatcccagctactcgggaggctgaggcaggagaatcacagaatcccagaggcggaggttgcagtgagccaagatggtgccactgcactccagtctgggtgacaagtgagaccatctcaaaaaacaaaacaacagtaacaacaacaaaaatttaggaaagtgatcatactcattaagggaataatacatttttcttgtgagaattacacaaatttgaaaatccttgggtcagggagtggtcaacactgagccctttttttaaacttattgaaaattgcagtaatataaggagaggctcagatagaagtgtgttataacctgttttacatggatatgatgaatttatacagttatgacttgtggacaatagagggagaaaaagattgagagccattgaactttcttttatttctttttatttatttattttttatatttttaaggagtcttgctctatcgcccgggctagagtgcaatggcatgatcttggctcactgcaacctccacctcccgggttcacatgattctcctgcctcagcgtcccaagtagctgggattacaggtgcacacaccaccacacccggctaatttttttttttttgtatttttagtagagatttggccagactggtcttcgactcctgacctcgtgatccgctcgcctcatttctttttaccatctaaattgcattatctctgtgataggctcctcgggtattttacctgtcttaagcttccatattctgtttgtacagtgctttgatagtgtacagacaactttcatacacatcacctcacttaacctttaatgcatcccctgtaagggagacattaagtccattttcaagttcatgatactctacgtaatgagctaggactcaaactcagattttctgattccaggaacagattttctttttaatgaccttaagcctattcctttttttccttcttcccatcctccttcctactctgctttcctccttccctgtaactccttccttcctttcttccgtcattcattcagaaatgcctactgagattatattactgagaggaaaccaattcggctggagtttagggagtgtgtagggagatgcagaggatggagtgggaggggggaaggcagccaaccctgcacaacgttgctggctctggtgtggagtgtgaactttgcctgctctgtaaactcagtgttcatcaagggaagagtggttgatcaggtgagagagaatgctggcccctactcttatggtggctgtggaattggagagaagtggatggatgccagaaatatgtaggcaggttgaataaacaagaggaagtaaattatttcctcatatattgagggtgagtatataaggaaatgtcaaggatgactcccagatttgtgttaagagcacctgttggggtgattgtagtatttattgataagaaacactcggaggagggtagagttgtttggcttgaatggagaatcatgagctcggtttgggacatattgaattttatctgtctgttaaataaccttctggagatgccaaataagcaatttgatacttgaatccagaactcagaaaactgggctggggatattctcttggaagtcgctagcatataaatggtgacagagccacgggattagacaaaatcaacaaaaaagagaataacaatgccgtagggttcaagacccaagctttgggttccccagttaatagaattaatagaggtgaggatgagaagtcgaggggaaacaggagaaaagagaaagaaaaacaatagagttggaggaaaatccagggaaggttgtgtcctagaggccgcatgcatagaggtttggaggaaagctgctctcaaatgctgttgatggatctgaacatgtccattggacttggtaatagcagggacattaatgacatcagggagactgaggtggtggaatggtggaactgaaagggtaaagaggaataatttttaagggagaagtggaacagagaattctgaatctgggaatattcatttaactcagacaattcaaagcagaatattttttatgtaatatcataagtactcatttaacaaaaaaagagcactttaaacttctaggcttctagactttatcatatttcttcactttcctgctgatctcctcaaagaatagtctattaccatcctgcatatttggtctggagaggaagtctaaatagatttccagattcactattggtataatccccaagtactttttcataatttggtatctgaccagctcttctgctgatttgatggaacccttttatggtgaactgcttaaaattctttatgtaattggaaattgtctttatgaataatacaaacttctccagtcaatccagttgattcagtagtgctaactctccccaaaatgtcctccttcctcttgtttttaggctgaactaaattgtatatcttatggccgggcgcagtggctcacgcctgtaatcccagcactttgggaggccgaggcgggcgaatcacaagatcaggagtttgagactggcctggccaacatggtgaaaccccgtctttactaaaaatacaaaaaattcgctgggcgtagtggcgggcgcctgtaatcccagctactggggaggctgaggcaggagaatcgcttgaacacgggaggttgcagtgagccgagatcgtgccactgcactccagctggggcgacatagcaagactctgtctaaaagaaacccaaaaaattgcacctcttatattgtggcttttcttaaagacccagggagaacctcttgtgcagctctcctttacagatgtctatcaaaaaactcccaactgtccttgttggctttatttttatctcttcaaaactggagctttctgaagacagggatactgtttctttattctcatgaactcacgtagtaggtaatcagtaaatgtttgttgaatgaatccatgaacctcaactatgctgatccaactgagaagcaagaagtataaaaaaaagaccacagaagataaggcacaccaaataagcacagtactttatttcaagtaaaagcccagaaacctcactcagagcattttttttttttttactttacacactaaaatgcttatttatctggcagccattctgtcctatataaacgtagaccaactgctgacccactgataaattccagaaaaatccaagcaaccgtctgacagggaaattaaaagctatgaaagtagatgagaacaaaagctacaaaaagtaggagagcaaactaaagtgacacaaagtaattgagagtcctcacgttaaaaaaaataaagtggtctgccaaggccttctatcagatctaaagccaaatgtataaatgaatttacttaaacagtataaataaaccctgatttatcaggaaatgatcattctgttgttcaaaaaagcagaacgacatttaatacattgagaaaagaataaagattacaataaagtatgaaaataggtatagtttagagaaacaaaccctcacttttatatggaatactctatttttaatggtggcagtaactgagatagtattgtggtaaacacatcagagtattcagggagattaaaataatttggggctgggaatgcattgcataagaattgggcatccaagggtgacaaaggaagagcagtatgtagcaaatggcacaaaatctttgggaaattattattattattatttgagacggagtttcacgcttgttgcccaggctggagtgcaatggcgcgatctcagctcactgcaacctccgcctcccaggttccagtgattctcctgcctcagcctcccaagtagctttggattagaggcatgtgccaccacgcccggctaattttatttttttttggtagagacggggtttctccatgttggtcaggctggtttcgagctcccgacctcaagtgatccgctcacctcggcctcccaaagtgctgggattacaggcgtgagccgctgagcccggctgggaaattattatgcattaacatagagaaatttactttctgtcattataatacttgagttgaaatattaaatgtactcttttacctttccatggttggatactttgtttctccccagagcaatggaaaagattcttattttttttccccctgaattatggcactaaaataaaaatttaactttcttttttttgagatggagtcttgctttgtcgtccaggctggagtacagtggcatgatcttggctcactgtaacctccacctcccgggttcaagtgattctcctgcctcagcgtcctgagtagctgggattacaggcacgcatcaccacacctggctaatttttgtatttttaatagagacggggattcaccatgttggtcgggctggtctcgaactcctgaccttgtgatctgcctgcctcggcctcccaaagtgctgggattacaggaaaaattttactttcatgaaaaaattcccaaactttatgcttcctctttttaatttaaattgttggtgagcaatggtatttaaaggacaagacaccttgaatgaatattactagtgttttagcaactcaaacattggctaaagggtatttgaaagttgtatgtctgcattaatgcaacttcagatttgtgtgtgtgtggatttgttcactgcttagtgatggtaaagtcaagagttttctttaattactctccatgaaaagatttttttctcttttgtgtgcttctggattcaattgcctgtttttacaaatgaatgaaaacattgactgtgactgaggttctgtaatacaacgtattatttttctcactccttagaaataataaaagcacatcataatacatctttgctattaacagctgacctccagtgtgctgtggaaccacgtaattgaataacactttttgtagagggtgatattcaatagtagaaatgaatttaagtacatcatgatgataaagcagttgtttgacaattgtgaaagttctgaaatggaaaagctgttttgattcctttatgctgactactcttcttagtggaattcgagggttttactacagttcagtaaataataatttagatgcatttttactgatggcagcatagtttcttaaatgaaagtaattttgtagtatgatgatcaaattatatagtttccattaagatttacagcagcagaatgtcacatgcattgattaaaaagggagtgaaatttggaaaatacaaactatttgaaatggcccatgggataataaggaatttaaaaaaccattgattactggcagttgtaccactgttcagaaattgctgattttgtattgtatgtcccatattttaagaatgccgccatcataaatgttggaattgggttctcagcattactgatatttgaaaatacacagagaaaaaaatggttaaatcaatcagggcctacaaaatggccatgtttagtttttgcccttatcacaatgggaaactcttgctaggctttctgcagattttaatgtaaaatgctacctaattgtgcaaaatattaccatggagtatgaatgtgttctttttttttttttcttttgggcgttgcactggcctttcttttcaataaagattctactgaagcaatgtgatggataccatttcagaaaagaattaattttttacaacttgtttatttagtacattaagcattcatattggtatatgaaattatattcatgaaagttactggcccaaccaagtagaatcacaaatcagaaacacttggttttaatttcaacatgttttcataaaattattttcaaacttgtccaatggagtcagtttactttgttttcctttgttaaataaatgtattctaaatgagtcattatagagggatttaattctagttgttaagggatatgggggaaaaatgtcctcaaatgcttatcatgaaaaataccatgtatttacattatttcaggaattaatcttttttacttttaatgatatgaggtgtattgacagagtttctttgtctgcctcatctttctgtggggatatgttgaaaggccctgcaagaaaccagaaacttgatttaataacttgccagagcaactgtttagcatctgtcctcaaggcaaagagttgaactgatagatttcataaagaaaatgaggaatcattatacacttcatcggaatttcatcacttgttagaaatttactcaaaggatcataaattctgtatttttcattattcaggaattctgaaaaaagagtgtgcattttgtgataacaaaaattctggtagggtatgagaaatccatccttaaagaagaaaagaattcacaacttcaaatggatgctgttttctcatgaaggatttgcccagtggctggagagtgcttctaatattattatataatataatattatgggtgtagatgccagttttgagatgatgtttatcagcactcctgttcttgaacagtgagaaggtatttattgggcatgttaagaacagtaaaaatcaggaaaaacaaaggataggattgctatgcgttatccccaaccaaacagattggtaacaagctatctagtttcctgcgaaaaggcgatttctgtattatgccggagtatttctgtatgctctccctggagacagttttcaggcagtttcaccatgaggcggcaggtgtagaatcccctcaggatgcattttgaacctgtggtcatacagccttcctgagtttaaagataaaacgtatcctttgttgttttgtaggaaactaaataggccttgataaagtacagatgtagataaaactttcaacagaaaatgactgaagaatttttaaatccagctatttgttaataaatgtacaccacctttacatttgtaacatgaatcataggagatacacttgctacatttccgcagttaacagtaatcctttctcaagaacatttaaaactatgcctacagccaccgttttttacactatcactaactgtcgtcttcgctgtccttgattcttgattttcaccagcattttcaaaaatggatagtcttaaaagctacagcagttagagacagtgtaagtaaagcactgaataaacatctatcacacagtaggtattcagtgcataagtatgcattcagtatgctagtactctgcattttacaatatctacatcatcaactttgatcctcattttttgagtgttgtatttaaaactggttgccttaaatggaaaatgacataaagctttatgtttgtataaaataaagtttcacaaatttatactgaatgcttactgtggacatggtgataatcatagcagagactacagaggactgtgaatgacactttccatgacctcagaagtttagagcctcccatggacacttgtaattaagttgtttctgcactatggcagtggatggaaaattagggatatgttatttaaatgacaacccatatttaccagtgctctggtagaaagttttgataacttcagttgtttattcttcccaccaataatgtcattgcatacaattgtgtgtgctcctccccaaacacacacacacacacacccacgcacccacacatacacacctgtctttaaaaaaatccaggcctgggcgtggtggctcatgcctgtaatcccagcactttgagaggccaaggcaggtggattacttgaggtcaggagttcgagactagcctggccaacatggtgaaaactcatctctactaaaaatacgaaaattagccgggtgtggtggcgggcacctgtaagtccagctactcaggaggctgaggcaggagcattgcttgaacctgggaggtggggattgcagtgagccaagatcacaccactgcactccagcctaggtgacagggcaaaattctgtctcaaaaaaaaaaaaaaaaaaaaaaagtacataaaaataaataaataataaaaaatcccaaatcaacaacaaacttacaatctgaaaattccaccaggaaaagaatgctttaaaatatatttaaagagccccatgatccatctcattgggcctctagatttctctggctattaagctgaggatggtacatgaagggaatgtaaaagcccttttctcccttttcccttccctacgtatagtcagtcctcagaaattagatttattcttttatttccaatcaactacttaattttgaccctagttccatggtcgtgattttctgactcttatgttttgtccaaaagccaaatactagacaacagacttgtgcttatttagtggaagcaaaaataggattcttctaggcagaaactgttactgttgttctcacgcttccgcaagcattttgtaacccatttgattttttaaaagaaagagaaaactaaaatgaagaaaccgttattggaaagttcaaggtatcatctctttcttctgtgcacctctgtgtagctgtgatgtttgtcgacaattctggcaggaatactaagaaagggaacggtttttacagttctcagaaccttctacagcataagcaatttatgtggatttaaaatgtatcaatttaacttggaatgaagtaaaaactccttatcttggcttacaaggccgttggttgacctagcttctgcattcctctctgccgtcatcttatgtcagaccctgttagctcacgacattttaattctcttgacattttcatccattgtcttccctgttcttgtaattctttctccgtctaacctaactcatctttctcccctgccccctcttctgtgatgcctttcctgaccactctaaatggacctctctcctctacttccttctgctaatcaccaagtttatctaattcataacacgtcccatctggattgctcagtgattacttgtccccccaccccaagactggagggactttaactgttttcctccacacatctagaatttaatgtagagtttagtgcaagtaggtgttcaataaacatttgatagttaagtgaataaatcaatgagttaatgggagagagctgaatttcactgaagatgatttactccttcatctgcaagataagggaaagagccttgccacagaaaatctgttggaaagcaagaatggtagaggccagccctcttggtttcccatcccgtgtcctcttctctctgttgtgttgtgttgttaccttgaaaaacataacgtgaaggtggtgtttggtcctcaacccagctgaggtctgctgcctctgaagatgtctctgctgatccagtttctggagcgcctcttgggttgtgcttttactctcttatgtcaggtgtcatactggagtttctgagcaatcaaatagaaatcctatatagggtaaggagtcaataacatttattttgatctagattttggtttggagcaggtggttgggttaaaagtccaacaagataatctgagaatagagagaaagcaaatgattgtgcgtgtaccactctcacatttacttacagtaatttccaacttaagaaaactggatatgctaaaacaaagtgaaagcaaacttcagttgaaggctttcttaagtagggagcatccctaggaaatttaaaatatgatttgatttatcatagatcagtttattaattttctaggagcttctgccttagaattttgtgattctatgaagttcagctatagtagctttgatatatagatgagaaaatagaataaaatgtttatcacttactcaaaaattatatataatcatttatgcaacttacctaccaatgagaatgactccttggaatataaattggtatctgatagtgtctgggcatataaacagactattgacagacattgttgtttgcctgttagacgcttccttcttgcttgcctataacattgacccagattttatctactctcattctatagtaacctgctgtgtatgccagtgggtgggggtgcgggggtggggctggctcctaagtggcaaatcttactggttgaaaaaagtgaagtggtctcagtttcctgctaagtgatgcacttaaacatggccatgtgattcaatcctggtgaatgaaaatttagagcaaatacactggggagtttttgagaagggtttatttactcacaagattggcaccaagacaaagatgtttccttttctgttcttgaatatttcctctgtatgtggtgtttagagctgctgcaggcctgtagggatcatgagaggaaccagtctaaggagacaaaccagcacaatgagaaaggcagaggggacagacggatgggaaaagactgagcgattgagctgctattgagtagctgaataaatcaccctccctcaggttttatgtgacagaatgatgtccttattttttaaaccacttttagtaggatgttctgttatctatagcccaaaatattttgacggatatgtttgttgggtcaagtaaagaattgtttgggactgtagcagtgcttacagttccaagccatggggctccacagtaagaaagagaacaacaaagaaggtacatattttaagatttaagcagctccgaaggctaaacatagaaaaaaaaataggtagtatacagatttgccaacacccatgaataataggtatttattatatgcagcttaaaaagaaattatgaattgaatttgtgaattttgcttcattttctgaatgtgggtaaaaatgtctaagcacaagcaagtaagtttccttggcatatgcagaaaacaagtgtttttaatcctgaataaaatgtattgttgtttgtcatttttatcttctgctggtgagcatgtttagatcctacctaaacatatttttcttatacatttaacttttctatggaaaataccaaatccctgaacatttctatttcagtgggaccgattacaaatcatgttttccatcagacttttattgtagaagtgttgtttgtatgaatgttatcagtatgcatttgttttggggttagaggcttctctaaattggatacctctatggattctgcttccttttgctaaacatgaaaaaaaaaattacaacttttaaaatttctctcccatggctattttctattcatatctcccattccttcttgaggcaaaagaagtaatttatataattcccagaaaattatttatttcattcagatttaaaaatttattagctctgcatttaaatatattctcttatttaaaatacatcccatcactatccattgttaaatcatgttttcacatctaggtaagatattcagagatttacctgattatttacaagaagacttaaacgtacaagcatttgaatattaatgacacagacttttcttttgagatttccaatgcttttgtaaagtaaaaattatctacttttaaattattaaaacatctgcatctttcagtgcttctcaatctagcatttaggaaaatctgagggctattaacaagtctatagagaaaaaagtcaccctacaaaaatacattcaagcaacgcaagttgttctgttggcttgttttgttgtggaagtgttttgtgtgtgtaggtgttgttttctcagctttgctttgcttttactatgggacttctcagagcaatgaacatgcaaatgtatgcaaagcagtttcaggacttgctctgtagaaacagctcacttaccttgattaacacgctacatttcctcgtaaccagagagcgatttctcagacttctgtcacttacatcgaatatggacagttgattgatgtacacccctcgtagaatatgagctcctggaggaagcttaaccaccttattttctaagtactgataaagtgcttgcaaagaataagactttagggaaatgaaaaaacatagtgaatgctaataatttaagcaccttaatgcctatatttggccatgagttgctaggatacagtttctttccatgttttctctgatatcccagtttattttcattggcgtacgtcaacatggagaagaaggatatgtttgtcatgagaggaaagtgaatgatcccgtgtgggagtttctttcaagtccataggagacaagaagatgaggtgttccactactcaactgagtaaggtttcaggaagtagacaggatttacagagctgcttgaaaagtataggtgggagttgtggtggtggactgagagacagtggaaaaaactgtgaaacttaccttcaaccttcaggtgcaaaggacacgagcaagtatccccaaaactcccggcgcataataccacataggcctaacaatcatagagttaccatttacaattttgactgtttttaataacatacctcagagtgtcaggacatgcagtctgtatacattttgctaatctttggagcttggatttgaatcacactggcgttaagcctggtgtgatgaatggaacccaaaactgagtagtgaatttagtttactgccaaacattgatgttttgatttaggtttattctattgtcttgtggattaagttgacagtaactcttgacacatgttaaaaactgtgtttctttttgaaaatttatgaatttgggggttcttaaaagtctggaaaataatcttttgtggaagtatagaagtgaaggtatcaaaaggaggcgtaggtcagtgtgccatatcattacacagcacttaacaattttaaaagtatttcacgttcctgacttacttgattttcatgacagctttttgagacagatagggctaatttcaatatgccattttcttggaaatcaaagtagctttcctatggtagagattgctagtgttcactaatacgttctttattttcaagagcacatcattaaatcaaattctcagctaggaaagatgaggcaatggttaatgggatgtgattggaaatgatgtggaagtgagtggtgccacctctaggctaagctgttttaagaatggaggtggcttctgaagacaggaggtccaatggaagattccaggaagagatgatagaaccactagatggaagaaactgagtctttaagtctacatggagcaaagcctccgtacaattcacattaaattgtgacatgaatgaaacaattaatgttattgtgttcagctactgagatggtagactgtttataacagcagtcagccttctctaatccacctgctggctctttacttagtttattttcattattttttattactaatctatgtaagtgaaaatcttttatttataaattaatgcaaagctgtttgagagtctgaagaaggaaatatgatcaaaaagagaagaaggaattttagagaccatcagagtcggaattttccaaagggagaatagtaaaaatccaggaagtagatgccctcagttctgaacccagtgagtatgcaatagaatgatagaaataggaggtatgaaggaaaaaccaacatgattatgagttgaatggcactatttcaagacttttgttgttgaaatgcaagccagtatatacttggtgtgagatgggactaatatgaaggaataaaataaagttgcataaagttgcttttggtataaagttagtttagattacaggaggatttgatcacatcacattgaaaatgtgaaaggaagtcataaccaacgtattttaagaaagctggcaagtactgaggtaaaaattgtttggcctcttggaatctggttactattttacaacctcaaaggataattcagaatgctgtttgtaccaataagtatattcaggcaaatcaccttcaaatccaatagaattcttatgtaatgaaggtttcaaaagacttgtgaaatttcaagatttatagagattctgaccaaccaggagaggtttgttcattttttttttctcctttgtatgttgctgctactctctttatcccttgttcaaaacagacattactatttgataatagcactcttctatttttttttttttttctctagagaagaacagcctcagaatccttctgaacatggtactgtagacactctcctcagaaattgtttcccttggaggcagcacagtaggatggagaggaagaaaccaatagtggatacgcatatgtttggataaacgacctctttaatcaaaatgtcatttctttttttttctcttctcccttaggtccttctcgaatcaaatgagttagtacatattttagaacagtggccatggggaatattcggggatgtggccacgaggaatagttttgtcaaaagccatttcattatttttttgaactcctttcttctcattcttagtttacaaattgttttccattctgaactcttaggagagaaagataattttttctttcacatgttctcagaggcttacttttgtgaaatttactaatacctcccttgatggaggaaaagacagaaatgccccagtcaaatccatttttccacttaattattaagtctgcttaatattcaagattaaaattgtctgttaaaagggaggtctaggtacttgaatattcaaagtcctttggcatattttgaaaattgaaattaagtaatgtcctgtatatttttaagttgctaaaagagttttcttagttttcactaagagtagatttcactattgtgaaattaatattttttatgtcttttctctacattttttgtttttcattctcccccctctgtcagttacctactatcttctttcttaattttaacatcgttttgggcattttgctccattttatgagaaacatattgtgttctcttgaataaaattagcccctatggataaattactgaccatatgattaaatctaattttttttttttttttgagacggagtcttgctctgtcgcccagactggagtgcagtggtgcaatcttggctcagtgcaagctctccctcctggtggttcatgccgttctcctgcctcagcctcccaagtagctgggactacaggcacccaccaccatgcccggctaattttttatatttttagtagagacagcttttcactgcgttatccaggatggtctccatgtcctgaccttgtgatctgcccgcctcgacctcccaaagtgctgggactgcagacacaagcctccgcacccggccaaatctaaatattttaaagaagaaaattatgtaaagtcatatatgtgaaaaaatatcctacctttgtgactttgttgcagaaggagttagaattgttaggagaggaatttttttaatttttcttttttttttttttttaagatggagtctcgctgtaactcctaggctgaagtgtagtggtacaatcttggcttactgcaacctccccctcctgggcttaagcaattctcctgcctcagcatcctgagtagctgggactacaggcacatgccactgtgcccagctaattttttatttttagtagagatgggagtttcatcatgttggctaggctggtcttgaactcctaacctcagttgatccacaagcctttgccttccaaagtgctgggattacaggcatgaaccactgtgcctggcccaaattttaaatattctatccaaataagtattccctcttcactcaaagtgtagaaaaacagtaatattctaaagaagagatgaaccaaataggatattacatcctgtgtgatatggtttggctgtgtccccacccaaatctcatcttgaattgtactcctataattcccatgtgtgagggagggacccaatgggagataatttgaatcatgggggtggtttccccatactattctcatggtagtgaatacgtattacgagatctgacggtattatcagggattcccacttttgcctcttccttattttcttttaccgccaccatgtaagaagtgcatttcacctcctaccatgattctgaggccttcccagccatgtggaattataagtccagttaaacctctttttcttcccagtcttgggtgtgtcttcatcagcagtgtaaaaacactactacactgtggtgccacagattaacccagtaagtcttcaggtagcaagaaatgaactaattagtacagagggaaaatattcccttctctgtagtcatatactcttactctgattttgttttcatctttctatccacacagtttattttttatttttattttttaataatgatattggtatcaattagaggtggaatcatattgctgtattttaacaagaaagtttttttgtaaggatgattctcagagtcactttagtgattgcccagcctgatttagacatctccatttctcaggaggagtgaaattaaaaacattaatgaatccatcctgcttctaatccataattttgaagagcctcttttttgcccctgtattagtttctcatgccctgatttataaaatttagaacattcttcaaatgcattcatgtgtgttgatggtactaatgatatgaatacaggcatagatgtttagagtgataaagtcataggcctgcaagggactttagagattatttggataaaaccattcgtttttcatggatgagaaaattgagactgaatgtagtttgatgtatattttttggtaaatctcctataacctcatttgactatggatggatagcttggtgttctacaaaaagaatgtatccattgcaagggttattatggcctgtgtgttatgaataagaaacctgaagaatacgtgtttactaaatgtttttcttcttacataactttctttttttataacttattgctatccagataccatcttatatatatttttttctttttttttttttttgagacagagtctcgctctatcgcccaggctggagcgcagtggtgcgatctcggctcactgcaagctctgcctcctgggttcatgccattctcctccctcagcctcctgagtagctgggactacaggcgcccaccaccacgcccggctaattttggtatttttagtagagacggggtttcaccatgttagctaggatagtctcgatctcctgaacttgtgatccgcccgccttggcctcccaaagcgctgggattacaggcgtcagccaccacgcctggctatatttttcctttttgaaccacatctggataactcagtgtattcatcatttgatcttatgtactgaaagaataatgggataagggaaatgagaaggataagaaggaaaaataaaaatacatctgtcccttatgaaaacgatacatttattcagcattgtaaattactgatcactcgccaagtaagtggactaggatgactatttatgcaaataaaaattgttttaagccacataactctcatattgtcattatatagcgaactttttattgtaataaagaataattttgtaggcattcagaatttcaaaaaactgtaaaagtgatataactcaattgtttatttttctgattatttgggacattatacatatagattatcaaagacaaagatttgaaccaaggcctctcaattttaaatcaaataacctcatcatctccaaatgtagacactgatgtacgtaaagttctcagggaatatgagtagtatataaaatgtgaaacttactctgagaaaaggagactagttgagaaaaaaaaaaaaactcttattttacctaaggacctcttattttgtttacttcagaatttaatatttgccttttttccattccacatatttgctttggatagcaatattgtaccccaaaatgtcagttttcttgcttgacattaaaaaattagatcaaggctaacagagcccacacttccatccgaccttggctgtaacttcagtcacagtacacattgttgtttgttgatgttggcaccttaggaggagcatatcaagtgcaagaagcctcacagaccatgtggttcacatcacatacctggaacatacggtttgtgttgtccttaccaaactttatttaaaaggcattcatattggttttcctttgaaaatgccatagttttatttctgaatctgttagaagagttttttcattcctcataaatttctggcagagttttgagagaagccatcacaaattttaacatagaaaaattgggagatcttgaaagaaagcgctttgaaaccaaatgtaggataagcttgtttttttttctgatttctgccatgtattccagagattctcttaaacctgtaaaatctaaggactgaatttgatttagcaaacaatatatgtggaatattttttaggagagtctagtgtttgctgcattcagaatgtatccagcattttcttggctctttggaatggtatgaaaggtctcccaggataattttaattgatttttctttcaatcatgagagtgaaaagcaatgttacacaggctcttctcccccgggggaaataccatatcttacacattagcttcatagagaagttaaagtgttttaaaagtttggtctggttgatctacttttgtttggttctcttacttgagagaatataaaattaaacttctgatagctagctttcaacttttaacccatgccttagagagttagctttaaatgcgtcaaaacttattttggcttcctttttattatgtagtttcagtgactcatggataatattttaccatttcctcattttggtatttggtaaccttctacttggatggtggcttggtagagccaagtttctggacctcttagtcaaaataactctggttccgatcctagctttgccagttgcaactatgtgaacatggacacatttttggcttgtttgaccccccttcacttatttctaaaatggagctattacctactttatgaaattgttgtgacaatgtatattattatatctgaaatgtaggaggtgttcattaacctatttggatcacttctggtgagaattagaacatgtgttaattcttcgtgacatggctctgtgttgtggacctaaacatggagaattttcactctgtgcctacattcacaaatgcaacatgtgggtttgtatatacatatgttgtacatgaactcagattccaagttagctgtgttcaaatctgaattctcccctgcataactttatacttggccaattttgcctccaaattaattggtcactgaatattttaagtttttaatatgaaaacaacatgatgtcttaaaggtggcagtgaagcagacaaactttattttttactaaagatgaaattgagtcatattgtacgctgtgcactgaacttgataaagaagttcaagggttatagatgttttgatagtttctgcttgctttcagaggactgttgactcccttaggagagtcccttagcattcagatgagaacacttgtctttgaacatctccccaagagccagactggacagatgtttctcaaaatgagccgctgaaagcagctgaaactagaatttcaaagaaaactgtccaatctggcttgagtcttttatttttaaagacataataaagaggagcctagtgctcgtttggcattttatttttatttatttatttttaacaaaaagcactgtatgtaaaggtactgctttgggaaagatttcagtcggaaaatgaaaatgtgattagatttggtttattaatatcggcctgtacctcttctgtggctgtgctgttgcttgacattcttgaacacctttgattctgtatatttctctatggtgttagtttggtacactatttattcaagtccactgttcagtcagttttaaaacaggccatttatggtaaaaaatcagcccaaccagttgatggacattatataaaaccaaagtattggctggtttccaactgttcctgatgtgtttgttgccttgatatagttacatcacacccagtctgttttacatgcagcgtttgcccacaggagttcttctgaaactccaacaaaatggaaacattgtggctgtgtatattttaagctctcgtctgttggttttgttcctggaaccttcaaaaatgatttttttttccccaaaattctgacagtatttgtaaagaaagagtattgctccattgggccttgctttgtctctactctcacgccaaatataatgtaccttttttttttttctgctttctacatttatgcacttctttgtagaggcctttttgtttcctttgaaagatggttcctttcatcttttgcctttgttttcattcactgccaaagaaaagctttctcctaaaggctccagaatataaggatgtctttttatgagctctgtccattggaataacaatgtaatgctgttgcccttgaaaaatatcaggacagaagggcatcttgacatccagccccggatgcaaacacagcccatccccagaagagcatctttacaggtgcagaaattcactcaaagcaatttactcggactggggaaagctgatcactgttttttctctctctaggattgtgaagtttgtgaatattgtttgagcacatgcatattaatcatatgcccacagagagcagtaaaatcctttgaatgaaaatattcattgggaagtaaatgaatataattataattcgtagaagcacttttgtcaaagtgcaatctgtaacccttaaaatcaaaacacagcaggcacccttaatattgttctaaataggtgtcttcttgtaaatagtttcctgttaatcaatcttaacatagctccctcattcttttattatttttcaacatatatagaaattactataatttgtgtattagtctgtaaatgataggattcagtgtaggttagttggaaaggaagaaatgagtgaggctagttttactgagcccagtactataactgagaccttagtcacatgatttcctctgcagtgtgaacttgtaggggaaagaaagagggatatcattgaaggaaagaggagtatcatggggtttgcagtcagagggacttgggttccaatcttggttcacttgtcagctgtgtgacattgagcaccttattagcttctcccagcccagtattgctcatttgtaaaatagagatggcttacaaaatcattgtgaggagaagtgatgatatacaaaatatagttcttgggacataatacttgtttttattttgcagagaattgggtttgctggcaatcacattgggagtgtttcagcttctgtatgtgtataatacatgacacaaaacgttggtagcttataaaaagacatctgttactatcacagatttctataggttagtaattcagatagggcgcagcagagatgacttttcgctgctccaccatatcttagctgcaatgagaagactctaaggaggggtgggtagctggagtcttctgaccttacctactcacaagcccactggttgatgttgggacctcttgaacattcgctgctggtacagttaggactcctcagacacctccctttctgtctgtatttggtctcctgatgagttctctctagcatggcagcttcggagtagttggaacccttacgtcttagcccaggactcctggttctggtcggggaagaaaagggaagaaggcagaatgaagactgccagaaggagagtcggcagaagccgtgtctccttgcgacttagctgggaactcacatagcatcacttccagcatactctatggccagtgctgtcacaaccctgtgcccagattcaaatggagggaatagactccccactgctagtggaaggagaccttatggcgtgagatatgtgcatctttggaaaatatgacctgccataggactggcaagaaggacttttaaattttatttcttcctccttttccttgatgacatatagaggaggtgggttctgagagtcaggttggagctgaattggaggcttattaaaaccagcctgaaaaaagtgaactgtttgcaaacaactgatgtcctctgtaatttccttttctctctctctcacttatgtatacacttttttttttttttttgagaaaggagtgtctccatgaaagagagaggcttatccaagttatgaattaacatttttcaaagaagcttaacttttagggtcttatattctccctatgttttcataaattttgctttcaaacctgacagtcaaatcatgaatgcaaagtcagatttgaagagaattccttcagagagacaccacagcacatgcagaaaatacagctttgtgtgtggcactcaaaagtggtatgccttcttaagccagatccaccttttcttccaagcctgctgctctttttttatattcctcttacaaaagttaagatgtggaaaatcatgtggacctattaaggcagtgattaaggtaactgttggagttattgttaaaactcatctctctagaacccaggtttaaaagcctttagacactttttttgggaaacctgcaagtcatagtcttgaatgcttgaaacaaatactgaaaacaaaatagcaacagcagaaactcgcttacaaaaaaataaacaacaactcagaaaggaacagcaaaaacctatgataggcctacattagaagagctaaaatagtgaatatctgttttatacacttaactgagtgggaagaaaacatgtaattagtattactaaatctttgatatttaatgaaaatatactcagacctcccccatttcagcctccttaattttccttaaatgtgatgttctgttcaatgttttaagaaagagctttgtacatcacctgctacactaggataacattttggcttaactgctaacaacaaattgccataggcataaattaagggaaaaaagggtgttaattatttttaaatgttttttataatttcatatagttttctttttaattgcaaaaatgtatatgttgtgtaccacaggggtttttaatttatttcttattgacatagtacatattttgggggtacgtgtgatattggtgtaatttggatatgtatccccccaaacatttatgttttctttgaaaggtgttaattatttaaagcccaagttcaggcttcctccctgggaactcctgttgttagtttttgtttgtcatgctaagaatgggtatatcccggtaggagtcgaagtctcattgaagaggtttaataaataaatttacattcttatttagacttctctcgtgcaaaaacactatttgttgtttacctaatgcataatgcatttttattatgttttgatgagtcacatacattctgcacattgtgtggttagcttgtactgaatgacaaaggtgtctatatcgctattttgctgtctcattgaattttttacgtacatatgttcataaatgtgggctatgaagtgatttttcatatttaagggtttaaaaaaaatccttgcatgttttgtgggaaatgtttgtagaactttttggagatttccattgtcttctcctaccgtagtcggttgttcagcaccttttagagctgaagtaatgtactggtttccaagaatgtaataatgaaaacagtagatattatgtattttaagtggggaagggcaatcactgaattcttattgctgtagttgctttttatattaagtagtttgctagaaacaataatgacagtggagaaatgaatttatattcaaggatgggaattttcaggtcatctttaaaagaatgtttgcagtggggtatctctacaaaagcaacttgtctatatgacgcatgcacatcgttcagggctggcggctttgcaccaccactttcttctgctgctaacctgatcttggttggagaagcttctcctaagcagtctagatacgtgtgtgtatggagatggggaggaggtacagattgagggacaaaagcttttaaagacatggtgcttctctcagtggaaaaagagaaggctgggaataacagaattatctcaagttctagcagcttcttggttaaactgttgcttcaaactagcctgttccaaaatatgtaaaactgtaacccactgcatctatgccctctctttttctttctttttttttcttcgctagctatagttctctcagtttcttatttgcattagtaagcatgttctttaagaaacaaacatgtaaataaaatgtgtttgctttggttatacggactttaccattaactaaaaactgatttctaacatctaaaagagttcatctacactgagtgtctgcgtctatggatgattgatcagggaagctgtggatgtgttggcatgaggcgtgattgggaatgacgtaaccttggtagagggccacaggcagaatgtggaggacacttgagggcactaacaaagtcaggagataggtgaaggaagggagaggaggaataccaaaaagtgactgtttcaaatttttgaacctaggaaatataggaaaatgtgttctttctcctcttccctttcctatcctccattgtgttgctgctgctttcacagcatatcttcttccagggccctgaaactcaaatcagtcccgtgaggccaatcattcgactacatgttggatttgtaagcctgccatgggctagtctgggacattgtttccagtggaaaattagttctgaatgtcaaacaatgtatttgccaacagatgcatatcataatttgttctggtaatggaaagacatagatatagaagtataggcatatttgtatgtatttatgtgtgtatgtgtgtttatgtatttatatagtatctgtattttgctaggtagtataattgtagctgtgtgtgtatatttaatatcatatatagtatatagatgtacgtacattatgtttgtgtgtatatatactcaatgtagagataggtataaatataaaattgctattgaatttactaggttctgaaatgatacaggctttgaatctcatgattgcacatatatggaaaggtgggcagtcacttatgatgtcagaaagagattcaacacgagagaagacacaccagtagctgagtgagaaaacatatcctgggagtggtagccctttattcttggaagagatgtaattaaagctgtaggcaattatgtttcctaaggtgtattttaattagctttcaaggaggaacaggtggtatcattgaaaactgtgggttcttttcaacattggttttccagtgttagcgcttttgcttcttacatacggcttttagataaatttttcttttcaatttcattctttcctttatttctcttgattaattaaatagattttaaatagataatataaattattcaaaatgatatatgtgtaattatgcagtagaaacaaaagaatcatagtatctaatatataaaatatgatttataagaaatgtttcaatattacatttaatctccttgttactgtactggattacattaaggattttaatgagattaatttgctttctggccaattgatcttttctctagtagacatgcagtgtgaaatataagatattggtaattagaattagtacatttgtgcatttgagaaatttttgttaaattgaaagctttgtaaggcacaaatgccatatttgctcaacagtcataagctatccaaagaagtagttgtaatgactagtggaagaagagctcagcaggcaggaacacagagggaatggagaacaaagctttctttggcagtggtctcagtcatggcaaatgtctcttgggagaaaacatcacatcactattcattctttcacctctgaatctcagtatctgttgtaaatatttatattctaaaccacatgtgtttttcctgcaacataattggtgaatcttttaaaagataatttagcaatttgaaagcaacattgcctcaggagttgaaggcgttctatgctgtctgacagtgcatcctgtgtaaaattgtagtttcatagatacccgcaagtggtgaaaggaaacttttgctgacatcattctctgagagagcaaagataatcacagtgaatatgaagtgatgaccatcaaggatcacacatttttctcataactgtgggaaagtttaggaattttgaagcagttttagaaataggaatttggagaacagttatttaaatatctgaatttccagatcagaaatcgtatcaagaggatgtgatttgctgaaattgcatgataatgaacaaactgctttgaagttgtgggatgatgctagatgagaatgcatcattttaggattccagaaattcagtaggaagcgactagtttctgcctctaaagatggaatcctttttataggctgttgaggctaatggttgctattcctgtactaccaccttccatttcttatcggtttccatcccaaccctctatgtacttcgaacagggtcatctgtttaactcagaaattcctgagattgtttttctgatttgcattgtgacatgaactgctctcgatattattggcacagtattattaatgcatatttgcatgaaacattttattctttaccaaagcattttattttaggttgtttaaatcaccctttctactactggaccctacttttaatccagagaataggttccaaaccatgccatcaattttatgttattagactggatataaatgtgttctgtgtttttatgtatctgtggccaaaaatatgtcattttatacataagggagtttgttctatcaaaccattgcaaaacacagtgcctttcagaaacatttatactacaaaggttttggggaattggagttgataattatcctcctcttcgcttttggaatcttatcctatagaaagcaaatatgggccaaaatactgtatttcctttattattgagaagtattgattgttgactttggcaggactgtcttttgccctcgttaaacttgaattctggaatgccctgaaagtgaagggggctgggggagagaagactgaatcaagaagagacaagagagtatagattctctcatctccttagattatgacaaagtttttttaaaacttctattaaaagagcaaaccatgtaacagaaggaacataagtgtgatgtggtagatgttaacttttggaaaaccgtggttttgaaaaggtcaaatagttgacattaacttgactcagaacatttaatctaggactcccggggtcgtaaggacagtgagggtggtgtggagcctcgtgtgaaatgatgtctgaattggatttgaccttgttcactcctccttccctgtgcgctctaacaaggaagcagttttctggatgtttaatgcgttcaaaactttcaaaaatataactccaattttaaattcccatgtaaagttttgcctgtgttttattttcacacttcactgccgggattccaagctgtcacacagagaagctgtcagcagagatagcaggagagagagacacaagcagcctgcaggcctgcacccacaaagagcctcaacaccagcagaggctgagatacaaaaggcaccaagaccccccacagatcaaaataactgctgctgctttccccttcctctgattcatcaatcttagaactaaataaatgtgttgctcgcttcccaagtgagtccccgctgcttgtggtgcctgggtctgttaataatttagggagtactacagattgtcatggggaaatcagacattttgctattaaagtggtacttgatgttccactttatgccttgctggtttctgataataatctggctatcacattttttaaaacttttattttagtttcaggggtacatgtgcagattggttctatatagataaattgtgtgccacgggagtttggtgtacttattatttcatcactcagataatacctgattggtagttgtttgatcctcaccctcctcaccctccaccctcaattaggccctgttgtctcttgtttccttctttgtgtttgtgtgtactcaatgtttagctcccgtttataagtgagaacttgaggtgtttggttttccattcctgcgtgttagttcacttgggataatggcctcccactccatctgtgttactgcaaaggacattatctcattctttttcatagctgggtagtatttcctcatgtatatataccacagtgtatttatcctgtctactgttgatgaacatttaggttgattccgtgtctttgctattgtgaataatgctgtgataaatgtatgtgtgcatgcatccttacggctcccatgttttgattgttgagatttccagtttagaaattattaagtggaacctgaaaatcagttctgtgtttcagatctttaattttttattaaagtgcaacatcctttatggctatcttaggtatgcaagccatttaaaaatgccgtttgattatgtctttgtccattatggctttttataactaaatgaaacgattaatttccttaatattcactttattcgttcatttcattcaggcattcttttttacagacttattttgggtgcctactgtgtgccaagcactccgtttttttaacaacaacaaaatatagatgacaatgggccgggcacggtggctcacgcctgcagtcccagccctttgggaggccaaggcgggtggatcacctgaggtcaggagttcgagaccagcttgaccaaaatggagaaaccctgtctctactaaaaatacaaaaattagctgggcatggtggcgcatgcctgtaatcccagctactcgggaggctgaggcaggagaattgcttgaacccaggaggcagtggtggcggtgagccgagatcgcgccattgcactccagcctgggcaacaagagtgaaactccatcaaaaaacaaacaatcaaaacaaaaaaagaaacccacacaaaaatcaagtggatgtggtggcaggcacctgtaatcccagctactcaggaggctggggcatgagaattgcttgaacctgggcggcggaggttgtagtgagccgagatcacaccactgcaccacagcctggacaacacagcaaaactccatctaaaaaaaaaaaaaaaaaaaaaaatgaaaatgagctaatgtttggctgtgaattttggtgggtgtgatagatgagaaagctactataatggagggtaagctccttaaggtgggcttagggagttgtaagaagggaattcagatgaaggagcatctctcagcctcagagggttctgaaactgcttcatgaagaaggtgatgcttaaaggaggtctagaaagtgagctaggcaaacaaatgcatggagatttacatgccaggcaacagtcttaatatacaaaaaagtattaggagtaatgtcacttattcagggacctggagatagtttgctgtggttattgtataggtttgtatgaaaggcactcactattggtcaaaatgggatagaacgacggggctcaggtcataaatagacttacctgttagattctgagggttggagttgatcccgaaggtcagggaccaggagcacattgcagtatgtcacagagggaagtaatgatgggatatgttctttagaaaacatactctgacttcactatgaagagtgtatcagagtagggatgctactgtaaatatagataagttggaatgcttctaaaattgccctggttgtagaaggcaagagactgaatcagagtggggacggcaggggtggagacaaggtgatggagataagatctgtctaagatgttgaaggcgacgtgagatgatgggtccacaagcttagtaactggaatgttttgatgatgttgaaggaggcacagggcttcatcatgtcttggataggaacttgaggtattgagtgtgatggagggaataggattgccaggcgtgaggtttttttttttttttttttttttttgtgtgtgtgtgtgtgtgtatgtgtgcatatgtgtgtagtgtgtacctggaggtgggggtatgacataaagaaatacaggattacatagatttaggagggggaggagtggggtttttgcgtgagacaatacttacgttgaagctcatctattgattaatgaatctgtaatagtcaacatttattatacagctcactctgcaggatatgtgataaaacctttgtatttccatttcatagcaattccataaaataggtacaaaaatttccacccctcacacttgaggaactagaggcttagagagggcaacatcctcaaagacacataggggagaaaggttgggagccagatttcaaacccgggtggaatcaactgcggatctcaagcatgtaaacattatctcatgaggcttcccatatgtcccaagtgtatgcgacatccacttaatgctatctgcattggtgcttaaaataaagaaggtggatgttgacatgtatttactgaccacaggagagaaaacttaaaaggaaaaaaaaatataccctggttatttcttttgtaatttacaaggcttttaaaattcattggagattaaatgctatttgacagtatctagatttacagtaatgctcagaagtaggaggaccttggctagtttagtgaaggaagcaaaaaaaccccaaacaaacaaaaaacacatacaaaaaacaacccaatttggaaaatagtgaagtataagctcatttggaaatggactgtgaccttgtgaaatgagaagcatttttttcctctctgaatgtaccttaatcataatctagcccaggggagccaaacattttatatgttttaacaagctaagtgattttataaaagtgctgttagaaggatttattttaattggatgttaaaacatactggtcttaaatcacagctagtgccttacttagagctcttccaggttagctttcataagtaaagtagcagaactaattttttagccatcaaataatccttagtattggaattttacttatttttgcttgtattaacttcatgctttttttttttttttttttttttttttgagacagcgtcttgctctgccaccaggctggagtgcagtggcgcgatcccggctcactgcaacctccgcctcctgggttcaagcaattctcctgcctcagtctcctgagtgcctgggactacaggcgtgtgccaccacgcccagctaatttttgtgtttttagtagagacggggtttcaccatgttggccaggatggtctcaagctcttgactttgtgatctgcctgcctcggcctcgcaaagtgccgggattacaggcatgagccaaacttcaggctttttaaatgcttgaattgcacattcaaaataattttggatgcgtatatgtgtgtgtgtgtctatgtgattttttgttattcccatttcatatttatcacatctttattccgtcttagctccagcaatgtgacacagtgaagggaatagttttaccatattgcagtgggtctccacctggtggggaagttgtttcccagggaatatttggtaacgtttggagacgtttttggttgtcagaatagggggcaggatgtgctactggcatgtactgggtgggtgtcaggggtgctgctgaacatcctgcaaggcacaggacagccccaatgtcaatagcacttataacaaatcatgcagcccccaatgtcaatagcaccaaagttgagaaacactacttcagtgcactcgttatgccaattgaacatacacaaatagagatattttccttagcagctaaattaaaaaatactggtgctgctttgcattcagaataagagaataaatatacgaggtcaagaaattagagggataaattaaaaatatagaaagagaaaaacataaatgagatacattaaggagaattaaaaatggaatagaaggaagaggcaaagtcatcttagtaaccattacccagctgtctgttatctggaaggcttaagagagtgtaaataagtggcagttgtgaggttcatattttcttttatagtaggaaaagtatatgctattactactgttattattaataatttatagagcatgaaaaatgtgttaagtgcagtgcagaatatagactcagtcaccacccagagggttttaagcttataattaggcagatggagccaactcaagcttaggatggggaaaataggtgacaacatgagaaagaggtcataacttgcttcaaattttgttttgtgcaatttctacttacgtttcagttaacctttagctgtgcgtatgtgtgtgttttcctttaaatggagacagccgctgtgtttcatagagaaaaatactttgagagatgatctgatattctcagagaaaaaaaaaaatcagctaatacaaattagcttgaaatatctatggtaagatgtgtaaggatatcttagtagaaaaaaaatcaagtgttttatgaaatacctaagttttgcaggtttgataagctcattttaatataggaaatggataggaggtttctgattcttttccatataaattttccagttacatttatttgctgtgtctactgtttttaattggcagaattgaaacagaaagattgagaggatttaggcctctaaaaatacacccccacatacccacccaccccccccacacagagtacaaaaattaagatgttggaaaatgaaggtatgttacatgttccttgctaactagggacattatatttaggtccttaactaaaaatttcataatcagttgccatttttatctgttcatctgaaaggaatactatttcagggacagtatgtgacatcatctatttgtgaagtggtgctttcctaagagtatttaataactggagatttgttcattagaggatattcaatttctaactttacaccctttttaatatttttaagaagtgaaatagcaaattaatgagtaattataagaaggtagagttaaatgtgtgttacaaggaaccctagcatgtcactattaatatctgtaacatcctgcccaaccctaataaagcacgaaagattacatttagacaaagttgaaggtctgaaatgaaaattttagtcaatatgttttgtagatatgtgtagtgtcaaattcttttggggaaaattaatgtctgtctcaggtgacttttccctttaatttgcatttggtatcatatgatgaaaacccatttgcataaactacttgaatctcattctgtttaattagagagcttctgtactaataaaattattttcacgtctcagcgaagaaatggatttaagaagatctagaggtaacttaaaccaagaaggttacatcaaaggttttattagtgttagattgacttcaaattgtcatgaacatgaacagtaaacaaccaaaaagatggtacaacacaaatagataatttaacacatgtatgaggagataatagccttaactggtaatttagtttgaatgaaaacttgtgaatgaaaacattttgtacccatgaatgtttatggactcgtgagatgtttacctttcctgatgaatatttgagtatgtatgtaaagaatgtatcttttccaacatttagttactccaatatctttgaaattgtccaagagagttttcaaaggattcaggacaaatagtgcaaagtataaaaatagggtcctttctagatacagttctttcatatggaaccacaagaaaggcacgcggcgtgttttctaaaagtcgtaagttgcagcttttgatgcagcagtctcttcaagcaataggtgtgtaaaaaataatttctggagatttctttttaggtctatgcctctttaaatgtgcccttttaggttactggaagtgaatgtatttccgtattcagtgtaggcatttctctgattcctacagataaaatatttggctaggtacatttttaaaaagtggacttttttttctaaactgctttacagtttagaaaatggattcaggaaaattctagcaataagttttaaaagtatacttacagcaataagctttaaaagtatctttaatatgttctgtatcctgggcgaactttcattcccttttgcttcttttaatttacatgatacatatttcctaccattgttacttttccccttttccaaaacaccttttcaagacttactaatttatatgccttccactctcattttactttagttgtattttaaattcatttagtgaatattagtttagggatgataccttgcatatatttttaaaaaattaaatgagaagtatcgcatcatttttctgcaaaattaagttgttcaaattttgggttattcgtttagaatacatttattttctattttgtctttattttgtttaattgtattcttcactttcctttttcaagctgatactctccaagcacactgtataggtagaaatggaatatacaagaatgtctctattgccacagtattaagtgaaggaaacatcctccccccacctccacatccacacacacaggctgtgtttgtcctcacactttcaagaaatttttgccttaattcttcaccacctacttcccttcaatctgtcttcctccggaaaaactcagctgctctctcaaatgtaccagtgatcctctctaactactgaaagaaatgtgcttttactgggtctcattctctgtcgcctctctgtagcatttcacatacccagtggtcatccacacccctagtcttagttcttcagtgctttggcaggtgacctattgtcttcttgctattggggcactgaatctctttttgtcatcctttcttttggaacactgtaaatgacatccatttctgtcaactgaatagatttttaaaaaacaaattttattatgcatatttaaagtttagaacgcgaaagtatgggatacttatagatatatagaaacatatagatagcatagtggttactgttgtgaagcagattaacatctgtcatctcacatattttagctgacaaaagcaggtaaaatctacttattagccagacacagaaagcaaaatattgcatgatctcacttacatgtagactataatccatacattcaagctgatatagctatagtaaccactgtttcattctctgtgtaatggatgtaatacacagagatacagaatgaaacagtggttactacaggtcaggggagggaaaggaaatgggagatataggtcaagaggatacaaaatagcagatatataggacgaacaagtctaaatatctaatgtaccacataatgcctaaagttaatacagttgtgtcttattagggattttcgttaaataagtagatctttttctgatgccttttcctcctgcccaagtcaaggggttagagaagaaaaccatgggttcaaagagtgaactgtccctctgttagtgagctgagtgatttttgataatttactcacttgtcttacttgatgaattaaaaaaaaaaaaagaggcagaaaacaccgacccctataatctttctctttagcaatctgaacttctttggcacaagtaggagaggagagagaaagcaggacatcatttcacagggacttgcaaagttcttgcttgatatttgattaacttcccactcctccttcctacagtactgctcactctctagcttcaaaccttcacaggctctacattattcataacctccacgttattcataacctctatgacttcttttaactggcattccaggtgacccaccttgtgactccagcctacttttcctggattatcactcacttggttcttggacaaacctatttctctactcttactcttctaatttactgtatcctaaaaggtccttgtctctctttgaaacttccagatttgcatgagttggggtttccacgacttctccttgaggtgacttggatagcacagcagcctatttccttccactaaccttggtgtctttttatatgggagaatggaaaatactagggacttcctccagcccccaacccaaactctagggatgggatttcccacatccttctccctggtacacctcaccactgtctgtctgtctttctggtatggactgcatattgggtcttataccctcagaaatctctatagcagaagtgagcgccagtctctctgctcaggtctaccccagccttcaggagatacatggtaagaaacttcttttctccatagtggagggggagtaaaacagataagatgccatattcctgagctctctggaagctctccttgaaattcaccccgctaccctctagtaacagtaccagagtggggctgtgtgcatccaaccaaggaataagaggccactgtctgcctacatgcatccctaatcttctgagtgctgattttgaaacctcatcactttggggcaaggagtacctccctcccctttcccatagagaggagagagaattgagtcttctctctctccgctgaactccccacaaagctgttcagtgctcctctttgatcctcttcttgtgacagctggggaaggggtggacaggctgaggggaggtacttgtagcaggatctgctctggtatattttggtctgagctcaaggtatgtaattgttcccacaagcttctggcttgctcactgcaagctatctctaacttttggaatactttgcactttttgttctcaatttcagattgtagacacaattttgagactaagaaaatccctcttggaattctattatagtaaagattcgagttttaattgaaagacagttatgaatcacttaacacagtgcatatacattgcaattttccaaatatttttcactatttttattgttttcggcctgcattttttcttctagtagtaatttcaccatctctttatataattgacattttaaacaagtaaatcgtctagtctttgttttgatgcagtctcttagtattacagttaagattaaaaatcagaaattatcttattctatgtaagatggtactttctggaacgctttgccatacagtttggcttaatcttgcagttgcctgaaagaggaagcacatggaaaactgtggtgaacatatgtgtctccatgtatctatctgcatgtaattagaatgaaacctgtcgagtttggctgagtttgcaaattgaatattcacctaatttgatctattttttgaacatctaattaaagcctcttttaggttagaagaataattatgatgataaagaatagattttactacaaagaataaatgagcatgtggctttcttcagacctagtacctctttaggtagcatgacactgttcttggtgttgcttacattgagtaaaatggtgctaaaagagtcagttaccactggaatttctttccagggtgatatatttttacactagcacaacatggtagccagtggtcattgggtatcttcacttttgcaaaaaattaaaagtgaccaacttaaccccatgatttatagtttattttctaattagtgatctgtatattttatttcttcttagtttttattttatttttattattttttactgggcaacttctcaagccagaataggctcagagagactccctattttcttaattttcttactgaaactgcattaattgcctgtagaatcagggtaattatgatacaggttgagtatttcttatctgaaatgatcgggaccaaaagtgtttcagattttggatttttattttattttatttttttattttggaatatttgcatatacataatgagatatcttggggatgggacccaagtctaaacacaaaattcatttatattttatatttacctttcatttatatttcatgtatgtgaaatttcatataaaattcatttatattttatatgtcttatatgcattgcacagagataattttatgcaatcttttaaataagtttgtgcatgaaatgaagtttctgttaagtacttagatgtggaatttttcactttcggtgtcatgtcagtgctcaaaaagttttggattttgaaacattttggatttcagatttttggtttagggaagcttaaccagtacatgaggatatgttgaactggttggatttaagaaacaagatggaaaaaaaattgaattttctggttttgttttatttatttatttagagacgacgttttgctcttgttgcccaggctggagtgcaatggcatgatctcggctcactgcaacttctgcgtcccgtgttcaagcgatactcctgcctcagcctcccaagtagctgggattacaggcgcccaccacaacgcccagctaatttttgtatttttagtagagatggggtttcgccatgttggccaggctggtcttgaactcctgacttcaggtcatctgcccgcctcagcctcctaaagtgttgggattataggcgtgagccatggcgcctggccttctggttttgtttcaaactggccctccaaattccctttatttttgtgtataattatattaaataacattgttatagataatgtgcatacacaagccacaatgcttgtgtcttgttagagataatgtatgtacacaagacacaatgcttgtgctagtgtgaaaatattaagtttttagtcgtacatcagtttgagaaggcggaggtcatggatggccaaagtgatatgtattgttgaatccaggtggtgtagcattcactcgagggggcagttatgttctgctagatgtctgcagaaaactcacaggacattcattatactggaaactactgggatgtagaaataatagagtttagtgtgttgtacaattttgtctcctgttatcaaatgagtcacctagaagtttgcagatctattggctagaggagtgcatgtattttctcttccaattgtcttagaacaaatttttagatattgagaaaaaggtagtttctgtgaaaggagagtatttggcttcaattttattgctagaattttatgaggcagtgacacctataagggctttctgatatgaagccatacgaattccattcagattatggctttcatttttaaactatcttctctttttttccctttcacataagatttttatggattatcccaggaaaataacagaaatagaaagaatagtaagcagatctctaactattccttctgaacaaaccatttcattttatcctgcattgaatgttgacttaacacttaaaatatttgaaatgaatcataatcagcattttagttgtaggttcttgttctagtatgtttaatgatttgctcaaatgttgacacttttctacagcaggggaaaaaaatcttcaatttaaattgttggatttttcaacctgggcctttagtataaaaatatggacaaaatagcatattcttttacaatacaaagctgtaaatgctgatagttttaaatataaagtgattttcattcagaaaaaaaaaaaacagttatgaaacgcctaaatgtgcagtaataattacggggaaataattgttcagttctttagttaacacactttatttcattggaacactttgaattaataaacatacccatgcatttttttgtgacagtagtaaccacagtgtatcttatcagataattaactttcacaaacataataacaagtctaaggagtagcaatgacactgttacagtaaagtatttctttggatattgaatttttaaaagaactgcttaaattcaagcttcttccttcttgcaaagggactgtgacttttgttactatgtgtcatgcaggggcatttctgtgaagagaaataaaagtggggtgaagggaaataatagagaaaaagacaataggaaaagcaggaaaacagatttggcagtaagtgtatacaggtattatgaaaagtaacatcacaactctggattagatgggtagaatgaatgtctaataatatctgtattgatctttaattagggtaagtgacttaacagttgagcttttctttctaattcaggtaagctgtcctcctctcagtagctgttcaaaggatcagctcatggaaaacaaaaacaaaaaaccctgccttttaattcttttctctgttttgaagtaattacattaaaagcaagctccagataatacagtttcaagtggacatcatgctactccccagtgcaatgcagccaagtctacagaggggaagggctgcctacagtggttgtcagaacagctgggagagtattaagacctgctgcattttcgtggggacacaatggctagcttaatatttgtttctgtttttcatagcaatttgacacatttgaaacaaataaacaaaatcttacttttgattaaaaactgcttgtgaaagaaccacaccctccctccaaaaaaattcgaactcagtttttgagaatgagcgaacatattttttttttgctgctttacttttattgctgtagtttgacaaaatcaaggtgcattctctgatagattttagtgttctgctaagaaagcatgaagtattttgcattctatcactcaattgtgtgtagttggtgaacatttcccagactgtgccaattgaattaggtcttcagtgtactgttattgttagaagttgaatggttaattcttcccttcttaagctgaagtgtacctttctgtgataaaaccatgggactcaagagattgcatttaaaacttggtgaaaaactgaaaaatttatttatctttgtatatgaatatgactggggaaatattttaaagcagcttctggctgtatgcaggaatagtgtagtgtggggatatatacaatgtgagtcattactgtgtctcagcaaacatgcatttaagaggattatataccataaacaccagagctatctggaagtatatgagctggtggtctctgctcactaggaaagtatagattgactggcaggtgtaactttcatgccacttggctgatctatcacattggagggagtactatataaaggcttgtttttccatgcttcttggtgtgcagtttgatatcagggatgggtgcttgccttgtatttgtacccatagtgcttaaacaacaatttgcctttattgaagaaaagattggcagcatctacacacttgtgttctctataggaaaatgtccgtattcactaagaaaattttgaaccttgatggtcacggttaatatgattcagaagagttgatagatacacatgatggtgatgagaaatgagaaggaatatgatgcttggtcatttttttaaaggcttattaagagaagattctgatatgaatcttgaatggatttatttgatgataggtgtaaacgtttgcatatcttcaagtttctagtgaaagtttggagaggatgaagagccaattggttttgcactgtgttgtagtgttcagtctccagatgatgttggttaaaataaaagttaatatcctctcgacatggtagagataatgaaaagactgcaggaaatatttttccatgacatccggaaagatctgtaagcagtgtgaaatatcagagatcgtcttgggaaacacagtgatttaaaaaacattttccgccaattatttaagcttgcttttttttttttaatgcactttgaagacttaattggtaatatctacactttaattaatcatttttgtgatttcatttaagcaaatatagtaccatcatgtttcaaatatactattaaaggctgggcacagtggctcacacctgtaatcccaacattttgggaggccgaggcgggcagatcatttgaggtcaggagttggagaccagcctgaccaacatggtaaaactccatctctaataaaatacaaaaattagccgggtgtggtggtaggtgcctgtaaccccagctacttggggaggctgaggcaggagaatcacttgaacccagaaggcgtaggttgcagtgagccaagatcgcaccactgcactccagcctgggcaacagagtgagactgcctcccaataaataaataacaacaacaaaaatacactattaaaatcctcaatcacagctatgcttttacaatcacatgcagaacaaaatttcccacctaacattcagtgacagtgatatttttttttttagtttggtaaataaaaagttaaccaaaattttaattttcttaatagtagctttttccttgtgagtcttttaccttgtggacccagaattaaaaaaaaaaaaagccaattatctcaatactagtttcgttttggaaagaaaaaaaacaagattcttgggtgttccattcctcaaacatgtttgaaaaatattctcctcattataagaagtatattatttaaaaaattagctttcaatcaaaagaccagttggaagagtcagtttcaaaagctcaattccaaatagtttttatttgataaaataaaaagtatttgactttttataccaggttttatcattgctaacagactaattattctgagaagtttagagttatccaagtgtatgaaaacaaaacctttttatttgtatattccagacaccaggaattccttccctggtgtgtctctactgactttagataatatgcttagcatttaacttttatatacatatgtagaaagaggtttcctttaagataatcatcataaaaaggtaaatgtgtgtgccacagaaccaaaatttaaaacagttgttttcagaaatgaatttgcaaaatggaaaaaaaatatccattttagtacgggataaaagtttgagaatcacaaattcagatgcttacagggtccagataaaagtgaaaaaatggtcctgatttgagggaaaggcagtagggagtattggggcctatggtgaattggtgagtctatgctactgggatgaacaagtaggaagtgaaacccttgtgagggttaggtttggaggttggagaaaagccagaggatgaaaatttccatttttcctaggctgtatcagagccctgaagagttgtctacaattagacaacaggtgtgggctacagatagactatagttgtatgtcatctcttccctgttgtacccagaccataccatgaacataaccagcagcagagatgcttccttgtctcttgatcccaagattggtgttcttcctcaagcattctcttgtcatcctgttcttggagtctgacctttgtttgtttgtttgtttgtttgtttgttttccaacatagcagtgaccccgtttccccagtaacaaatgtagggaccgattttgatcttccttttgagagtttgaacctcggtgctcttcatatacatttatgtaattaaacatgcagttgtgacttggttgtctctcacttatgtaaaatacatcaaatcctcataagttattgttcttctgtaggttttgaaaagctctatgaaaaacaaaacaaaaaaaagttggctctggtggtatgcatatggagtcccagccactcaggaggctgagggtagaagatcacttgaacccggaggtttaagaccagcctgggcaacgtagcaaggctttacctgtagaatgaatgagtgaatgaatgaatgaatgggtaaataaataaataaatagatccgtgttgtagaccaaatacttaattagctgtccctttcaatatttagtgaaatgtacaaaatgctatgaagttttagaattaaccaggaggagatttttcatttttactttactataactgcataggtcacaagcactcaataagtgtcaatggttggagaaataaaacacaaacacagaaataactgtgaaagtataaatcaacattcttatcttgcttttctcagcatatggcagagtaatagtagaatataattgctgatggtattgcaattttttgttttctgctttcatgcacaaaatttttaaacgttagtgaaaaggaacaagtgttgtaaaattacagctattcttacctgtgttaaacttttaaagtgaactttttatttctttgtaaacattttatattctaacacttttattgttcctagacattaaaatttccctttggaatacaaagtcattttttctatatgtcaggcatagtactgccttgatactagatgtggaaatgcccccactataaatacaaccttctgctataattggtaatgagaaataagagactgattttgaatacttgacaatgcaatttagaacagtgaatcatattcctgggctgaactgtgtattgaccatgatgaagaggcgatttctcctttaggattttctctgaccattataataaggtttgattctttttagtgtcctcaggccaggtagatctttatgtccagagcatttttgtctcttcagcttgtaagggtctggcatatgaaaaagagcagggtatttatagatacaatatctgaacttgggactgttctataaccagaaaaatgtctgattttgagaacaataagcctcagattcatcatctgcaaaagggaaatgatacaagctctttcatagccagagtgagtgcaagtgtttgtgtgtgtgtgtgtctcagttaaatgataaatctcatgtgattttctgaggtctgagatgccatatgaaggttagtttttagggagtcatattgctcactgttactgctatccaggacaactgtcaggttgtggaaggtcctgtaagttgatggaaggaatgaaatttaaaaaggtaaagagtaagtggaaagtcaagagtccttgtatataaaaccttacttctttgaggtttgctttttgattgctctgcctgatacaatatagggcttagcaggaccaaatgcagagtatgtgaagtcattgcagaagaaagaacaagtccagtttagtttgtggtttcagaggtggaatcatggcagtctgccagggtcaaaaggagaagttcactgaggggctgggagccagctggggaggatcctggaggcataactgaaaatgggagccaaagatcagtaaccaataaagcagactcagtaataggagacaggaatgtgagaaacagtgttttttatgactccaactaatttggataagtgttatctttttgaatgcatctgacccagtcatctgccaccagtgggcttaaccctcaaagcactgttacgaacggagccacacagaatcaaaagcggaaaaggaaaacaaataatacatgcaagtcctataacctttaaatatttgtgatggtaaaaaataaatccctgttacgtgtatggctattattgcttagcttagattattgattcttctataggatatgtgcctgtgtaagacaagagcatgtacatgctatatttcagaaagatttcaaccaaatgtggttaatatttggggaaactgaggtgggtatgtttgctttttgggaaaataatttctgaaaaacacatttgcaattcattaggaagtggtaatgactatgttacacatttttgtacctgaggaacagagggtgtctccaccaatttggatgaagttgttttgaacaattctttttcttataataggtatgatattgcattatcttttgaaccagtctctctctctctctctacatttattcttcattggtgaataattcctttacactgccatgataatattctttctctagatcaaatatcatcattgaagaggaatgattctaataatttagagaacgttgatattaattgtagtgacatctaaaaccataggtagaaaatttttaaatttggaatccttctttattctcaaacagatccctgtaaaatgatgaaatggctgtgaacagccccatatttgctttaaggatttccttccttttctatttgccccaatcaattacttctgtaccctcttcttggtccaagaccccacagatgggaatccactctactggtatttaaactttagatagcttgttacttcagaacatggtgtaaaataagttagaagtgatagaaaccttcaaagatatattcctggatggagagggttagaaacctttcctcttgactggtttttatttagtagtagtatttgaaaatactgatggtcatggtgataacaacaggttggaatctggaggactcttgatgggatagtgtaatattttggctcataaaatatggaattgttgccttgtcttaaatcagttttcagctggaacattttgtgacttctctggcatggtagccaccatctggccaacacagtctcctgagattcttgcagccaaagtgtctcagcattcacttgaagaaattcattttaaaaatgtctccaaatcctcaaggaccatggctagcaaaaatgtggatatgcatctgagaggcataattatcatgcccctctcattcagaaatgttctgcttcaaaggaatggcacagtgtccttcttgattttgtcactttttttttttccagttacttcttttgacattgttgaaggatgagaataagttcaaggcttcctaaggatgaaggaagcaaagggcctgcggcaaaaatataatcatgaacgattagaggagatgctatgtaaaaattggcactaaagctggattttggagcctcattagcattttagttaattgtctagatatccattgcaattgtatttatttatgttggtcattttatatatcagggattccgtatcaaggaaatgtagtattccagccttcttgaaggaaatactctacaatggtagaaatagataccgcctcatcctttgtagctagggtagtgtttccatctagatacaaaaaaaggacaaaaaaaggagaatttctgacttgtcttcacctttttttttttttttttccaaatgtgcttttatctagatgctgcacaaaattgcaaaactaattatggggccaaattcatattattttgtggatctctgaggatacgtatgagagaatctagtcctcttggaggaaatactgaaatcattttttaaaaatagacatattggctactggtactaatagaaaaatatctttcttgatagttaacttattaaaaactgctcattgaagctctcaatatgtcctttgtgggaaaaattgccttaatgggaaaggtcagaacaatttaataggacacaatgtgagttctgagagggactcacagtggttctcatatagcacttgttaatttaccaaatattgaacatttattgcaactagtagtaaggattttaaaaattaaattgctatttacatataaacttccataataataggcttaagaaaacatcagtcctttatagagctcctttaattcccataaaatctgttatacatgttatctgtgggtgttcactgctattgtaattaggcaacatgttagggtccaaataagctgaaaagaatcagtttaacttctacattttctgcattattctctcaattcagttatttcggggagagataaaagaacaaagcatattctctgtacatcattaattaaaaagacaagcaatattttgctgctaagatttttggccaagcccaaataaatttgtgaaatccagaaaaaataatttgataatttattataaagtattacaaaaggatgtaaaacattattataagaaataatttgaaatgaaatctaaattgttatgatcatggaaataagtcagtttagttagatagacttttagtgagagactactgtgtgcctttaaaaaaaacccatgtgccaatttctgcagaggatataaaacttagacttagtaaaatgtatgctttccttagtaccattcaggacataggcacgggcaaagatttcatgatgaataccccaaaaacaattgcaacaaaagcaaaaattgatgaatgggatctaattaaactaaagagcacagcaaaagaaactattatccagactgaacggataacctacagaacgggagaaaattttttcaacgtattcatctgacagatatctaatatccagactctacaaggaaattaaacaaatttacaagaagaaaaaaccactattaaaaagtgggcaggccgggcacggtggctcacgcctgtaatcccagcactttggggggccaaggtgggtgaatagcctgaggtcaggagttcgagaccagcctggccaacatagtgaaaccctgtctctactaaaagtacaaaaaattaggtgggtatggtggtgggtgcctgtaattccagctactcaggaggctgaggcaagagaatcacttgaacccgggaggcagaggttgcagtgagccaagattgcaccattgcactccagcctgggcagcaagagtgaaactctgtctcaaaaaaaaaaaaaaaaaaaagtgggcaaaagacatgaacagacacttctcaaaagaagacatacatgtgaccaacaaacatatgaaagaaaagctctgcatcactgatcattagagaaatgcaaatcaaaaccataatgagctaccatccctcgccagtcagattggtaattattaagtttatatttcttaaaattaataattcataaactttcatctttacaacttactattggtaatgtgataatttctgtgatgtaaagctatgtgatttcagggtgttccagttttcttgtacagtgacaggttgtaacactctttgaatttatgacatatcagctagtttgtcactgacatcctcatctaaggaactggatgagttaataaagtgagcagtagggagtattcccagaaacctttcctataccggaaggccagtaataatttaactgtgaaccatataaagatattctgctaaatccaaaacaaatatatttcaattcagcttccctagctggaccctgcaaaatttcctgtagctttctaacaccactgtgtgtgaaggtaaataagagtggccttcaaatgcttgggagggaaatacctcactattacaaattgtataatgtatttgaccatgccagtgtgacgtgtggtacctatgcaaggaaagggtcctgaagctgaagcttcctaaggtcaaggtaaatctacttctggccatgagagaggccaaacagtgatacatgagttcagagcccttagaaatgatattcgattggggattagaaaagatttcacccaggagaaggcatttgagatggctctgaaagtggaatcagctttcaagaagcaggtgttttagtgaaaatatttttgaataatggaatagtcttaacaaatacacaaaaaggttgtaaaattttagtatgctaaaagatcatctggaggagacatttgtgacacaaattcccaggccttactgtgccattctgattcaggatctggtctcagagaatatgcatctttaacaagtaacaacaggtgattcagttgtggggggctgttgggcagtattttgaaataaaaatgttaaaaaatgtttttttcataaaaggctaggagtctgatttgtttatgaatagtgagagttgatgctatctcgggtaaattagagatgtaaaaagtcttgtctgataggtttagcaaattctttgaacaggactttctcttctgcactaagtaggcaatagtagcgaaccatggaagattctcgaacaaggtcatggcctgattgcaactgcacgtttcttggatagcactgtctatttaatggtttgggtgagtttggaaagaccagaagtaagaataagcaagtgctgccaaagatacagtaatataaaagaaaagggtgaaggagatattaaaaaaagaaaaaaaaaaaaagcaagtgggaatggttgagagagtcatgctctagggaatataaaaaatagaaagattgtgaaaaagttcatatatgtggcatttccaggggctctgctggtgattgaaatatatttgttcattaattactgactttttcaaagctttatgtttaaatctcctttatgtttttctatacacaccttcatattcatattgttgtttaaaatttgaagttcagatgttaaagatctaaagttggtaaaatgaggcacactatttccagaaaatgctttttattattcaggggtgaaggaccactgtgaatttaaaaacaaattatgttgttgcagctttgctctttttaacccctaagttacaataaattctggccacaaaacaagacacatcagcctttctgcgatcaaactatgaattctacttacaattataaaacacatttccccaaagaggcaggggaggaaagcagaagttgtatttgttgattatttaggtgccttagagaagtatcacatgtgaaacctgcttacataggaaaccttccatgtctttttggataaccagagagttgagtactttatcaactaggctggattgccactttgtgaagactatcctctcatctttcctatttttttaactatttaatttttttgaatcgttgattgcttgttgttaatctaattccaattacatttacaagttatgtttaggaatcttgaatgaattcctattatcctacgttttagtatgtgaaattgtttttcttatgaaaaaaacaatcttgctagaaagattgatgaagatgctacagggaaagtctaacagaaaaaaagagctaataatatcacatattagggtcaacttgagaagctagtacagttctggcaagttaatggtcttgaacaatattgccttcctaatgactaaaatccaaggataaataaatacataggaagggaaaccaattactgtagtcatgtattaagtttattttttaccaaaaataattattggttgtttcacttaggtaatttttctttattataacccttaatgcttatgaaaaattgaaaatacatttaagtttctggcagtttgaatttgacagagggaatataatctttgtatgtatcttttttacactggcttacatgtatatataatgattatatagctttgtcaataaaagcataagtaggtgcctaattcataagtatttctttttcttgtattttggctttaaccaaatatgctcatatgtacagggtatatgcttaaatcttatgaactcgtcgtttactccataaactttagtggaagcatgatccttggtgagcgttgtaatatcggaggagtacccactacatatcatgccttttgttggctcacagtctagcagaagagagagaagatgaacacttataagctaggtgaaatgtgcagaaattaaaatatttaaatggaatagagcagtaccaagtagggggtagttgactatgtttggaggcatctgagctagggtgaccaaccatcctgtggtttcttgagatacagtcagtagttttggtgctaaaacttaggatgttttcccaggagacatttgataatgttagattgtcacaactggtagctaggatgttagtgttatctattgggtagaagccagggatgttgctcaatctcttgcaatgcacaggacaggctctacaacaaagaatagtctgacccaaaatgtcagtagtgaaaggccctgttttaaggggaagtagctgttaaagaggaagagagtgaaggtgctgattatgtagggagatgggacaattgatgcaccaaggttcctagggcatggcgaagaggtggatcaagagcacaagtgaagcaattggtcttgaataagataaagggaaaaatggtttctaagttagaaattcgtatacagtgaataggatgtgacttgccatcaagttcatgtttgatggcattattttatctgttgatgtaggaggcaaaagcatcgatctcttggaggtgagaggtcagtgcagtgctgattgctggagagtagtgaagggtgggaggttgattgatagatgacagaggggtatagttgaggctgtagatcatgaatttgcaacggtactagcccttacagtgttgtgatttctcaggcaaagcttagccattcagaacagactggggattcttaagggaaaggaactgtgtggaaatatactaaagggttcaggaccactggtgggagctgtttgactgtttggaacatgggatgggtagtgaaggatggcagaacctttatattgaccctttaaaaaaataatgactatattaccgaatgctttgtatgtaatccagtctaagtaaaagtataactgtgttgttttgcaatttctaaacactgtttttgtctttccctgtagtttactttgacttggaaagatgctctggcagcccccagaggccatttatgtagcgaattggagtaactaatagatatttaattattaactgcagcccatccctttagatttctcttttgtctttttccctctgaaacaacagccctgaaaggagatctactttcatggcatttttagatccatctcaaaaggcagcttttactctgtctaggttaccaaaaaacttcagacagtaaaattgaacaaaggtgctacagagagctttaaagcacctttcctttcattaaattagtgactatgactgggttatataaagatggagggaaagaagcagcatgtatcactcaacttttgagatcccagaggctttatctttacatttggtatggaataaaggcttatctcacaataacctgcagaccccttttctaattctctaagattaaattcatctagaatctcatgtgtgtgacctggcatacattcccaaatgcttctgttactcaaatacaagaaagcattttcttcttatcatcatgatctgtggacactaaaaaaacacttgggatcttgtatctaacactcaagtacttgggattacacattcatattttagagtggtgcaaaaaggccaatgttattatacaagtggaatccctagtatttataacagtatttttagcttctaaagctaagtccaacctgggaggaggtcctaaaatggtgtcattctgttgtagccagcataacctggtcagtgcagctctgttggatgaaaagcattgctacagcatgtcttagtctggcaagaggcttgggtatctgcaaatgtgttctaaggatagcagggggctgggcccatcagctgtcagccacagcttctgtttatgctgtgaacaatagccgtgtgccagggcagtaattattggttgattttccttctaaaataagtgtcctaataatttgtcacaaaaccaacttaaattgctatgatgttgcctgcaatagttaaattaggggaaaaagagaaaaaaggaaaaagaaaaatccaccaccagaagtgtttcagtttatttcggcatgcattctatattggtaaatagtgtcattaaaatctcatttgaaggtttttcaaaaagtttatttctgtgtgggaaaatcctttgttttcttacctaataccctgagctgtaaattagaggacaggggaaaaagttagctggcaaataaaggtccttactgtctgtgcttctttggaaagcctcccatattcctggggctcagataatgtgtttctctagaaaagcgtgcataatcggcactgaaatgagctgctaccagggtctgcactgcctggggatacaaattagggacttgatatttgaaaagtaatccaactgaaaattgtttcaagaatattcgtgtagtgttaccttgtgtctatagtgccaagtgttatccaagttctcttaccaggagaggtgaaatgcatattcatgttcacaaatttaatgccatttggaaaaaggtaacaaaaagattggccaaaacataacagatttcggtgagggagaaaaaacggcccttccccctctttgagttgattttttaaatttgtagtgtgtatgtgtttcagttcacagaaggcaagaatgaaacattttctcctcagatttaaaatgctgtcatggaaatgttgatagagttattttacagagatgtagctgggaaggaaaaaaagcaaaagaactacattactgcattacactgtgttccatctagaactcattttattaaagttcttcatgggtttatttccatctacaaaccaaggaatcgtaccctagcctctatccgtgtgccaggttccgattaacatcaatttgagttctctgtgtggacagagttagttcatggccttgggttatcatctattattatcactgcttgcttgtacatgccttcagagcccgagcatagaaccagttgtcatgctttccatcttttgtacccccaaatagctcactcaggagaatttgtgaatgggcggggccactgtgtgaaaatgcagagatccatcgtggttagcaagattaaacgtggggagacatctgcagaacgcttttctcataatcatcttgcatatatgaatatagattctttctcttcactctaaaaaagaatttggatatttgtgtagaaaagatggacttaatatgtaaaataaataccgtttggtttcttgctacatgtgctcaattggaagtataccagaaaataagaattttaatatcctacaaaatgttattggttctaatggttacctgatactgaatgagaatatttggaagcctgcaaatcattgccaaatacttttcagcttagagctttgggtctgcagagaaatgaattaaaaaaaaaaaaagaatgctaaatttagtgaaaaatatctggaagggacatagacacatacctaaaatttccataggaccaaaaataattatacttactttaaaaggtattgaatgcctacaacatgttaggtattgcacaaaataaaactgacatgaaccttataaacttagaatatgatctctgtcagggtattggtctaaatgtgaataatgctgggcatttttcagtatattttttaagtcactgtttcatttgcaaaaacactggtgtataggcaagtcaactttattttttactttgccttttatgtttcccgttgtttatccatcacgtatccactttttttttttttttttttggaggcggagttttttgctctttttgcccaggctggagtgcaatgacacgatctcggctcaccgcaacctctgcctcccaggttcaagcgattctcctgcctcagcctcccgagcagctgggattacaggcatgtgccactgtgcctaattttgtatttttagtagagacagagtttctccatgttggtcaggctggtctcaaactcctaacctcaggtgatccacccacctcagcctcccaaagtgctgggattacaggcgtgagccaccgtgcccgtccacatatccacattcttattaataagttgcccttgctgagtgtgggctcatgcctgtaatcccagcactttgggagactgaggccggaggatcacttgagcccaggaatttgagaccagtctgagcaacatagctagaccccatctctacaaaacattttaaaaatagcatggtgttgtggcatgtgcccatagtcctcgctgctcgggagtttgagctgggaggatggcttgagcccaggaggtggaggctgcagtgaaccatgattatgcaactgcagtccagcctaggcaacagagtaaaaccctgtctcaacaaaaaaacaaattaaaacattaaaaaaatagcccttaaagtaaaatgttgcgtaccaagaaaatatttttaaatagccaaatatttaagcatcttatcattggaatcatctaatattttaaaagtcataatatttagaagttaatattaattatagactttccttaggaaatatgtattgtaaaactctattctataattaatctttgtaataaaaactcaggcaaatcactttccattgtattttgtgctacatgaaacatttttgttatgtatcaaaattgtgtatctataaaaatgtttttttgtttacaaagatttcttataatacacttctacatttctccagtaaatacaatcaaacatcattttaaatctgttttattactcattgaaagtgtctgcatgtgtacacacacgtctcccttctgtgttatagctactttggggatatagtagctactttcacttcccaaagtatcttgccaacttaaccagtgtgcagttgatagatgagaagttgtggtcagcttatcctgtaagatggatctatcttaaaagaaatggtctatgtttttgtaagttgtggtaataactcactttggttggaaggcaagcgttacaaaaattcatattggctcaaagcctttcagctcatacagtgacaccagcagatcttctctttgtggaactggtttactactgtttctaaagtgaagctagtacagttcatcacactagttcctcttaaaaattcatgtagttgatacactggaaatattgtatagaagaagtggcaggatattctggagtttggcaacataaaattgggaaagatggcattgttctttatttttctctttctttcccacttcagttttatccgctctcatgttccttttcaaataagccagttacctttcctgtgtgacccaatttgcaggtacatgataagcagcaggttagaatagagaataaatgattatttttaatgatgatcagcacatctaatgtgataaattatgattaatgagtaaattagcagtggatgatgtaaatgaatctgctttgaaaactaactctacaaaaagatgctaaagcattggtagaggttctttttggtcaaatagtgtgtctatattaaatggcttcctgagtatgttaccacttaaaggaaatatgaaaaaagctgataagcattgtgtcatttgcctacatctctgctgaatgagcctgggagattgtatgtaatgcataactttctcatctgtttcagtataagggccttttatcactctattgaacaaaacggatgcacagtctgagtattttgaatgcataaataggtagtaagcaaatctagaggcttaatgtggaagatgttaagtgaatgtctaaatggtgttgctgataacatgttttcattaagaatgcatgactatggcataaggaatggtaagaatgacttcacagattttgtctatgagtgattcaaaaccacttaggccatcttcttgaaatttatgtcactaaaccagtggttattttgagtgtcttacaccaaaacagaatggccagccttactaagcacatcaatagttcaggaagttttattgcccgggcacacagaatgtaggtgattgtttttgtcataatatcccatgactgtttattaaataaaaagttatgatggtgagatcatacagttttcgttgctgtaaaacacgtgtttatgatccaggtattattataccttgaattatgacaaatttccctcaaacattggaacataccatttccacttttctgctctgacccacgttatggtcttcatgcatgtgtattgtcctgttgtaatgcgtgtgcttgtgttgtgaatagcagaagctgggattgcatgctgttctggaatgtgaaataatcccaggtgagatcagagatgttgaaggcaactggcagggaagtcccatggtggcaactggaatggaggaatgggtatgatgcgagagctagaaggttggtcagctgtgctaatggtctacgaacatttactggttgcttagtttgtatgtagacattgtgccaaatgtttgcaattcattattttggacagtggataaaaatatggccaatgataaagtattaagttatagctttagcagtggtctaggtaattggacattctgacacattgctgctatgaatatatgaattattttaaaagtataatttgttaaatatatcaaaagccttaaaaatatacttttttgaattcagtaattttacatgtaggagtaattcacatataggaattacatatatgtgcaaagatatgattacaaaaaagttttgaagtctttttctgattgaaatagcagaaacaacctaaatgtttaacaataaatttaaatgtaatctttactctttataatataaacatgatgaatttatttgtggtcataaaagatattcacagtatattctaaatgaaacgttggttacaaaataatggtacgatataacctctttcttgttaaaaaatatgtaaaataagcatggaaaattcttaaaagttattcatcaaggtgatcaccattagaatatctcctttcaactcatgtacattttctaatttataataaatacgtacaattagaagagtaaagtcattttacttaaaaattaaaaacacaaaaggtggtagaggggaagagagctctgtgatgacaatgaggtggaatgatattcataaaagagaaaagactcatcacgttatattatgcttcatctaaacttcagtcctatgatgatacacatgaatctgtaatctggctgtgctacatttgccagcttagggcttcgcatggatctattcgtctctcactatgtcatatcaatgtattgcagtggcaaggtatgtcacatagactttgtattccatagctaattcgccaaactataaacaaatatacgtgtaatagaggtgcaaagatcacatttacgatattattatccgtcctaaatactcaaaagtgtatagtccaggattaggggatagtatctgggacagcctttaccaagctcatgtatgcattgaaactatgtgctgggtatggttgggagttataagacttcatagatgaccaggggcatgtataattttctcaaggttctatgaatgtgaaaggggagaaaacacatgtgcttaaaataactataatgaaatatagactattgtgattcataaaagatacagaaagcgtgataggggagtcgaaaggatggtacatttcatctagatggggaagatcaaagaaggcttccaaggacttaatttagaattgaaaaatgtgggtaaattctgtaaattcaaaagtgggaaagaaggcattttacatgagggaacagcctgtactgaggcatcgagatgagagaattttaggttctccgtgggcaatggtggaaatgtatttgggaaaatagattgacagcagctctgaaatatcttaaaggccaaacagtatttctggtgttagtttgcaggagtaagctattaaagttggtttattattttttgagcggaaaagagctgtagtcacagatgcgttagaaaacaaaactcaaagaacgaaaagggaaaacaaaagaaggatccatagtaaagtgtaatattgattgtcgagatgaagcacctgaagtgagagtgaccagatgggaagctatggatatcatggcatcattcagtaattctcaatcctggttgcatgttggaattttctgtaaattaattacccagtcccatgcactgttttctgttttaattgatttagggtggggttcaggcacctgtagctttcattttttttttttttcttttaggactcccaggtgattctaatgtccagtttaggagtgaaccatggccattgtttttgggtacaaaaaagagggataagacatattagtgataaatcagtagaacttaataattggtattgtgggcaaaggagaaggcagaagaggaggctgaggctgttaggtggggtatatgggagagtgaatatgccaaaaacagaaatgaacactcagtaagaggagaaggactgggaaggcaaatgacatggtatgttttcaacacaacaattttgagatgctggaaggtaatctttcaagcagttagaaataataacctaacattgatagaaagtgcaagtgggagataatcttttcactaaattaaatcttttcttcctctcttcatttcttccttccctttcttcttctctctccttttctgttcctgtctgtcagtgtgcctatcagccctttgaaaaattagatattggtagtcatacagaggcatagatatctatctaccaaatgggaaatgctttaatactcattctaaaggaattgagagttgaggcctaaataaaattaatggtatagacatgcatagaaatatgtcattgaagtgtcttgaaatggaagagagttaatcagtgtcaagaactgtattgaggtatttgtctttttaaatcatgagcaaatggaatgtataagtaaaataataccaaagtagcctaccatgctaaacttggaatttgggtgatttgtttatgaattttctgacattgatttttgtctcttggtcagacatcgtaatctctgatttcaattggatcctgggatgatgttacactttaagagaacttttaaatacagcatattctgggtgaagtttctcacttagctagtgaaaaataattgctgtagtatggcacaaagtacgtgccaatcccttgagaagacaatcagtatacattttatagttacataaaagatatttcaaaatatttaataaattgcgatatattatctgtgcaatctttataattttctagcttgtaatttggcacagtgaaaatattagtgttacaagatctttggggtgttattttcctggccagaaacctctgtggccagtggcacctttatccaagttttgctcaggcccgttggtcttgttctgcccacctggcctggcaggctgcactcagctcacactaccggcctggatcccatgtcttcaagggagactgcgagtcaggcatggaatggcaaggggtgtgtgagtgaacgtggggtttggtcactgcacagtcagacatgttggccgctgccacggggtgggcggttccgggtgctagtatggctgccagttctccgtgaggcagcggttggaccaggagcaccacagcagcttccctggctggcactggtgaatgcagtggcacctggaaacttggaaacaacaggaaccactaggccccaaagagtgagtcacagccctggcttggggagctcccaggtctggggtcctcaaagggccacagcccttctctccttctcttcatctgcaacgtggtgagcaaggggcatgtttcagccctgtttgtgttacagctcttttagccttgccagttggctggtcctgagttcttgtcctgtgaccaggaagaatgaggtatgcagacaagtggaggatgagcaagacgaagaagagctttattgagcaataggaaagctcagaggagacccatagtgggcatcttctctccgtctcagggtgtcctgatgaatgttcagctcctgtcagagagggtagctcctctctgttaggcaggtcgtccggagtgttcacctcccagcagagagggtagctcctctctgttaagcaagtcctcagttctcatcagagagggtagctcctctctgcagctggtcatcccagcaggtgttcagctaacaacagagagagtcgtgcctttttgcagctggttgtcccatctgctttgctttggctgagcctggaacttttatgggcctcagaggggatgaagtgcatgccagctggtccatggacagccatgggcggtcccagaaaaggcaccaccagttcccactatggtctgtggggctgacagcccagcactcagacttcaggccctccctggcctgaaggtgggacctcaccggatccatccccttctgcccaggagcctgtctgcctcctgccaccaactgtggcacccaggctgctcacgccaaggggcatctgcaggccctgagttgccctcagctccccacttggcttcccttccaccctggtcagtacctaaagtctgggggtgctgaggcagcaaggggctggtgtctcagtgctgccccaacatgtgcacactcagtcaggctgacagcacctaggctcggcctcaactctgctctgagatcagagctgcgagcagtggtggcaggagtggctgcagaggcagcagtggtggtggtgggtcccctattccccgcttcccctatgccctgcgtccctgaggcagcccatctgcagccagtgtgagggcagtggccgctccacatggcctgctgctgctgccatcatgaggggttcacaattagatcagaagttctctcactcataacctcagtgactcctccttactgtcttttcatatattttccttccttcctttctttcttcctgccttccttccttccttccctccctcccttcctaatacctatattactaaaaagctttctataaatctataaaataggagtaatgataacatcttgcaagactctttgaaaacaccgtatataagatatattaaacatttagtctagtgcatggaactcaaggagcagttatttctttattccattctaaagtataatgcttcttaaatcaaattttaaaactaacaggtggttttgggagctgtatttaaaaagaaataccataaacaatttttttgaaagtctgtttgattttgaagatctatcctgaccacagatgtcaacaggtgaccctgttcaaatttcatgtgacagattcactgtccccacaggccctggttcatgtagaacctctgctatggaagctaccccaggtggtatctgtgccatgcttttgccctcctaagcaatgatacatcaactttgggacctccctccctttcgtcatgtgttggtatagttgtgctgttgacttgggcaggttgtctgtcactacccttgtcccagtgaaaatgaagctaattataacaaaaacctatcatccacacaaactctggatgccccatgtttgcgaaagtgtcaataggatgtgctgtggctggaagggaatgtaaagtcccatggtaactcattcccctcaaaccttcagaccaggctactacccttggaaccacccctcactcttctgctatgcactgcatttcccaccagaccccaaaggccctgttcctgagctctccttcagagctctcatcctgacgcttacagagaaagaaagatcagagatgacttcagctgatcttctcataaattctacaggcactttttaaggaggaagcagattgctaaagacaggggtacctgcatgttcccactgaacattctctccctgtctcatttaacagcaatattcaccttcccctttaaaaattttaagtacattgttatgacaaacagccctttaaaaacaaaactctgtatttaaggaaatgttaatcagttaaaagaaacaaagccaattcgttacatgctgttagttttgttccccatgccacatattttcttgatgtccacaagaaacagcttattaattagaattaaattagataaatggcaccctcattttgtctcttcacttttgtagcatgtgatcctttctatgaatctgttttaagtcagttggccaatcatatacctcaactctaagttatctacttaacctttaggaatttctcataaattgcattcatctgtggatgttactggtggacttcaatggctctccccgatttatgtctagcactacttagtatagtgtacgaaagggaggattttgtcctcagtacggcagtttgttaaggacagacaaaagcagtttgctggtcttggttggttctctcacctacatttaatagctataagtgcacattgagctcatcaccttgtcttcagagtgcctagcaacttgaaacatgatatggcatccaaatattagacccattaggttcaaagatactgtgcattggttagactttaagaaacaatctaacttcttaaaagcaaaaatcagtgcgcagtttgtggcttctcttgagctgtgtagcaaataataatctactaaattccaggagctatggcctgtgttgtgaatgcatcctgagaatgtacagtctttgaaaatggcaagcgagcctggcagacacattctagaatatcggccatgtctctgttgtgacgcatatgcatgcgtagcttctctactttccatttagaaaatagactttctgggttgaccagtaatttgacctgtgcagtacctggcattagtttaataaaagatcatactcctcacttgtcaaaaccaacttgagcacaaatgcattttgcaaagtacagcattggcagcttcaggtagatggcaatggtgattagctacagcagtaatggaaggatgcctctctaaataatggtgactggaaagttctaatgcctttctccccatctttataccttgatatttcttttttttgtacactaactataatactgatggttgtatctcatgggataaaaacggagattttcacgattcaaatcttagtctgtcctatgttgtgactttttagtagatacccttgttttatgctttacttgaattctcttccctttcttcccatcttcagagcatggcttaaatttggacaatatctatgacaaaataaggcagacgattcatcatgttccttttattaaactgagatatggagaagggaagtgggtgatgtgtgttgttatatccctctgagaataaagatttttacttgcctcaagcatttgttggggttattaagtttagtcttctctctacctcatatctttcctttggctggctgcctagcattgacagacaccatctgagagtttgaccagcaaaaatgattatatatgcaccacccatgcttagtgaaaggattttactatattatcttgagtcttactttgtatcataggatgatgacatatatcctttttgtagttcggatcttgtgggcgaatctagaaaaattgacattgggtcccataggaaagtcatgattttcttgtcagtgaggccgatgtctttcatatatatatatgtattttttttttttttttacagaatttctctgtaaaagcccctgaaattatttaactgtagtgtgatcaattttattttcttgttttcaaagaataaatttaagagcccttttaggtttttttgttttttttttttttgtttttttgttttttaagaatatcacatcaatacagtggtaggatttagaaaaatagttccaggtcctaaaatagattctaactggttattttaataagtttaccacagttcaataggttaatttcattccatgacttggtctccagaaataaaatcctacagtagcatccaatggtcatttctttttcttttctttaaattttttatttttgagatggagtttcactcttgtcacccaggttgtagtgcagtggcgtgatctcggctcactgcaacctctgcctcctgggtggcatatttttatacttgtcaatattacacaaaaacttctctgcgtgtcgtgatggctcacacttgtaattccagcactttgtaaggctgaggcgggaggatccttgagccctggagttcaagacatgctgaacaacatagggagaccccatgtctacaaataataaaaacattacccaggcatggtggtgtgtggttgtgctcccagccactctggatgctaaggtgggaggactgactgagcctgggaggttgaggctgcagttagctttgatcgtgccactgcactgaagcctgaatgacagaccaagaccctgtctcaaaaaacaaacaaaaaacttcaatgcctgaccagaaaataaagataaatgagacacatacctggaaaacatcgaaatggcactcatacctattctccaagtgtatgggaattttgtctctctgcactccatttagaaataagatttctatgtttaatttgacttgtcctcacccaccagttatttccagatgagctttctaatttaggtccttacatggcaacaggacagatgaagcacttacccaagcatccattgcctagttgcagattgtcagaattgccaactcttcttcattctttgggttaagaaatgcaacggtatcccttaaaaaatatccagatgcagggaaaagggtatcctacttctagttttctttaatttctaatatagtgcacactcattttatgcaacagcccttcaatgtattcacatgttcttgcaagaaatttcagaacagaacttaaatgggaagctgggctcttacaatgtattttccttcccggttgacagtttttaggctatggacaagaaaaggaaggtagctaaaaatgacagtattgtaccatttaatacagcaatctattttgtgtttctagggaaattccctagaaattttaattgcataattataatttttccattggttactgacaagcaagtagttattatcaatttgcattgtttgaaacagcagaaagataaatataaaaacttgtaatatatttttcatttgtttccagaaaagtgacatcaatgtacagtgttttgtaatcctctcactgttagtcaattttaaattattttgaggccgggcgtggtggctcacgcctgtaatcccagcactttgggaggccaaggcaggtggatcacgaggtgacgagatcgagaccattctggcccacatggtcaaactctgtctctactaaaaatacaaaaattagctgagcgtggtggtacgcacctgtagtcctagctatttgggaggctgaggcaggagaatcgcttgaacctgggtagtggaggttgcagtgagtcgagattgtgccactgcactccaccctggcgacagagtgagactccatctaaaataaataaataaataaaaataaataaaaaataaaattattttaagtacttcccacagctcctagtaatcatctagtctgtattgctacactgagatgctacaggttatgatctctagcagggttgttagaggctgttttgctttcttaatatttttgaacataagcaggcccgcagttccaggatcaccaacaagttgaatttgctgatgaggtggtaattcattctccaggaccagcattgcaaatatgcctcttctgaacttccctcctttggaaataatatataaagctaggaaaccttgaaactggaagcaatttctgcaaattaatttatttcatatgtcatagttttgcaatttttgtaaattaatgtatttcatatgtcataccaagaaatggtaaagttacatgattttttttcctccaagattatccatatatgtattggtggagcttagataggaatccggcttccttgactccaagaaaaccaaacagagtcagaacacaccatcaagttaatgggaacaccatgtgggaaacatgaaatcaatacagagaagatactggtgatgaaccaagaagaacaaactttgttatgacttttttcttttttataatccaaggattgttttcaaaatcaattttagctatggttatttaaaaccacttttcaatgacatgtaagtagaacacagtaggagagaagagaaaatctgtaacagggattagaaattaaaaaaaaaaaaaaaaaagaaggaacagcaaaatgttttggggctttaaaacattttcagccagaacataattgtaaaaactcaaggaagtgtaaaagatggaaagcagtcggagaaataattaaaatgcctcctcctgaacaccattattagtgttttatttactttgttcaatctttgtgtgtgtgtgcatttttcattatctgctatccccacatataactctgtagtatgcttttgtggcttattattgcatcataagcatttctcatgtggtatgatacagattttataacacttaactacttgtatgatgttccatcttcatgccatattttatttcactgtgacagaaatcccatactgtttaatgtttcaactacttatactcttttgccaaacaaatgatatgatgaatatctttgtgcataagtattcatttacattttatatcattcttgtatgatagctatctagatcttgaaatacaagatgaaaaataagtaagttttttaaagaaggaggaagaatgttaggaacatttaaaggagatggaggatgttgaacaagcttccaatgtctatcttgctagccttagtaatctttaagtctacatctttgtataaaaaatattctttgctttactatgactttggaggcttcttgactcatcttcttttatgcaaattgtggagctaagtttcaagtaagacagcttacaatatctgggttagagagtcactttaccattttcccctatttctatttcttgcgaaaccttctaattcagggcgatatttcttgtctctttaaaatttcctagcatttctcttaaatgtcactaattttaatagctcagcagtggcaatgctgctttctggcagtgtcctgatagtggcatcaaagcaagcgctaaaattttacccactttgattgatgagctcattttgttagaggacaaattggatttttttatatactggtaataaaaattaatgtgtgatgttgcttttcggatgttattggatctctaccttaatacagatttcagcaataaaagcactaatagataacttaaccagaaagttatgtccttcccctttaaactaccctcaaaagtaaaagatgcttttctaattttgtaatcccatagtgcattgtaaaaatgtatgtcttgatggcggtgtggttgaggatggtggggagagcagcggtagtaggataatagtctgtatttcagttttcaatttaactgtgatgtttattttttatttcagcacctccaaggtttacacgaacacccgttgatcagacaggggtctctggcggagttgcctctttcatctgccaagctacgggagacccaagacctaaaattgtctggaacaaaaaaggaaagaaagtcagcaatcagagatttgaggtattaggtccattgttctgtttctctgggggaagaatgtatctgctctgtctttggtttctacgttacttgcttgctttactctgataaaaggtgtcactgatatatggtattccttacattgcaagtgatggaaaatgtaactctaaatggctttttaaaaaaggaaatttgggggttcaagggctgatttttgtttctacttgtgccagggctcaatagtattcctaggattagtctgtcagtttcatccccaggttgcaagatggagctctgcaacctcacaggaccacgtctgtaggatgtatgaaagcttgtctcttccagaagcctctcatcccattggctcctattacgttacttgtgcatccctgagacaatttgtgtggataggtggacagtgtagcctacttaatttaagccaatcagaatctacctctgttctgggaatgaggacagtcccatccaattgcatggcttagaatgaaagagcagaattttcccaaaggaaatttaaatcctcgttatcaagaagaatgggaatggatgctaagcagcaaatgaagtggtccactgcccctcgcacctgtgttttacaagtagtgtgaactagaatgagaaatttgttccagtgttttaaagtactattctgaaagaaacacatgcaaacaggttgatattgcagagaaacctatcgaagaagttggttttctttattcaggagagctcagtgcagcgaagatggtgaaacataaatcaaagattctttttttgagtgtttgtgagaaggctgatggtttagaaatttgctcattctggaggagaaatataggcaataagatatatagaaagctacacagattatgggcacacaatagcatgcccataatttaagacatgagaaggatagctttaattttaggggctaccaatacccccaaactgcctgaaattgtgaaactcacctcccttttacctgagtttctaatctccttcatgacctaatttacagtttggcagattaaaggcaatttctagttaaaagaaatatagcaactacaaattcagaacaattttattttacttattttcataggaactcacagggtgatcaggggttcaaatgtatagagaacctaattaattacaatggtgaaattagaaatttgccattggaaattgggttgtagtttacaagtgagaagtttaaaattatgtctgaaaatcaaatacttgattattattgaaatataatttatttaaatacaaaaatatctttaatatttggaaaatgtttcctgtgtcatgtagaaaatgatgtatgtatgcatctttgctgcacattaaaaaaatttaaatgaagttaattttttgtcaaagagaagtttgacatcacgctttctaatgacaatggctcctgacaaaatcatgtaacaaaagtgaaattatactactaaatatttcacagcatgatctctgctcaatgcctaattccccatgagagtcatataaacacctttggggtaaatgaattatttttacccaaagcagcttcatcaaactgtatcaagtccttggttgaaaatctttactatatttaacactaatatatatataatatatatttaatatatattattaaatatatattattaaacaatatatatggtattactagtctgtatggtccctgagagcagtacatgttgactgtttttgctccctcttctatccccagtgctaagtatggtgtctggtccatggcaggcatgaaatcaatactggatattttcaaactggaaattacatcactggcgtgtaatgtgtggtatattgtatgttgtaagaggatagatctaaatctaggaaatagttcacaaatgtaaacatacaatgacatttattaataaattagtcaacatttaaattgggtttatagttgctttaaccttttcctacctaaatcataaaatgatcataaataacttttttaaaattatggaatgcttaacaaagcttccaatatgaaactatgaaacttttctttcctaagatgcatagtagatttattttaaagtgtatgctttatagagttgaaaataaactgtagtgcattgagaaatgggccattttgaatatttttgtgaattttgaacaaaaatggaatgcacaaagattgaagtggacatattttgaaaatatgaatgtccttcctctctgtgttaatatacacatgcacacacaaaatctggaattaagcaccccataaatatatatatgaggcaatctcaatttattcataatttaggcacatgggaatattcacagtgaaatacaagagaaaaaaggcacaacttctcagtgaacagctgaaggaatgcagcatagttacagaaaagacagaggactccataatattgtatacatatttgttaatatcatcatcttttttttttttaagtggtacttgaattagctaacaagtacccaggattatcagtgtcactaaactgtttccaagaagagttcctaatgatggtgaattcaggcttagtgtttaggacattaattttctgcctggtgaagcaagcctccattttacagcaagaatgctctaaaaatgcagaaaatgctaagctagaacaaatactggaatgatttatggcaaaattaatgcacaccatcaggcttttgggttgtgaaagctgtctcgttggctgcctaagtactagatttatgcaatttcttttcgtggtttgcctatctatactgttcaggatgagacagtttaaactagcagagctatctgtggtggcatgcattaattcttcaccttacagtcccattattgaatgaatccacattcgtatatgtgctgtgagagaaagaataatttaagaagtttatccattatagctgcaagcctcttgcaaaattaatagagtcaaattgccctagatgaacatactgaaatattttaatgaataaaccctggtagtttttagtagggactagaaatctccatgttttgcatatgtagttgcatatctttctccttgttcagtagaagattcactaaattagaccaaatattttttcaccactatatcaaaattcagtttcagaatgatgcctagtttattatgagcctaatggcggatccaccactgtattgagagctttagctgagaggtagacaattgtaacaacacctgtgacagctattgtttcctctaataggtaatagagtttgacgatgggtctggatcagttctcagaatacaacccttacggactccgagggatgaggccatttatgaatgtgtggcctcaaataatgtgggagaaataagtgtatccaccagactcacagttttgcggggtaagtgctcaagtgaaggttgtcgtttgtgtcattgttacaattctgtatctcttttgtagcatcattgaaaagactagcattgtgatggtgcttaaatgggaaactcagttaaatgtttgtaagacttgaactttaattagacagtggataccttctctagttttgggtctttacagaactagagttcagggggaatatcagaggtaaaaaagctgaaaaaagcattgacttcaaatgccagataccattttgatttttggcagagcatctagaaaggaaacaggatatggtactcttttatatgttggcattactcgtgcatggatttttcatactgtattcagcagctacgttttttacaactaccacagctgacattgatatttgcagaattaaagaaagaaccttagcctaaagatgaactttccttaagcaattggtcagaaccaagtataagaaatgcacctgtcttatgtgaaaaaaaatacattttttatttgtctgttatctttcttaaaccaatatgtattgatctaaataactgggctgacaaatccctttctttgtctccaacaatgttgcttacacaatttgacaaaggcacagggtgagttgccagatctccagtacagtgtgttcagtttgtagacttcctttacaatgagagtgctggagaataaagctatgatgaagactgtgttgtatgtctctaattcaggcttctgtatagagatacgaacattcccaattaggcacctcacagttgacatttccagattaactattctgtgcctttatctctttctctccctcacacaactcatttgttttgttttgttgtattttcctctgttccaaaatttaggagaatagactttcctaacatgaaagaaattggaaaggaaacaatcagaatcatagaggaacttatgtagattaagtacatttctctactatttcattttttttacccccatggagggatggttttactttatatcttttataaaataaaaaagtttgatttgataaacatcttggtttctttcaaggaggtaagccctattgatattgtcaagaacttatttatttggaggccagcagtaattagtaatgtaggtcaaatttacctggtggttttgaaactaaacacacacacacacagacacacacacacacacacacacacacaaagaagcaattcaagaggctgagaaaatgagattatttacatatatatccttaattacgtttgaaatagtataaacaccttattaagttgcagggaaagtattgacaattggatgtatatcttttaaatgcatgtaacagatgctgctttaaaacagacaagtgagatttgagctacatttctggctgttatgacaagctaggttggtgcaggaagttccccattccctgaccaacacatagaaatgttgacaaagtatctgaaaataaaattaaaagcataattaggcttacaaacaagaaattgaaatttccagttgctaaaaacaagggagggatttcctagagaaaagacaattgtaataacccaagataataacaaaatggaccttatgctttagtgctggagttttaacactccagcaagatacatacgtatataaaataagttgagagtaacagagactagatcagctttctgcatacaagtgagatttccagcactattcctactgtgcaatactcaggaccaaatagtttaacataaaagctggtcagaaacagtgagtcccatagagtgtgcaacagacacccataatagcactcaccccacagagacattccgataatccagatacacaaccctagagaaggttgttcatacccagatgggctaatgaacaccagttctaaagcaatcaagtcagctaccaccagcaagcgacagtaagcccaaccatcaagggtggaaatcatagtctctgatccacaggtaactgaactgtatgaatgggtttcaaaatatatttaaaatatttgaaaagggaaaggaaggaatggtctaataggcaagaataagacattagggaaaaaaaagaataggagttagaaattagattttagaactggcaggaatcttagagactatgtttatatgtgctgtaatatgcactatggaaagtatacatatttctgaatatacatacatagttcacttcagcttgtctgaaaattgtcatttttcaggtgttcatatttgaagccaaatctggctcatttgttcatctgctttaaaaattttaatctccatttatttacctagtttagaatcagtgccatcatatagaaggtatattaaaaaggtacaataaaataaaacttatcagaaacgtttttgagttttctcactttccaaatcccttgaactccttaaaaggaattaatggcagtcatgtgcttgacttatctttatgcatccaatgaagacattaacaaaaaattggagcaaaatatcactttacttagaaatttacatggattaatgttttcctgtctctcagttggctggagtttcatcatctcctctgcttttatacagctagtccccatataaaacaaatgcatcaaaaatgtttaatatggtctcaactttctatgtgaacatctgtcatatgtaagtatacttgtatgaaaatttatgatttgagtagttaaccctttccatttttttaaagactatgttgagcagttttagaactttcatgagaaaaattcaaaagtattttagatgacagaaaggtagtctaaacataatcttaaaatagaatacttttatatatccttttaggataaaataaatatggatggaaattatttttgtttcctggagtcactgtttgcttaaaacttctaaatattgttatttctattaatagtagtgtttaataatattccagtgtaaactgacattcatagactttgaacatcatgaatagctaaataaatgagtgtgaagaggtttataccacagttgaggagattttaggttcactttctcttgcaaatcatgttggcggacactcaggcactctgttctgcagtagatggagaccattttacacttttcgtccagtggcctcattagattcccatttcgtccacgtggatcatttactttctccctgctttactgacaaatgccaaaaatgtgccagctctcatgatgggctttatctaagtgaactggatgaagatcattgatttatctcacacaagctactagagaaactaattaattggagattcaaatatctgacctgtatggttaatgaagaagacattgaaataatactctgaccacccatgtgcctcgaagggagcatttcaggaacaagtttcccttcgtagcttgtttcaaattacccttactctcaaaaactgtgtttcaataaggagggataaccacaagctcaggctgaatgtgccccgaaataagatatttgggcaattaactataccatagagtgtggttcacgaaagaagtaggagaggggggaggtgaatgtagggcttatgtcttccaagtcattttaattttttagttgtcttggctatggaaacacaagaaaatactgactccctaatgatacaacactttaggaggctgagtatatctgttttacttgtgttttcccatcctaagcagaactttaagtgaaggccttaggatgtactgaggctactaaggactgtgccttaactaattgtggaatgctactaaggacagtgaattaactatcaggctttcagtgaagagcaagcataggaccagagagagtgttgtaagaacagggattgtcatctaaatggaattggttctgtctgtttcgttagtttgctggtcacaatttcttcctgactaaagatatcagcaggaaaccatgtaatacaaatttatgcagtgataactgaggatgaaaatattctctctgatagatgttatcaatcactaggcagggaaaatgagatatcaccatccatagacttttctttctagtaagagtccaagggtacttgcttcttttgggcaagaggaaagacatcaataattattcttacttacataacctcccttctctaagacaaagttctggaaccatttaatcaactttgaatctaagcatcttactaaatgtcatcatgtttcttgaacttagaattttttttaggggagtaatcagaaaatacattattttgctcttatctcaaacagcatgtaatgggtcatttaaaaaatcttagtagattatttttagactgggctgttctcaaatagcactgccccaaaccaccaccaccactagcacaacagaacagggtatgatatacaacactgctgctcttatctatttatagggaactggctttgttcatagaacatatctacagtacaattattgtctaaacatgctagtttaccagatatgaggcattttagttacctagtttagcaaatatatttcatcaagtgatacttatgtgtacctactcttacatataaatatattatttgtgaatgatcaccattaggacaaaagataatacgtgaagtacccaagtctaggtcttgggaaattgaattccagctttagctctgtcacaaaataactggattcttaagcaaatacgttaacttccctgttctgttctgtttcttttttttttttttggcctgatatgcattgggaaggccttggattagcgatgaaatcactcagatcacccctctccagctttccgtgattcattgacatgcctatttcagcaagtcagttcttgcaagatggaaaaaatttgctccctgaaggtgactgttactgagatagtaaaacacacagtgagcagttggatgagacagagaaggcactgcaatgggaaatagaaatgtttgcataatatgtctgtttcaaaaaatgtaagccattatggcagttgttaggaaaaaaaacatacaacttttacaatctttcagggagaaggcagtcaactatctctgccattgtgcagtaccctgtgatcagaattagcatgttgattacagtctcattttattaatgcctctttttgaagatgaacacagttgtccccgctgtgaaaatggtactttgccgtttatgttataaagtggtctcggctggagatccaggctaggaacattaaagaacaaagcacagctgcttgactgtcacacaaaaggatttttatgaaagactgaaacaaaaggaagggtggccaacacagaacaaacgtgctgacaattatggtactgactgaagattacttgaaaaggcttataaaatagttgagtacttggaatacattgataccaacacgataaagctttcgtgtgtacctcatttccatgctgggaaaaggtggtagtgggcagagccactttaagtgaacagacgctcctgactttcgttggtgtaatctttagaatttaaaaacagtgattctttgggtatcagtggtcacaaagacagaagcccatgtggatagtctatgagagaccctagtaaggggagacattaaaactgaaaatctgggggagaaagtgtacctgtgaggagacgctattcattttccttctgatctatcttttgaggactgttatgttggtgatgcatgctccttccttggaactattacttgttttgccacactgagatcatgtctaaaaagggctcagaaaaaatgagcacacttgtaaatcattgcattgaagtgagaacaattttcttcttttgacttcatattaaaatattatttttaataattttgaaatgaacatcaactcatgcgagtgtttactgctgcttaacttgttaaccgaaccatagaaatgttgagctagaagggaatttggtgtttacctagcctcactacttatttttgatgtaaggagccaaggtccagagagtttgacatgatttgttcttggtcgtacagctaagattttcatcgggtttggccaagtctgaagtgatccctgctgcagtacgtgtgacagtgagtttcagcccttcagatttttactttatatacaagatattgtcctggaagaacaatgttcttccagctgacatgtcgacagatgagcatgatgggaaataaaaagtgctcaagtgccatgggtgcaaaatgtgtaaaatgctacatggatgatacactgtgagagtgaggagactgctgggttggggcatgaagaatatttaggagtctgtgagacagagctaacttgagagaggagtagaaactagaagcttcttgagcaaagtggcttagggaggaaatcactgagtattgatggtaggtgtgtgcagtgtattagggttctctggagaaagagaaccccaacagaatatatacatatataggaagagccttattttaacaaattagctgacattattaatgaggccaagaagtttcaagatctgccaaagttggcagctggaggcccaggagagttgatgtgcagttctagtccacaggctggcaagctgaagacctaggaagagctgatgtttcagattgggtccaaaggcatgaaaaagctgatgtcccagtttgaaggtaggaggagttcttccttccttaggtgaggctcagctttattgttctctttagtgttttacctgattggataagggttgcccacattagggagggcaatctgctttgcttggtgactaaattaaatgttaatcgcatccaaaaacaccctgacagtaatgctcaagataacatttgaccaaatatttgagcaccccagatatttcgcctaatcaagtgacacgtacaattaaccattacaggtgggtataaacaatggtaggtcagaattgagcagaagtaaaatagtagtagtaaaagaaaatgaggttgggacgtgactcattggctaaggagataaacctaataagtgagaaaaggtgtgattaagttaacctaggccatctttatgtgagctgaaaattacaaaggagtttactaaaatacttcacttaaagtaatctatcaaacagtcattcatacataattgaggtttatatttaaaactaggtagttggttggctttcattgataaaatttgagcagtttttaaaaattcagtatcctggttttccaaattagttttattttaagctactaattaagatgtagttttaaaagttgtacatgcataatttattggtatttagggcacagatatgccaaatgcctcatctagggtttaattatcaaagccctaattacgtatctccttagaagagcaagtaacttattatatcttattaaaaaaacaatgacttgtgaattaatgccacattaaacacaactatgatgacacacatcccatattcttaatatgttttgttaaagatagcaagattttttttttttttttaactactgggcaatcggggaatagtcatatcatttcaagactctcttatctgtcatcttccaaaatgagctgtgttttaatttatatctaaaaactttccatgcctttcttttttgtttcttagaactttacctttgattattaaactttatccatgcattacataaatgttattttcaccctttaacacagtagatttttttttaattgatagatttttggtcataagtgtagcactattgagatttttctcacatgtctgatgatgtctgtattcaggttgaaaatttgatcatagtttgtattttcccagaagagatcctatatttcttggagcataaataccaaaagagctattaaaaaaatgaagctataaatcataagtgagaccagaaaatcaatattaacagtttttagatattttctacctttctaagtatcggcatacatagttctttctgtttgtttatgtatttgtttaattacgtgggtaactgcagatctgtcatttactggtcaactagaaaattaagtatagtagaaaagtatgtgctcataaaaacgtgatggcttttaataaagctagttattaactatcaatatttatacaaaaacttgagaaggtatatttgcatatatgtatgttttgtacatgtagtatatatatatatagtgtgtttgtatatgacctgtttaatttgcttcatagcactttttactatgtgaaattatactctttatgtcttgagacttttatcctgtatacctcttcctttgtgtataagctccattacagttttctatggcctagaaatgttcctggcatttattgggcacccaagagatatttgtggcatgaacaggtacatatgtagagggatctatagatatggttatgtagatacaatgcattaagagaccatttgggtaagaatgagtcttactttacatataatgaacaaaatagtcattatttcagtggcctctgcaagatgaagagcgtgattgagagtcaagaagtcgaggcaaagggaaagagaactacaaagacagagtgaaacagagggaatgaagagagatgctctttctagctacataagcatgaatttgtatcaaccttccagtgcttcctaactgtataggtttagacacattactcaagtctgaatgttaaattcctatctgtagggttgggggtgatcctggctatcttttagggctgttttgggggaagttaatgacatattaaatcatctggcagagtaactaacaataaagttgccaaagaatgttaatttccttccttctccctttattatccctttgaagctgagctagctggtttggctctcccatcactactgaatccccagcatctagaatagtgctaggcacatagtaattcagtaagtgttatatgtatacgtggctatggtgaagggaagggagggtgaagaactctgaaaaataagtttttgtgtcttctcaaatagtccttaatccaaaggactgaaaaacagcttttcacaaggaaataggatgatacaacaatctgaaaacatacagtattaccaagttattttgaaagactgaaaatcatttattggtgctatgctagtacacaatcccaagaattttagttcctttttttccccctgttacatttgtgcttattgttacgttaacacacatttccatattcttcagaatgcttatacattaggtaggtccaggtagtcaattgcttcaactgcctaactcaaactagagtcacactgtcgtactagaatattatttctgttctatgacatctaggtcacagactagataaaaatctataactgttttatgatttctgtgaaaatgtaacattagatatattttagaagaagcagaagaatttcaaatatccttgaaactttgaaagagataataggaaacattttcttgctttttcgtttattcgtttgttttgtttttttgattatttctgttaccaaccttggtgtaggaagtgatagaaggtgtagttatgggtgtaggttcagcaaacagacagacccgagttcaaatcctaacttcactatttgttttgcggcaaatgtgcacatttcctaacctctctaagcttcagcatctgtctatcaagtcgagataagaagacctattgagtaaacttaagaggatgattacaggagataatccatgtaaagctgttagcaaagttctaggcactcaggaaatgtgagttgttgttgtgattatcattatcatcactagtattactatgatcagtaggattattattaagagttaatttcaaattatttgattaaagggaactgccccatttgtgaagcagaactttttggcacaggcagaattatcttgctaaggctgggaatacacaaattttttaatccttaagtcaagctaccttgtccactaaataatcatgtggtccagatgccaccatttggctgttgtaggatccacaaaatatttgaaatttgaacatcattctgtcataagtgataggggagtatacttaagagaaaattagatgaaattttccttttatcctaaaaaacagagttagttgcatgcttagactagaagttccataagggcatggctttgttttgctctagactgtacacatggcagtaagcacagtgcctgacattttccataaacatttgtgttttttgtttttttagagacagggtaccactttgtcatccaggctggaatgcagtggtgagatcatagctcactgtaacctgtcactcctatgttcaagggatcttcccacctgagtccctgagttgctgggactatagtatgagtcatcttgcccagctaatttttttttttgtattttgtaaattttctttagaaaataggtcttgctatattgcccaggctggtcttgaactcttggcttaagcgatcctcccacctcgttttcccaaagtcatgggattacaggcataagccgctgctaccagccaaaatttcttgatggaatgaatgaatgacaagttttaggaaaaagtttctaaatattattttcttgcagactgctggatttaaggtttatttttaaaaattagaaatgtcaggagatgttgcttccacatctcggataggcatacaatatatgagaagcaatttgtattaattcatgaatttattcatttgataatctagctctctctagtccaggaagtgtgctaagtgttgggaataaaaagatggaaagaaactacccccacttgccttcaaggaagctacaatctctgatgggaagccataaatttggttaaaatgacaaggcagttatacatatatactgtggttggagataataaagtctatttttagaagaaaagtgctctcacagtaattcagcttacaccttttcaagctagtacttgccgtaagaactaatgtctccttgaatattccatcaatatgacagtaaggtttgttgaaatgtaagatgtgtttgacacatgaagcctcagctgacagaagaattaagctcacctttttgtcctgatgagtaaaaatgttctgagagaaaaattgtatttcatttgtaggaagatttgggatatactttggttcggttttgagaaaatatggtgcaataaaaaaacttaagtaattaccttcagagtaatatacccatttgtttctctcccaactaatagtaagaggagttttttattgctgcacttatcattttttatgattcttttttgctctaggtggagatgacagagcatacctaaatacaaaatgattttaaagtgtactggtaaaatgtcttaaaacatcttctccctcagaggacttcattaagcaaaattgatttttgtaataaaatatttatttattagaagatggtagtttaggcattttaacccttgaggaaaggccattagcatatactgtactccaaaacaggaacactgttatataagttactttttaaggcttgaacaacttggattagagccctgtatcctaaagagccttttatttacactcaaatttttatgcatgtcattataacttatgatgatagatctgaatttccaggtattgccaagcttgttataaactgacatcaagtgctacagctgacttactatgggtcccattaatcttagttgcaaagatgcgttaataaagttaacactcactggctcaatagcaaatggaattccctcatctcagcttacaaacagataaatcatcatctgggaggaagaattcactctgacttaaatgattattctcaaggatttgccataaacctagtacaaagaaccaaggaggacactaaatgctgcccagtaggactggggttttgcccagtacgactggggtttgagccaatcttttcttaattccctatcaacatttttaagatatgattgtgattatttaaaaacaaacaaattttttttaaaaattaaaattactttaccgcataatggtgaaatgctgatgtgatgtcttttacacaagcctggttaactatatgctaacagcattgattaagctcagggaccacgcttcctgtgtcctccagtgagatgaattcttgttcgaagacccccaccaaactcttgccatactcgggtgccagaaaatctctctcagaatggtggaggggaagtaattggtgtggagttgaagcagagacaggcttaccctgcagttgaggaatctttggaattagggccctcccttgtacgatgccttccaaagacccgggaagacttactagtatctccggttgattatatatttttctaaaatttgtaaaaataagatttttgcatttgttttcataaagtagtcctttaaagtttcgtaagctttagacttaataatatctaggtccgctgctgggatggggccaagggatctaagaactgcattgtactttacatatgattgaagaaaaattacttgtgtacatcagcacttgaatgtgagtctcacgtagaggggtgaatgtctttcctgaatcacaatcctccatggcttaatatagacttgaaaggactttgcccaatgtttataattctgtttctaaatttatggagaacatcttggtactatttttttcctttactgtttaacatacaatactacacaggcagtacacatccactgctctctcctgtaacaggatggttttgcacattacacaggattccctgccaccccctgccccccgccattaactggactgtacctggttaaaatttctccattctgaaaggtcaaggtttctatctcctctcattgcatttgaacagtaccaccaccaccatcactgatgcaaaataaccttttcatcaagacattagacactataaattcttaatttttatttttatgtaaactagctctaaagtctagtggcattatttactaaaattcaacaaatgaatttctgaactgattctccatgagcggcatgctgtcttgtttattaaaggagaagagacaggtagaaggcaggaatggtttaggcttcttctttaaagcgtttgtctgtaagataaatattagaagatcttcagatttcttttctcaatgagcaaatgatacagaacctctatttgcttgctcaggttttattggcaattagaaaagcaaagatcaaacaaaggaaaaaaatcctagagaattagtaattaccaagcgttcaatgcagttttggaatgtgtgaattttaatatataggtgttccatctgaggttctgatagattcttagccctaaaggagaggtctgctaagtgctttactgactactaaagggggtctgtgtgcagtgtctggagaggctacaagttcagagcagctgagattcagaggtggcttgaccaaacatgctggtaaatgtggtgattaccagattttctgactctaaagtttattctgtatttactacttcatatattgccctttaatgctatcttgcaaaggatacaatcgagtgtaatgtgacatagaaaagtgtaagggttgattttttttgttttgggggtctctaggaaaaggatgaagatgtgtaaaagataccttaactccaccaagaggggctgctgagttggttgtgtaatggagatttatttagtcatcgtccttgagtttctgtgtaacctgggtagaaagagagctctgagaacacaaaaagatggggtggagtgggatgtaagagctgaatggttgtgaaaaataaaatgcattaaaaaggcattaaagaagacatagttatcactgaaaggctagttaagagggtacttctttttttaatgcatttggttgttatacctctttatatcttgtaaaatattatggtaattgaaataagccattcacagaaagacaaatgctatgggatctcactgatttgtggaatctaaaaaaattgatatcagtagtagagagtagaatgttggttaccagaggctgagcaggttgaggggtgggggttggggagatggtggtcaaaggatagaacatttcagttaggaggagtaagtttaagagaactgttgtagaacatggtgactatagttcataatgttttgtattcttgaaagatgctaagagaatgggtacaaagtattctcaaacacaaaagtggtaactatgtaagataatgcgtatgttactgagcaagatttaactatttcacaatgtatacataatagttcaaaacatcattttgtatgtggtaaatacacttttatgtctcaattaaaaaataaatgtatggctgggtgcagtggctcaatcctgtaatcccagcattttgggaggctgaggttggcagatcacttgaggtcacgagtttgagactagcctgaccaacatggtgaaaccctgtttccggtaaaaaaaaaaaaaaaaaaaaaaaaacaaaaaaacacagacaaacacacacacacacacacacacacacacacaaaattagctgggtgtggtggcatgcacctgtagtctcaacccctcaggaggctgaggcaggaaaatcacttgaacccaggaggtggaagttacagtgagtcaagatcgcaccactgcattctagcctgggcaacagagcaatactctgtctaaaaacaagaataaataagtaaattaataaagatatttcttaaatgtttgaggcaaccacaggaagttaaaaggtgagggcaagtcatttcagatatgttggaactgagttgtcttggtgttttatgactccatggctttctctttgaaacctctggtagatggagattgtcaagataccataccattggtctgagaatctagcaagtaattagtcctctttcattaagaaaattattcacaggaatctttgatcaccattcatggctttatacacaatatgttttcatgaaaatgaacagtccagcatgagttttgtttgttctttttgaatattaccagttgatagacttgctgagctaattgaaaggtaccaagccctttacctatgtggtcttcatttaatatgtatcagattaagggacatggtaatctgttattcagaacccaaatatcttacaaatataggaaaatattcctttttctatggccccaaactcgtgcagcaaattttctttttgcgtctgtcttaaacagcagttggtggaagctttacaggtcttattgttgaggaagtgactttaaatttttattttaggcaaaagcatctgcaaattaagactgcggaaagcagcagtgagaagatcctcacagttctactcagttgggcaattcttcactactctgacaatttaattgggtgtaaaaagaaatggcaattaaaaatcaagagctttaagtgggacaacctaccagtttcaaagttagtgatttttttaaaaaatgagcaagactcaaagacggtacatctttagttctctagttagttgtttcctattgagtatgttctgtgctgaaattgccgtatcagatgtgcctttcaatggcaacttttacaagagtctaaagataaagagaagttgaattcacccttttatgtacatatataaatacacttatagaaatacttatttttaagaaagtttatctactcaagagtttcattttaaggatttttagactctttaaattcaagccttttggatttttaaaatcaagactgtaagacttaaaaacaaagtagttttgtttgttcttttaagtaggaatgaaatcagtattgcttatcccagtacttagacaagaggtgctacagagaagggactcaaatatgttgctgaaataatacatgtcagtaaattttaaaagttgggacatctaagtgacatatctgatgttgattgtagcctagtaatcaggaataggaataaattacttatgtacatcaggttttgcacatccacttgataagagttataagcatttctccaaaatgagacagcagttctctctcctgagaagtgcacaaatctcagctgcctctcagatcataatatgggtgcttcatcgaccaaccctcatcagagacactgagtagacatcttcattctcccagccttctttcccatctttcttctctctcttccttctttctgcaagtattttaggtaattgctgttattactcattgatttacttcacatcccttgacccatccaaggttcatgaactctcagtgtattttggtttatatcaaatgaaaatatatttttatctcttatagaagagccagattgggaaaaaaaggatttgtaaataagtattttggacaacagttatagaaagtagagtacggttgtactcacaggggtgttcgaataaatgccattttatacactgataatccccgattaaaccactaccaactgaacttctatatgaggaaatcagtgtgttctgtgccaactgaaggtctggatgagtttcagcttagcctctcatggagggcataatcacttcagcaggattaatagcatagttaaattattagtatttttagccagagtaaatcacatccaaaacatctaagaataaaactgtctagcccctctgtaataacatcggcagtctttatctctcacttgaaaggtagttttgtatgtgagatatgctctgaaagtagggtatctattgtagtagctttcaactttatgaataagattgcagatatgagagaaaaaccacaatctttttttgataagaaatagtgaatgtttctcacatttgtcatcattaaaaattctgttaaccacagaccacggtttattatctaatctatggttatcattctttattcagtctgcctagagtctgaagtaagggatccctgtgttcagttttgaaatacttctttcctttaacacatgggctttgaaattttatgaagacatggtagttatcaaacttgtaaagcaaggtgttaaatatttagtgcaaaatgaagttatgaagaccatgtactagatgaaattttaaaggagttttcctctagctcatctgccatgttacaacttgaaaagtctcctgacatctcgacattcccataagcttagtgtggacgcttttgtctttctgataagttcattggcccgttgcacttcaattgatttgtactgatggtccagtacctaaaaaagcctcatgtggttagaaagtcaggatatgaggtttggtggtagagtgaattatgtgtcaatagtagatcaacaattcacttgtatgactttaaaagtgattagctaactctcctttataaaatgtaaaaactttcattcataaatttctttttaaattttggggaaaatgtctgaataatagaaaaggaattgttttaaatggtactaaattatcaagattattttccccatgaagatgttgttcaagactgtggctgtagcacagactagctgacatatattgatatttcattgaagctgaaatatatattgatttcatgttgaaaatatatggacaaatctctttagaatgcaagaaagggacggaaattattacttcctgataaggacaaatttattattggggcatgcattttcctctcaaaatttttttttctttttaatgtcaaatcaatttttttcctaattttaagttagaatacagctattaaataaagacaggaaaagccactgagtgtatataggtgccatgctggattttatgtgtacgaaattcacttagaatggttttgttcttattagacatttttacccttgaggctagctagtcttttaagcaatgtgaactaatgcttctaaaaacatataattcaccttttaaaaaagaggagtgactttcctcaaaacaccatgaaaggccattgtccacacctaagaggacaaatgaaattaaaatagacctaatttagactgctctttcttcatgtttaaatagtggcgatagcttactttttctcaaagtaagcacacttgattttgcatgagtgcttggtgtacttactatgccctccttgaaaaatttgggccataaggtttaattgcatgctcatcaagcaaacagacttggaggtatattctctgagccgtgggctcccacagctcccattaacgctaatgggagttacacatgtgtattgaggagagaataatatagcctttgaagttggagttgctaattgagtgctttcttcagctgtgctcagcttcagtggctaagctgagttagagtggtctaaaatgtcattctggtaaagcccccagaacattatcaaagcaggttggcagtgaaagagacagctaaaaagaagtctttctcacccctcagatggagaaagaattagcaggccaaacaaaagaaggagcaaagaagtctcaagagtgggctctcctttctttaaaagtagcttgagctgatttagttcagaaagtgggaaaataggaagccctcttccttggtggagttacttgccatatgtagattactttttgtgaaatatgaggactagtcagggctaagtaattgtccaactctgtcgtagactttggctaacagatacttgttcctgaaagtgaccggatgtctgtcattttgtcttgtgtctcatgtcttttgtctcattttgtcattttgtctcatgtctaaaggtccaagatcccaatgtgccagatcccttatatgccctcttatttcttgcataaactcctttgtagtagttatctttgcaaagatatgagaagctgtaggattctacattgtagggctctacataaaaggaaaatgaaattgactcagtcctaaagagtacttaagtgattatcttctctatttcagtctaccctcatttatcctggccttccttacaacattcagcattaatctgtgtggcatcttatcaaactgaatacaggcagggaggtcttttactatgaataaacctatacctggtcatgggatgatcaaacctctgaactcattagtctcatttgccacaaatgcataaactggttgccttgtttgaccttagctgtgactgcatgtgttgggcaactcaaatattttgccactgtatgaaatggctgaaatcaccataagtattgacttggaggttacaaataaactttagcaaataggtgaattcacaaatatgaagaatgagggtcaaaaagctcagtgtaataccattgcttctcctggaagcatatcttaaatgacatttaccaataatgtattaatcatgtcatattcacatctgaatgacagtatattaaaaataacactatatcaaataacagaacaaaactagagaaactcatattctcactaatagcctcccagacttaccataatgtgaaggacacaactttactattttatagaaaaaaaaaaaactgcaagaatagcgatactcttctttgataagagctagttctaaaatgacagactatttattcatttaggaaagttcttgcagaaaagacagttgggctgagaatgtgaaaatgtaattctcctggtccctcagggtgtaagaaaaacaactaaaccagttatgaaactggtggttgcctctgtggactgtcatgtagaagagggattagactcattttgtgttcatgcagacagccaaatcaggctcagcgagtggcagatttttggattggtcccaggaagaactctggaatgatctcagcttcctgaaaattaccagggcaattttaggaggtagaggtgagtgatcattttctgggggtgctagagaggcaggagattcaaactttgggtaaaaaacacagcatgatgatgtcagagagtctgtgatgctatgatattttaatctgccctttattcccacttggatttatttttagttttaaaaaaaataagtcagtagcagaatagtctctcaagtatttctagatatggttgaagtgctctgtttcccagaaggaaggcaaagtaagatattataatgtttacacccttagcattaatgtcagggatagtacctttcccttccccttcctgctctctcttctagaaatggaagaggccactgagatgaaagaatgccatttctcttttaaaacatttgcagagtaactttgtcttaatctacatgtgcttttttatatttgttattcagtctattcaaaagtaacattctttgaatacctgttatgtgttggaagtaatggagagctaagacatcctaccctttgcccagcacgcacaccaaatataagtaaaatataagtctttttttactaatgaataaatgttagggttttgttattgacagaatgttgaatataaacacatgaaagtactaactactggtgttattaataatcctttcctttttgtaagttttaatacctaatcagtctgaaggcacggtagtagttcataacaatgccatacccaatcacagaacacatcatgatttaaactaatcgattataattttaaataatcactctagaggcaattgtttaaaacatgctaatagtcttgcataaaaaagaatgtgaaatgtcttcattgttctctactggagaaaagttgaggcaggtaccacttgtatgtgggtggtcccaccagcctcagggtcccccagaagttgtcatcctcttctcacctcagtgaacatccctccaaaacactgcattcttatttcagtcaatagtaccgccatccttctccctgtgtccaagttcgaagcatgtggattttcattaacttattcttctgtcttgcttcttctgaccaatgcattcccatgtaataactgacaagtgacccttgtgtttttccttaccttccgatttgcttctaacaccttaattgaacagcttcctttctccattgtacagcctctcaaatgatctatctacagtttcactcaaacacctccacttaattcaggtacagctgccagttgtatcctttgcctatagactcaaattcatacatttaatcttggcctttaaatgaaatgaacatttttcagtgcttttgaattgatatggccaaacatacaaaagcaaacaatggaatatgaaatataaatatacttactggatgaatcgtgtaaaggagatatgttttgtaggatatttaggtataaaaaggagtagttaacattgaaatatcatctttctggaagttataatgaatgctattcctgcttcctttccttttgttttgttttgttttgttttgttttcttttcttttcacaaggtcttgatatttaggtacaaaaaggagtagttaacattgaaacatcgtctttctggaagttataatgaatgctattcctgctctctttccctcccctcccaaaccctcccctcccctcccctcccctcttttgttttcttttgttttctcttttcttttcttttcttttcacaaggtcttgatatttaggtacaaaaaggagtagttaacattgaaacatcatctttctggaagtgataatgaatgctattcctgctctctttccttctcctcctctcttctcctctcctcttttttcttttctctcccctcccctcccctcccctcctttcttttcttttctcttttcttttcttttcttttttcttttgtcttttctttttttcttttgacagggtcttgccctgtcactcaggctggagtgcagtggctggatcacacacaggtcattgcagcccagaccttccaggctcaggtggtcctcccacctgacccctgccagtagctgggaatacaggtgcacaccaccatgccctgctaatttttgtattttttgtagagacagggttttgtcatgttgcccaggctggtctcgaactcctgggctcaagcaattcaccttcctcaggcttccaaagtgctgggattacaggtgtgagccactacgcctggccctgctctggtttttattcccctttctttccatcctttaccccatgttctggttggtcacttccattttcctcatcttttagtgacgtcatcataaggatagctttgcccaactggcaagtcctaccaatatttgtgatagttaaaaaaatatatatcctctgattagaacagagtcaggctcatttaactttgatattcttgtttaacaaatgaacaatcagctttttggttattttcttactttacaggggataccattaagaaaaacattctcagttgtgaaaagtaaggaattacatctattttagtgattataagaaatgtaatcttttggatatgttattttttcatcacgtgttttgagtatcctagtatttatgaaaagaataaaccataaatttagatggaggaccatataatatttcaacatgaaaatataaaaccataatggttgttgatgtggaaaatgttaatgtaattagctaggcttagaaaaacttactttcagcatgttagcagctggctagtaaagttatttttctggggcttgttgttgccctttcatctaaaccagatcacgtcctgttgtatggtttaatgaaatgattatatggaaaataaaaagtgccaggaaattaaagctcttctaaaaactaagtagaataacacagcagaactagactggatgaaataatgtccctgtaacttcaaacagtgaatgaaaccacagtggtgcaccaagactggcatttggctattgaactgaatatttatgagtaaatactttaaaggtcagtctgtggtgcttagcatgcccactccttgactttcgcagcttttttgctgttcaaatagaatggtttaagttttcatttgtctaacagagaggaaagaagcatcagcccttggtttttagtttggattcaggtatctataggagaccatgtggtgtggctgggacactgggctgggcaccagaaaaactaggatcccatcccagaatcgacactaactagcaatgtaatgttgaacaaaaaccctaggctttccagtgcctcagattttttcctctgaatactgaaattgataatagccaccatttattgagtatttaatatgtgccgaacagtatgctaagtgctttacaaaaaatatatatatgtgttttacttttcacagcaatcctgtgaagtattatctctttgaaatagatgggtgcactgcagttcagaaagagcagtgtttgcacaacaacaaataataatgatgatgataaagatcacttaacaaaaagtgtgctgctatgccaaaatacttaaaatgtgtgctactcttaaaccactttagtctacaggttagcccatttaatctcgatatcagtcctgagggataggtagaaaattagttctcccactttactaatagggagcctgagctacagtgagccttagtagctcagctcgtaatcagaacttaatatgaatctaatcttgtcttattcaacatttatgttggagtttttaatgtaggaaatatactgaattttttctcctttatattatttgtataaggaaaaaatacggttaaaaggaaggaaaaagtcaaatgattaagggaaaacctcaaaatactcaagtatcccttccatttttatgaattatgagcaaatcatttattgcagggtaatttagtacctataaccagctattagtaaaaataaacttgagttaaatagtgatgttcaaatgtggattttgtgttgatttataatttttatttaattttactctttaagtgccctgttttatgagtggtgctaaattgctcctgttctgtggtttttgtgtatggatgagcagagatcttcacatggtaacacaagcttccgtggaatgcacatccacctgattcaggcatccagttacatacttgtcacatattaatttagtttattttcatgatacttctatcataagggcaatgcttttcacaactcatcaatctaaaataaaggtaagaaaagatgacaaaaccacaaaacatgaaacagagcctgaccttgaagaaactgacttcacatcccatatccttcctatgctctgtgctgctgccctttatggagttacctcctaaacaccctgtccagtgctgccacgtgaacacactcaagtcctgggatgcagccaagcatatgtgaaatgataaagttaatatgtctcatcttcccggaatatcagcttttctcagagattgaaggaaaacaaggattatttaatattaaaattacattcattgaggagacaaacgtaaaattctcattcacttttaagatgagacaagatgtgagaattttgtttttgttgatggttgtgctgcactttgcccacagatgactctggtcctctgaattatagaggtgatatgtgggaaacactgagaagcctgtttttcacctggttgcttctttgcgaagtcctgtctgagtctcatcactctgcaaaatgcctcaaccacttgacttgtgctgattcactctctttgggccacttatcctttcccaattgtagagataaagtacatatggcccgattcatgaagatccctgaagagaaatttccataaacccctccagaattaagaaaattaaaggagtacttctattcttccttttttatttttttcggtgcattttcaaagttctgtttacatcatccatttgccgtcagtactctaatggcaactgctattcatgtactaaacgccgtgattttccagtattctggctgatttgatatatgtggacagttaattcagattcagattccctgctgccctggagcaggggatgggtcaagccataagaagatatgggagagacactgagagtctctgagtggttctaagtgactctcttggaatataccagttgctttagatttgagcgctctgctgggtgaacagggagcgctaaaatataccacagtgatgctttgctaagtggcattctagagtttggaaatacctctcgttcttcctatctaatctctttattaggaataccatatgctggcccttttgtagtataagcaaaatactttactaaaattttataatgtgccgtttttcatccctatttcatgacagctgaactggatcatccaagtcatgaaattttactttggaacttgaattagttcaactatttgtattatccgggttaatagggtaacagtaatatcttcaattcaatatgtaatgtatagatatatcctatacagaagtctagattaaaaaaaaaaaggtttagaaatactgtgtcctattctcagctatatgcggaattgaataatggaaaaacagtgtactgggttatcggattagaatgcagtgcgtcgtaaaagctgacatcctgtaatcacagatgtttgcagcccaagtgtggcaggcagcctccatgttaacttgaatagagttatatttgacatgtaaacatgtgacacaagaataatatttgtttcctataaagtccaccataatgtaaaaacatcccttaaacttattgctaggttgccttaaaattatatatcctagatttgcaataaactgtaataaaataaatatttgtgtttatttattaagtgactattctatgaatctccacgaggtttggcatggcagctctagtaggagatggtcattctccattgcaaatggcattataaccaggggccactcccattcgtttttaattaattaatttattttttaattttttttccgagacagaatctcgctcagtctcccaggctggagtgcagtggcgcagtcttggctcagtgcaacttctccctcccgggctcaagcaattctcctgcctcagcctcctgagcagctggtattacaggcgcgtgtcaccacgatcagctaatttttgtattttttgtagagacggggtttcaccatgttgaccagactgatctcaaactcctgaccttgtgatccacccacctcagcctcccaaagtgttgggattacaggcatgcggcaccgcacccggccctattcctacttattttatgaattttttaatttgctgtttatatgcttacagattttaatagacaaaattgtagatacttaccatgtacatgatgtttttaagtatatatacactgtggaatgactaaacctagctaatttacatatgcattaactcacctagttatattttttgtggtgagaattctttatatccgccctcttagcatttttcaagaatataatattaactatactcaccatgttctacaatagatctcttgaacttgtttctcctaaccaaaattttgtatcctttgtccaatgtcttcccaactattccaaaccctgcagccccaggtagtcagcattctaccattgatttatgtgtctgctccagcccccattgggcttctgttgaagttaagcattcaagtaaggttttctttacctaagactattgtcctgcttctacagagagagatgcccaaatttggtcacacaaaaaaaactgtgacagatcctggattcatttataatttaagcaatgtgctttgtgaacattttgaataaagtttctgtaacttaaaatgtggcaactaaggaggtgagagagattattgtatagatataaaaatgaccttcctctagcataaaatataaacaaaatatgaaaagactgtttagcattgttttcatgtgcagaaggggtggaggtgtttaggagaaagggagaaaggcagaatggatttcagaatatcaagcatcatgtagtgaagtaaagcttggtgccctaaatagcatctggggttggtttccctccttcaacagttacttatttactccctggaaataaattgaaaacttatttcatctcttttatacatcatatggtctggattcttgatgcttgcacataggaaacgtatgtctctgcatatgcttcatgtctcttcatttgttaggttgagaggcccctgtaagatgctattcacaggtaattgattttccttctcttggcttttcttccccacatgaaaggactagactgtgatcttcctcaaggcatactggcattacattagcattctctaattgtagaatcatgcctattggctactgtgagggggtgtgtgtgtgtgtttgtgaatgcatgtaaagacagttatttggacacttttccctcctttcttttccttcccttggaacctccttcctcctttcctcatcactacattccacaaaggaattcctggagacatgccttcagagagattttgtccacaattgtatgtagatccattcattgttttgtgcttataaagcataaaatggaatgaaataaggatccttttagtttaggttctttaggatgatatagtatacgatgtacatccccacccctcgacacccccgctccccgaaaaataaaaacaaaaacaaaaaaacccaaaggactcatccatgctgtggcacacctgtgcttctgatttacatgctacaaatcgtatcagagaggtggctgtaatagctggtaggatgatcaatccctagtaagtagagtatgcttatgttgccaacttccatagagatgagcagaaaggcctggaagtggtgtaagtctgttgaagcacaaggtaatggcatgagtgctgaagggaaccaacgtgcactgatgtcacatcatgtgcaaaagcattctgccaggtgatttaggtacattctcctttcatcctcacagtatcttgaaagttttatattatccctatttatgtagagatggaggcttccagaggcttagtaacttgcctaaagactcacagtaactagcccatctagagtaaacccatgtttgttttctgactgtaaccactgaggagtcttcactgaagctcttctcttttgtgaaatgaaagaatccgccttctttgacccaatggtttcaggtcatctcaaaaatggttttggtgaggtagaaaatggctctcagttttttttctctagttcggttgaatgagctcaaagagcaggcaaaactatgataatgaagttaaattcacaacccattaaacctaagccaatagttaagtccaattatgcttagcacttgcagcttacataaatattaaattgtcaggtttaatatacttcaaaatttgctcacccacatttttccaacttcattattttaaggtctgctgaggcatattatgttggcaaaatgctttcttgctgaagaggttgatagaagaagagtttatttgtggcagttgggttgggagcatgggcagttgcacagtttgataggccagaggttaccaagagtgattcaactaatagattaaaagatggcagtttatttttgttttgttacttaaataaatggaaaacccagaaatcaaattgctattgttcctaaataagttgcatggaaaataacttgcttactttcccatacctcctcactggatatttgcacctaaatgtattgcagtaatctcaggctatacatgttaagggatgaccttattttctctcccattttctatattttccatctcagttaatggcatcatcatacccgtttatgaaagcctgaaaactcacagacttacttgatttctcttttcctccttattccaccaaactcagtaggcaatagcttaggagataattgattacttcagaaatgcatcttaaatttgacctcctcttttcatgctatatttatctgatttagcttgagtcccccttattgctttggggatttttgcaagggttttggcatctgttccttgactgtccactttggtatcattccccagtggctataggagaaaaccctgaggcagtatggccagggtcccttgctggcctcatcttggacttacccttatctgatgtaatgtacttcatgctcttgtcaggctgaactttccactcaaaaaatatcatgctgtgcttgtatttctctgccttagtaagtcttcttcctttcccaccctatctgtgattcatccagttaatgtttactgggaaatctattcctctgaaaaagatctagctcatatattacttccctggctattttctgagatctaatggtcctctcttgtgtgccactgtggcactttgctctttcctcgactataccttaaagcattgtgttttacttcatgcatgggtctcccctcctctcctgggaggatcttgaggttagagactatgtcttgtttttgagttccttactttacaacaacagtactgggcacatagtagattgtcaatgaatgttaattcattgacagtatgatatgctggaagctgaagtgaagaattaaacactctcagcataattgtttaattttggatatatgtagttgtgagaatagctatattgtgtttccaggacaggtaggagaaactttgaggcatggttgataggaaacacattatagtgtctaatgctttttaatacaaagtacatgttttcattgtagcctttcttctaattagttgggcttttccattaagggatttcactataactaaattgtgaaatatttgcatgtggaagcaatgtataattgtttgtttcctccaaagtcctgaaaatatttctaattaatactttattattgatagattgattatatcaatggataggagagttaggacatgtacttttcatcaacttcccttataagtaacaactatagttggatttatattctaagttgattaatcgtctaactgcttgctgaattcgggtgacttctattgacagcatctgcttctcatataaaggaagtatttaacttaaaaaatggtgcttggggtgctaaggttcttctttttattcacgttataggaaaaaagttctcaaataagtgagaaagcaaaccgttaaggagatgtagctccagtgttacaaagtaaatacttttgaaaccactgactggagaaagctgtctatagggccaaagacccagcctttctactcacaccaagagtttaaactgttgtctaagtacaatataatatttaagaaaacttagatttttttcttttgcaattacaataaaagcaacctttaaatccagtttaatctaataattgccttgtagttccccagctgatgtctgtaaagagtaatgaatgattttacaaagactgaattaagcaacttataaatggtgaaacctctgaagtcaatgcaagtttattaaaatcattattagtttctggtaaggattatagtatacttccatgaatacaaatcatcttgcaggtaatagaatactacttatgattaagaacctctgtttgaaacctaaaaattgattaagacaggtttagttgctatatttttttgcagtgttgttggaatctcttcatcttccagtggcagcagtctaaggaagactaattcagtggtgggtttgactaaaggggattatatcgaatgagtttatgcagatgaatgaattagttgaatgagtatatgcaggtgcatagagatggagatggaattaaagctaggatacagatatagaaagatattcacattcattttgtgtatatacaaatgcatatatatgcacatgcatccatattcatttatttatgtaactgcatgtttctcttagtttgggcatggtgctgactctggaaaaatattgatgcaggttgagttcattcaagttgacagtcttttctattgacgattgtctgtagtgtctgagcacatgagactattacaaagagatgttgaaggccgttttggttttatgtcagataaaaacatgctgattcctgctgcagttttgaaaaacaattttaaaaattaaatatttgtttgtatattgtctttttacacgtttagggaattcatcatctcatgaaacaatggtctctggtattctcattcctgataaggctcatagtaagtttatatcatgtggcaagagtcacagttgctgttgtcatcctatttataagtggagagaagaagcaccaccaaaggcttatacagacaaggtagtgtgaagtctcagaagccctgggcaatgaggaaggtgtatgccagcaatatctaggggtctttacagatagatgtaattgtaaacaccttaattgtgaaaacatgttcacagttttctatttagaactattggctcaggtgaaagatagaatgctaaggtcgtttatagaaacacttttctttcaccagtttattggacattgtgcctgtaaatatatgcagagggagttcctgtcatgttccatttttccctccttttcatcttctgtttggtagcacattgctaagtgtaagtgactgagtgtagagatggagatctgatatcttctacccttttctgtccttgcagtgcactacattgggtcaccattgtcactacctataattattttcatctccatactggaggtccattccaggctggttgtgtaccttttgtacctagattccccaatctggcacaatgactaggtgcttgatacatatttcttaactgactaaattaataaatgtatggttttctaattttccttttccaaccctgataatatgtgcttttgatcatttgaattctatgctattcgtttaagaatttactctgtgacaacactgtcaatcagtaggaaaaacaatactgccatcagtagcatcccaaccccaatagcacagtggttcttggagacttgtagatgttttgccattttggtcttggataggctccagaaaagttctgtgcattaccaggcagaaactgttgttctcttgccttactttctcccaaacaaatggagtctgtctctgtgtgctgagctgcctggagccaagggtgaggtcatagaaaaaaccctgtggccatcaccactgggactatgctgtgtcatagctgaagcaagaatagcactgagtcttgcccaaggcctgctgtaaccattacctggctactatctatgtttgctcaaggccatagggctctacagtctgcaggtggcaaagccatccaggccttcttttaagggtggtgagttctgccaggcttgtggcagattcagagatgccatctgggagccagggactggagtcaaaaactttagaagtctacttggtgttctagtctgctgtggctgggctggcaataaagccatatgacatagtgcttctcactcttcggtcccctttccacagatagaggaacatcacaccatggccaccaccacgggcccatagggagtactgccaagctcctgccagtgttcacttaaggcctaaaagctcttcagtcagcttgtggctgccaggactgggactcacccttcaaggcgatcagctctttggcccagggcaggtctagaaatgccatccaggatgctggggacccggagagcctgcctggtgctttaccccactatggctgagctggtacctcaggtgcaagacaaagtttcttttttatttttccctctgcttttctcaagcagaagcagtttctccccatagccaccacagttggtaatatgatggttctcacctgaaaccagcatgtgtttgagacttacccaaggcctgtggtatattacctgggtattactgctggttctttagggactaagggctctttagtcagtagggtctggattctgcctggactgggtcctttgctacaaggcagcaggttcccttctggccaaagatgtgtctagaaatatcagggacctggggcctataatggggacctcatgacctgaccagtgccccatcctactgtggctgtgtgggcatccaagatgcaagacagagtcctctttactctttcctcttctattctcaagcagaaggaaagggtgtcttttagagctgtgagctttgctgcctggtgttgatggaggggtgatccaagcactcccttaactacccaggctggagtgttagtaggttacatgcccctccagtccactggccgtgagcccagtgcagcactaggacttgcctaggaatttcagtatttgtggcctagactgcccctggagttcacatacggcctcagagtgcttcagcctgtgatggtgaggcttgtgggaactcaagctctgactgctgggatgggcaatcccctccgtctggctaggccagtccaaatgccccctccatgggcaggtgtcggctgaatacagcctggttctgctttccactgtgagagggcagcactgagttggatgaaagcctcccattcactgtgctccacccatcccaagcacatagattccttacactaccaggctgcagccaggggatgggggaggggcagcgtgggcaattcaccactgtcttttctaccttcttcagtgcctctttcaacaatatgaaatcaaaattaggcactgcgagtgctcacttgatttttggtttctaccaaaggggaggggccggccaggcgccgtggctcatgcctgtaaattccagcaatttggggggccgaggctggtggatcatctgaggtagggaatttgagaccagcctgaccaacatggagaagccccgtctctactaaaagtacaaaattatccaggcgtggtggcgcacgcctgtaatcccagctactcaaggaggctgaagcaggagaatcgcttcaacccaggaggcggaggttgcagtgatcgcgccgttgcactccagcctgggcaacaagagtgaaactccgtttcaaaaaaaaaaaaaaaaaaaaaaaaaaagggtgggcgggtgggggaaagggccatcagtagagccctcatccatcttgcgttcccccttttgttttctgtgaattttgtgttttgtaactttctacttttgaattaagaaaaaaaagtatcaaaaaaattcattactccagagttattgtttgcatcagttttgcaaacacaagatgttccataggtaactgatgcttcaatgacttttgttttgtttttacttttcagaagagatggggtgcattcagggtgatatagacagatatggccatagacagtttttactttttgttttagtctgttcccacgctgctaataaagacatacctgagactgagtaatttataaaggaaagaggtttaactgactcacagttccacatggttgggtaggtctcacaatcatggtagaaggcaaatgagaagtaaagtcatgttttacatggtggaatgcaagagaatgtatgcaggagaactccccttcataaaaccatcacatctcatgagacgtattaagtctcatgagaacagcttgggaaagacctgcccacttgattcagttatctcccaccgggtccttcccaggacacgttataattatgggagctacaattcaaggtgagatttggatggggacacagacaaaccgtatcatttttcagttaaagttcaacctttgtctccttttccagcaaaggagcagaactctatacactctgtatcttttgctattttgcttctacgtcttgaaatgtctagacttgggattaatgattccaacttggctcatagattgataacccaagcattttaactcgttggaagacagcatttctctgagaaggtcagacagtggtttcctttacaaatggctcttccaatgaaagatcctctcccattcatgatgaaggatactttttagtgctatgaagtataagcagcattgtacatttgattggtttttggaaataattgcttgtgttaaaaggcatgatctgatagaaagaccattttcctagcctgttttctaagggtcaaaaatattatgctttcatattgactgattatatgtcctttattgtttcagtactttgatacttttcagatgctgggtttatttgtttatttatttatttatttattttatttttttgagacagtcttgttctgttgcctaggctggagtgcagtggcatgatctcggctcactgcagcctctgcctcctgggtttaagcaattctcctgcctcagcctcccgagtaactgggatacctgggaccaaaggagcatgccaccatactgggctaattttcatatttttaatagagacagggtttcaccatgttggccaggctggtctcaaactcctgacctcaggtgatctgccctcctcggcctcccagagtgcactggctatttttgaacaataatctcattgtagaaaatttggagaatgtatgaaagtctaatcatgatccagtgactcagataaatactgtaaacatgttggtagatgttctctcaggcttttctccatgcatatttatatgtttggctcttctctaactagtaaggggataaaaagacccctatcttctttagtaccaaaatgagagatgtttatagatggcataaaaagttattaatacatttgtaattttcttcaggatgatgagtcctttgtgtctttaaacaagttggtccaagaaaaatgagtacatttttcttttaaataataataaatatttgggatagtggattatacttgtcataggaggttaatgaagagtgaaaaaacaaatctgagtatttttaccaattcagacagattctgtatgaatgccaagccacataagtatttgagaatataagttacatctagggctcacagtgttcagggccatattgaataaagaaacacaactccttgggaacatcagtgagcatgaaattgatattgatttagagcccaacaaaaagtgttcagaaatctgaaatgtagttctaaatgtaaacttgaatgcattctgttttttatttgatctttccttcttccttttattttcactgttgtaaaaatattttctccttttttttgttttattttgatatttttgcttttattgtttgtataaatgcaaagattggtaaattctttgtggaacaaggagggtgtattaacaggtatatgaataattttaaaaaaagccaaagtagcactgaatggaaatatagaactgaaacataattggtaaggggaggaaacttactttataaaaacagggataggcagaaatttatatatttcaatcttattcttgtcttgatattttgtctcatttctttccaatttttgaggctattaactagaatccctgtaagctatttaaagtactaactcaaagactgctcttccagggttaaatctaggaaaacagaaagattccccctttaacccttcactttgggaataaatgaaaaggcagaattgataatggcagtcatttgtaacgcatgattgtaattttaaaaatgcgctttttttctgttacaattgatttatttgagcaaatctaccatattttttagtgtaattaatagaagccataaatctctgcaagctgtttctgttaacagcacagtaatataggaacatgaggttttaggatgacatcctgttagatatttagctaaaaattgtatgcaccatttattaaatgtgtcaaatggagtccaaccatagcaccttaaaaaccaaagctatcacaagtttacttagtttcccaataccttatgtagcaaagctgtttatcaacaatattgttgctttgtgttgcctagcttagataaggattaaatattatagcattgtttaggactcttaacacagattttattaaatgtagtttatgtgtctaaatatattagtactattgtatatattgtaaatacttccttttaatcaattataatgtattgattaacctgcagttccttaagatggccaaatgataatattgaaaccagtcttgtttttcaaaataactggacttttctttctcactttccgcattgtttctgctcctctgcaggcctcttgtcgtctgtttttttctttatgtgttaacgatgcttattctaagttcataaatagaaccatgaactcaatgtaatttacatttgtttaaataatgtagtatattaagcatcttttttatttttttcagatcttccccagagtgctttaaaagtaattattgtatttgtccacttgctaatttatttttgagactgtattataaatgcgtatatttatccatataatccatatatccatataatccatataatccataaaatccatatattttatgtgatggagtattattttcatattaagataattcatgatatgcaaaatactatattattttttcttgtattttatatcttacaatgattggtgaacctcacattaccctgcattactatgaattctatagttttatcaaataggatatattacttttgtgaaaaagataaatatgtttagaatctctgatacctgtgcctttaagacatattgaagcttttaagaaaatccttgatcagcctgttatttccttccaggaacttaacctatgatttgtagcgatatacaatggcataggcacaacatagaattgcatctgttgtgggtaactaagataagtgtctagcctactgaagacatactaacttacacctttaaagagagacacatagagcaggaatttttaaaagtcaacacacatggattacgcatcattactttttcttattaattaggctataagctcagtgaaaacaagagcaccttctgattcattattatgacctccaatacagtaaacttagtaaataattctaaagaagagtgtttattgaattaaactaacttttcgatgcacttcatgaatagcattaagacaaaactaaactttctaagcacaaagagtttatcttgatgctcttaaactgttgccattaactttcccagacattggtttgttatattacatatatatgaaagattatgtgactatacatacatatataaagtctacatgtgtgtacattgtttttctccactcatggcttatatccagataaaagcagtactaatttttttccctctaagcactgaatgcccctgtatggcatttaaattctaaactgtctctctcaacataggtatatggttcaaataagctttgattggctatatggttttgtatgtcaacacctggctgatccttcttgttttttaaaaaactatttttcagagtaagcttatcatgtgatcaaactcttctgccatagtttggttgtctgcaatcttttcacacattttgacttaaagttttttatttaatttgccataaaaaaaaaaaaaaaacaggtttaggggctgggtgtggtggctcacacctgtaatcccagcactttgggaggccgaggcgggcagatcatgaggtcaggagatctagaccattttggctaacacggagaaaccacgtctctactaaaaatacaaaaaaattagctgggcatgatggtgggggcctgtagttccagctactcaggagtctgaggcaggagaatggagtgaacctgggaggcggagcttacagtgagccaagtttgcgccactgcactccagcctgggtgacagagtgagactctgtcccaaaaaaaaaaaaaaaaaaaaggggttaaacatatatgatttcattctcatactgctataaagaaatactcaagactgggtaatttataagaaaagaggcttaatcaactcacagttcttcatggctggggaggtcccaggaaacttagaatcatggcagaaagggaagcaggcacgttttacatggccgcaggcaagacagagcgagagcgtcggaaggaggaacagtcaaacacatataaaaccatgatcttgtgaggactcactatcatgagaatagcatgggggaaactgcccccatgatccaatcacctcccaccaggtccctccctcgacatgtggggattacaattcaagatgagatttggatggggacacagccaaaccgtatcaaatgattaggtggatttttcaatatattgtggagttgtttgccaggatttatattatatatttgagttctgatgtttgtgccaaacattttaatattagagaatgattacagattcttaggagatctttgataaagtaaacttttccatttgtttgaaatttctttgtaagttttctattatagaaaagtgagataattaggatttatgtttatttggtttgatttttgtctttaaaaaacagcagactttggagtagaggataaaacatttaaagtaattgagtgtcatggagtggggattgtaaagtggagattggagattagatttattctgtgtgatttcacatgtcaaaccaatccagcaaaaaaagcaaacactagaattagtggaaattactgggcattatatattacatcaatgtagtgccttttctactattaggaagttaacttgggatctagagaagtccctatcactcatatcagtagtatatgcataactactatatgtgaatatatgagatatgcatatatatgtatcctactgggaaagacctcactaggttcccagggccagctctttgagaatcagtggtataatgaaatgctcagaaagaaaagatggaagttctctttaatcatgttgtatccatttcaccagctatgatggttctctggaggccatttgccaagggtgctatgatcatcatcaccatttgtgatacttgtttgctggttttagaagttgcattttccaaaatactaaacagctctttcattgaaaatctaccactcctcttaaggatatggcctcgaaaccttttatgatacagtgtttcacaccaataaagaatcaaattgtgagacatttctgctattaagatatcactgtctactccacattggtaagatgtttctccagctatactatgaggaagtaggagtttacaaaaagaagttaatgtcattttgagaagatctactagttatatctaccagttatatctccttatttgaggtctggaaacttgtttcttacttgaaattagaaatagcaacaacaaaggcaagcttacaataaacaagtgtgacctttcaccaggtctacgtaccttttgttccacactggttctgtaggcattaaaactgaatggtccagggagaccatagatatattatgaatttgtagtcaagcatcttctgtatcaggtgctgactttaccatcttaaccatccttagcaaaatttgacctcacaaagataaagataaacgccctcaagcaaggtcttttttcaatcaaatgctttcagttgaaaattttgtttcttttatgatttcctaacacttctgagaatatgactttccaaagaagtcctcatcagtgacagtaagtaagctcttcctagtttctcctcagccatcctttccagccttgtcttttgctgttcccctatttcttcctttcataccagccacataaaaacatcctgagcttcccaaatgtactgcccttatttatgtctgttggaaattgctttcatatttgtttatattgtccttcttgattctttctgtcaaacctctacctatccttcacgattcaacttaggtgctaccacctgtctttgacttcgttcagtaaagttagttatcttctcgttgagtctatattatgtaatagctgcattaacacgcagcatgttatattacaattatttgttatcttttaagcactaatttagtgaaaatcttcaagcacagcaacccttatgtgcttcgagacaccaattatctcaatatctgccactcagtaaccacgatattcaacctttgtcatgtgaataaagaaaagacatcaggaagcctgcttattattttggtgagacactttaaagaactgtagaatcaggacagtcagtatctcaagtgtgaatgcctttggtgtcgactgtaatcaaaatgaaagatgtagaatccttggaatttctactctgcaagtaaagagctgtgcacgttcccagagctattcaagtccttgtatgtcagtggcaagcagttactcacttaggagtcaactctaactccctataggccatatgcactattgttcattatcactgacacaccaggtgcttagattggttttaaagtttagtcagctaaagcggaaaggatattttacatgatcaagtcaggtttgtgtgagtgggttgaatttgggggtgtactttgagtctgagtagttgtttgaagagtgaaactttaagaagagctagaaggagggcattgagtttagctgaaagggtttagtatcaagacaaatctgtctgattaagtgtattgtcaatatgtcttatttttaatttttccacatagttcttttaaaatttaaatttccatgttaaagtcaccatattttgatactttttgaccccgtacattttatttcaaagttattttaataaatatatgcgattacaaggctggactggaattaattctgtaaaaccaacagctagctgccccaaatttattttttctctgtccagaaattcatgcagcttgagtcaaatctaaatttaaaggaagggaattaaacttatttatggccaactagctctttacactgaaggctattccgttagaaggtttacatagtgaatacagagttcacatttaaagcttgatttagtcttgtatcctatgcttaaactgaaattctgtgatatataagtgagattgctatttctagtttggtttgctctctaggctcatggaatggcaactctttcattactctcagacttggtaatttagccaactagacgtgtccttctgaatttgagcttcagaaattcttaagataatattcaattaaatcacttggaaaatgtccacctcctcctacattctttctcctcttgcttccatttttcataaattattctgtttgattttgattgcaatcaagcagtttatcttttgaaaattaaatccaacctgccaataaaaaaacaccttggatcagtgtatagaagtcagtgaagtcaaaatgaagttgaataaactctcccaacagaagagtgtcagatgtgtcttcctttgaagttttcaccattcacaggcaggagcaaaatatgattttcattattcttggttgtgggtagaccaaataatggccctgaccatcccactccaaatcacgactagttcctattctttggaaccttgtgatgactatgttaccctacaaggcaaagggaaattaaggttgcagatgcagttgatgttactattcatttgtccttaagtgagggagattattctgggttatccaggtgagcctaatgtaataataagggtctttaaattggaggcagaggagtcagtgtcagaattatgcaaaatgagaaagactcagctggcctttgctggctctgaagatgaaaaaggatcacaagccaaggaatgtgggcagcctctagaaactggaaaatgcaagaaggaagattctcccctatagcctccataaaggactgctaacatcagtcctgctgacacctcagtctaacccagtgaaactcatatgggacttctgacctccagaactgaaaaataataaatgtttttgttttaagccatcgagtttgtgacagctaattataacagcagtaggaaactaattacctaccttaattttagacagaactattctgtttggtttgtagctggttaaacttgcatgcaaatccctagtatttctatatttactatccatatgcctttgtgacccctgctcttcacaccaaagaaacattttaagaattcctttgagtcattcatttgtttgaaaacatccattctgttcatacctagtgccagttagtgaacacagtgtctttttggtttttgggttgcaagatgggaaagtagctacaggcttcaaatgtaaaaatataatctctaggaagagaaggacaggaaacttgataatcctatcacccataagtgaaagagactaaggcatgtaaaacttgattggttgcaactttctacccaccctctgataagtcttctgcacacttgaattttaggatatagcacacaaccatgcagcgttctccaaataaaataccttggaagacgtaattaacttagttcagaacaagtcattattattcttggatatccacacttatattacctccgcagagctcttatgtcatatttagaacttcattcattttttcttgagctattttcaaccctagcttaaggaagtctatatttgattcagatacttggaccatctggtttctattatcagctttaataaaatcaattccagctcatattatgactgtactatatctatacagattgtatagatataatatctatgtacccttaagtatggcctaggtcataatccttggaacctcgtgaacattgcaaaaaccgacgttcataaccccagaaatctttgttaccgaggttcagtcattattagttgaccaagtgaacgcaagcaatttctgttatttccagcataattttcttccagaaaatttcctaatttacattttccaaatttgcaaatatacgtttgaaattgaacgtagccactgtgagacttcagcagtattcactgcaatctacaaaacattataacaggttgtgtaggcacagttcaggaatcagaggaatgtgtcaagtttctcattcaaacggaagcatgactttgttgatttctgaggtggcagacgtgccaacgcaaccaagtaccaggatactatccaagacaggtttctggagaggaacaacccctgctgggaactcactgtcatctacagaaattggattgtgttctgaactccatgttctagtttttaagtcacaaatagcttatggtgacagtgaattcctactccaagtagtatcttgttttcaacatggttaattcagataattagaattaggttggaaggttttcatattttttcttccatgttttcttattgtatttcttgagaatacatttataaagaatcaagcgacaagtcagaaagtcgctgtgattatgcttaattgtttatgatttagttccagaattccaggacttacgagaaccatatctagagtattttgctacattaaatgttattgtatgagatgtgacttttagtgtttatcggttaaaatttgtacttatctgagaagcagaagggtatatgttgagcttcctgaagatgcttgtttggttggtgggttgattgatttgatcagcacagcaactcttcatagtgtaaaggttagccagaataaattcctgtaagaatactttctttgcaacattttcctttgcgctagaaattctgaataatgttgatggtatatacttatatatcactcaaaattttctatagagctttcctatttatttttagtttataataacccagtaagaatctatagggatttcacattatttatattttagtttatagtgacccactaagaataacttttattaaatacaaattccttggctcttcggtggaaagcctgattcaggatgtctgaaatatggtccaagaatctctattttaacaattatccagattatccttttgaaacagggaagttgcctaaagatttctctgaagaagaatgagggttattcttatttctgctggttgatgaagaaattgaggcaaaatcaataacttcctaagattgcaggtcaagtagtgtctggttttctttgcattatctgatacatgtattatcttgtattatattatcttggtacgtgtatgcacaggtgtacacatgcctgtgagttctaggaagaaaatgaaaatatcttttctcctaaatgttttctgatacagttatcacattgctagtagttataaattgatttataagcacacttttaccaaaggattattctttctataataaagcaaagagctagatgcctacaaaaagaattgtggtttaaaaaaaacagttcattccctatccactgttgtgtcttttatatttcatagtgttggagacttgaacttccaaaacacattttggttattgcagttgtcataagcttaatatgactgtgacacaaagaaatgtcagctggtaagattttcttcaaaatataaagactacagctggcttcttatttttgtccattctaaagatactgtggctagcctaatttgtatgggcccactggatcatgcctaattaagttaatgaagctcttctgtaacaagaaccctccaaaggaaaataaaaacacagaatgaaatttcagaatgcagattagcctagctttgctggctttcgctctcatgggtagaagtcacagagtaaaacaaaatccttaaattaaaaccaattacaccatataggcaaagatcaggtttacctaaaattgtcacgggggagctgcatgtgttctgaggagaattgcccattggctggtagattgttgaaggctcttggcttcttagcctgagatgcacagagctattatttactccttaattctcgtgacttgattatttcaagtacttgttggcatctttgaggatttacgattttcatctggtcagtggaaacagacattcagaaaattatttgccacagtcgggatttatatttatggatctttaagttttgtcctttcctactaagtgttttcctctttcctttcttgtaacacatgtttcaaatttctttgttacttggctgtaaggaccatgtacagctttccaaggccgttgaggtcagatatttcatacctaagcatatctttattttccttttgggatataagagaacttttagtctgttgaacttaatttgatttttttccaaattcagctttccattttatgtgattaggaaactttaaggaatattatatagaaggttatattttactcattttactcaaaacattttgattaaatattttcgaattctacaagtttgtttaactacaacggtggcagaagccaatatgtatttattcttttcttttgaagtattaggaaaaggtcagtgaaattagaagaaaccttgcattactgtaaaagctgctgatttttgtactgttacagaggtgaacaaaattattaaaatataaaatctaaataaatccaaaatctaaataatgatcaaaccagttgtcataacatgtcactagtgcctctgcagatttttattatttgtaagtagttgaataaataaaaataaaaagtgtaaccctggtctcttaatatttctaggcttccgttctttttgtgttcgtttgtttgtttttttagatggagtctcgctctgtcgcccaggctggagtgcagtggtgtgatctcggctcactgcaagctctgcctcctggactcacaccattctcctgcctcagcctcccgagtagctgggactacaggcacccgccaccaccatgcccgcataattttttgtatttttagtagagactgggtttcaccgtgttagtcaggatggtctcaatcttccgacctcatggtccgcccacctcagtctcccaaagtgctgggattacaggcctgagccacggcgcccagccggcttcagtttctttattaagtgaggagttagagcaagataacctcgctgactttattatttaccactttatattttaaaatctagtattaatataaaatatttaagaacatacttggtctagcaatgccgttggcaaatgtgtgggtagcaatagaaaaccaaaggcatagacagtgactgggggtaggagggtaggcagcttgttgtagtgaggcagagctagaggtatggattctcatcttgatttacccatatgaaaagtcatactgtgttgtgggggcctcaacttttgaatatttaaaatggaatgatttaaccaagtcagcctgttaggttccctttttttgataattgcctttgatcccagcctagcagaagtggatgaaataaggacaacacaaagaacaatgaaagattccaatgtggaatgagtggtagaggctgacactgctatggtgaagaagggaagaaatatgagctggtgaagacttaatacagaagaatcaatgctggttatagagtctatttataatacacaagatattataaattattattattttttgagacagaatctagctctgtcaccaggctggagtgcattggtgcaatctcagctcaccgcaacttccacctcccgggttctagcaattctcctgcctcaacctccgaagtagctgggattacaggcacacgccgccacgcctagctaatttttgtatttttaatagagatggggtttcaccatgttggccaggctggtctctatctcctgaccttgttatctgcccacctcagttacccaaagtcctgggattacaggtgtgagccactgctcctggcctataaattattttttaaaagtaatgcctattgttaaatccacaaattgtttatgagtttaattggttataataaaattttaatctttgactgatggcacaatcatggcagagagaggacaagtggatttatgagatgactgactccataacaatgttttgatctctaacataagaacatagtctacctcatagagcttttaaaaggtgtaatgaaatagtacaggcagagaaatcagaagtgcctggcaaaatgcaagcattttttcaatgcaattgtaaatttcactcagaaaaataactttcacacatggcagacattcatatagttttaccagaatatataaataaatacatttcatctgagcaagtaaaggatactaagaaatctgacttacctacatatagagttaggactactttgcaatgtatggtggttggtatggtacagagttgtcatgttcatggccattaatgtgacccaaatgaaattaaatcccaccaattcttacacatttttatggtgtccagcctttcttcatgcttaggcattcatatcccagactttccagtccatagcgaaaatctcaaagtggcttaaaaacaaagtagtgactatagttggtgtagtttagtgattaaaccttgacagaaccagggcatcaggaaactgacccaggagactgcagagcctcacaatttcctgttctttttataaagttaaatatataataaatttgtttccatctatcttcaagcatctgtctactcttcccctttttctccctttgtaactctgcagttaaaaaaaatttagtagagttgactaactgaatttcatatttcatatttgaagatctacgttgaaaatttcacgtggcaagcattgtattcatttgagccttaaagtactttaaagtactttaacagtggtttggctgtgtccccttccaaatctcatcttgaattgtagttcccctaatccccacgtgttatgagagggaaccagtgggagataattgaatcatagaggagattacctccgtgctgttctcatgatagtgaatgaggtctcatgagatctgatggttttataagggacttttcccgccctttgctcattcttctcctcgacactgccatgcgaagaaggacatgtttgcttccgcttccaacgtgattgtaagtttcctggggcctccccagccattctgaactgttagtcagttaaacctctttcctttataaattacccattctcaggtatgtctccatttgcagcatgagaatggactaatacagtactggattattttctgctgtttgttatatttacacccaacttattaggaaatgctggggtagatttcttaaccagagtctctagaacattggaaaaataatacataattaaatgtgtatgaaagcatgagtgcatgaatgatagatttcctcttggcattaatcaaaaccaatagtatttttgctgaataccagaatgccacattttgagggaatggcataataagtaaaaacataatagagaagaatgtaaatttttttttttttcagtaactaatcagttagtaccaataccaatatgtactacacacacatattggcaatctaagggaggctagcatctgtgcatttttctacccaacctaatggtctggggtttggttgcaagatgtgaccagaaaagacatcgtatttatagatagggatttcttttctcattgatgactgcagaaatggttaaatgctttttatgattgggtatggaaaatatatttgctatggaggtactagtaaactttgcttcttatttatttttattttactttttaaaattttttaaaaattttgagacaggatctcactctgttgtgcaggctggaatgcagtggcacaatcatggctcactacagcctcgaactaccaggctcaggtgatcctcctgtgtcagcttcccaagtagcagagactacaagtacacaccaccacaccgatggctaatttgtatattttttgtagagatggggttttgtgatgttgcccaggctgatctcaaacgcctaagctcaagtgatctgcccgccttggcttcccaaaatgctgagattacaggcatgagccactgcacccagctgaactttgctttttagatatgaaatgaagaaagtacagaaaaacaacaatgaacaaacatctgttaaattctactcttctgtcatgcatacttcagaataaggacatgaaacattgcagttgaagtctactctatcttcttccccatttccatcctcccacctcccataacagatgacaaaagcaacgtaatttaggtatatattatctccatgaaaggttttacacctacatgtgcatatatgttaaatagtttatggcataggttttcatgttttcaaactttacataaattggtatcataatctacataactggtatcattcttcaacatgattttttcttttgttcaagattatgtttctttttttttaaataaattatccagccatgcgtggtggcttgtgcctgttgtcctagctactcaggaggctgaagcaggagagtttcttgagcccaggagttcaagtccagcctggcaacatggcaacatgctaacatgctgtctctaaaaacaaataatccgtgttgaaacatgttgtctaaatcaggggtccccaaccctgggccacagatcattactggtctctggcctgttaagaactgggctgcacagcaggaggtgagcagcggacaagagatcattatggcctgagctctgcctcctgtcagatcagtggaggcgttagattctcataggagtgcaaaacctatcgtaaactgtgtatgtgagggatctaggtggtgcactctttatgagaatctaatgccttatgatctgaggtggaacagtttcatcttggccaaaacggttggggaccactgtcttaaatattccattgaatcaataacccccaatttattaatccatttttaagttaatgagcttctgagtggtttttaattatttccaatttcaagcagtgctccaactcatacatacctctttatttacctaagatagaaattctccagaaatttgccttaacatccaattgctgaattaaatagcaaaaaacaaaacaaagcccaccaactttgccacatatcaccatttgtctccagtgattgtcccagtttatatttctaccagcataactaagatttacctcttctacatatccttgccaatatttgtattttcagaggcttacatttggacaatctgaagggttataaaatagtatcttattgttaaatttgtttttccccccactggtgcctagtagggctgaacatctttcttatccttattctccatatgtttcatcttctataaattgccagttaatttccttttttccctattatatcattgttctcaataaggtatgcacatttgtttactaattccttgtcagttaaatgcattgaaaaaaatagtttcacagtctgggactagcctatctacctcattatgatgtttgttttttgactgaacaaaagcctaattttagtgtagtcaaatatacagtattagatttcctttatgattattgcttttttgtgtcatgttcaaaaaatattctgactcaaggtaataaatatatctaacagatttactttttcacatttacgtctttaactcatctgaaatggatttttctgtttgttgtaaagtggcgatctaatcttgttattctacatggatgcatagttgtcccaacactgtttattggctagtcccaacctttctctcctgatgtgaaatactgcctctgtctcatagcagatttccctacttatgtccgagcttttttctgatttgtcattaccattttcaaatctttgtcacttccaatagtttatattttctagaaagttatcagtgccctctcatttttgaaatttatagacataaacttttattcttttagtatttaaaaatttgtaaattatctatagctctgtcctcctttttttccctctttttttttttttttttttttttttttttggagattgagtcatgctctgtcatccaggctggagtgcagtgacaggaactcgcctccacctccccaaatgctgggattacaggcgtgagccaccgggcccttccctcccctcacctctcctcccctccccttcccttcccttccctttcttttatttatttatttagagatggagtctcgctctgtcgtccgggctagagtgcagtagcgggatctcggctcactgcaagctttgcctctgggttcacgccattctcctgcctcagcctcccaagtagctgggactacaggcatctgccaccatgcccagctaattttttgtatttttagtagagatggggtttcactgtgttagccagaatggtctcaatatcctgacctcgtgatccgcccacctcggcctcccaaagtgctgggattacaggcgtgagccactgcgcccggccccggccacccttttctttctttatgatgtttatgtgtcccttttccctcttttttgtgatcagactcactggaagtttaggattttaattactgtgttcaaacaatgagaatttagttctgtcagtcctcccttttctttgtttttgtatttcaccaatttctatttttacctattgctaatttctgctttctttagaattactgagtctctttttccattttaatgactggaaatattaactctttaatttttggtttgattttttttttataatatattcctaaggcatctacagcatcttacttacagttactttaacttgactctctgttccagcttccaggtagaactcaccctggagtttattcttagggccattcccagtaccaaaccaattaattgaactaaacaacattcttttctgcagagtgtgtttgtcacgataaatatgaatatatacaagttctaatttttacattattgaaaattagggcatttgcaattaccaacaacaaatctgcttttcatttttcagcaaacctattgggaaataggatgtcagtgatatgtgatctactgtttggcttcctacttccacaggatcactgcaaaacagtatttctatcattgcgaaaaattgtatccacatttgctatttgctgtttatataagcgtgtgtgtgtgtatgtgtgcgtgagtacatacaaatagctgcttttgtctggctgaccataatacctattttgttgtacttacaaatggtcctaccaccaattagctattccaataattacacaattttctcactcatcactcactacttagtgctaaaaatggtgtcataaggaatacaacacctcaagtttaagtctttttaattaacctgtcaaagacttccctgatagttcagactatcacgtactttggtatctttacattcaggtgctgtattcactttcaaaaataaaaagtccatcagggtctgcagacggcagcatatatagcatatatttaaaaccaaagaaagaaaattctcataccttgggtctatattctacaagagaaacttaattgctatcgtcactccactttttaggtctattacttcaggtgattaggctgtttgttctaaactattttcttattactgcttcaatgttttagagtcatgtatcatttcggatctgtcttggtttgtcagttatctccctctaatgcttattgctttctttgcatattaccttgttcctttatctttccaaaggcaaactagtcttttttcacatgtctactgctactgataacactttccataaacatttgtttcgtatattctgtcttaatacctgacattatcatgacacatttgttattaatagaaatatattttccctttaatataatttttttggtcaataatttgtggaatgactggaaacttgtaatccctgcaaaccctgatgaatgttcatagctaccacccaggagtgaaatctgatcatgccactatcctgtttcacacctctgatgattcacttttgcctgtggcaaaaagagggaactgtttagcctggtcaccaggcttccacttgcctcaccagcttttcttcccatcatgaacacttttggttccgtttccatctaacatactacattccttccaaggtacgtctgcatgatactccttcagcttaatttcctggtctctgtttacaacacctgataaatctttcccatccactgcaaccttactctatgaagcctttcccagatctggtcaataccctactttgatttgataatacctttatgtaaatgtctcttattccattaaaatactttggtttgcaactatatatgtatcttttgttcccctagaatgtgacttcttttatgacaggcactgtgggttttttatacttttattgcccaggacttattaaaatgcttggcatgagcaggtgatcaataaatgtcagtgtgaacaaatgaacgtggaatgaatgaacagtcaccagtttttcttgggcatattttgacccaaggtatttaaaactaataaggataatatatttagcaaagttccagttttaaaacttcatggatagtacttttattatatcttttcttttaaaattatttcttactgaggattatataccaggagagcattagcattagatccaagagaaaagaagcttttgtattatgaagaataagctatggaaaagattagatggacagttggttggaactttaagcagtgctttcacatttacaaagaaaatgttgtgttgtttctatcaactgattttagatgataccatgctatagcaatatccttattctccctgtttctttgctatgatttattaatcaaattattattaagttttaaaatcgactacagatttggacttgtaagtgttgcatatacagaggtaaaaatatatcatctctgtcctagagcacctctgaaatatttataaatccagcttaatacatttataaattgagatcagtgacagaagtagtacacaatagtaggaacagaatacaatgcctgagatgaattgacttttaaataacttaaattactaatttcatgtaatttgaagtttaactcctgtactttttaatcaaaatggtaagcaaagaagaattacatggaaattctgtttaagtcaatatgttaaataactattatatgcagacatcctgtaattgacacttgaggatggggaataaagtacaacatgttaagcccagtcctgatttcaaacactttgccatttagatatatgtgtctaaatacttgaagctagtgtgggcggatcctgttgcctttccacttctcagccccatctatgtcatagctggctgataaccaagcctctgcactctcttaacatataggtagagcattttgttgtattgacagcctagagaatttttctgagtttttgtttcacgtgtttgcaaacaccgaattaaattatgaatcaaataatagtattacagcttttaatatcagttatatacgaaatgttttatgaagggcaaacattaaactctgtttaataaatagactatatataggggttggagggtgggggctctgttcgatcaacagtatacctagttgattacttaaaaagttgtaaatggcccttgactcttagtagcatcttttaagtttccctattgtctaacatgaaaataacttcatatgatcttattcatttttcatggtgaatattatcataagaaaactattggcaatgcatcatatctgctatcgtcttgacatgatcatcttcacatttcaagtgtgtatcctatgtacagaccgatagcatgctaagaatctgtatctgtataaagcgcaatgaaattaactgtaaaattctaattttaattaccagtttatttgctctgtattcaacaaatgtgtattgcatattcagaagaatgaaaggaagatgaaaaccatcaaagtccttctcaattatgtgtagagactgatggacacacaggatttcaatagaaaaggggtccttaaacatcagtacgcatcagaatcacctgaaaggcttgttgaactacaaatttctgagtcccacatccctagagtttctgattcagcgggtcttgagtagggcccgagattttgcatttttaatgagttcccaggtgatgcagaggctgctgctctggaaccatcatttatagctactgcagttgagtataagtagaataacaaagatgtattaaagtcgtttccagaatagagacaggcaatgctcagtatgttagagaagtcaggggaggctttcaaaaggaggtaggatttgattgaagtcttgaaggatctcttggtgagagagatccttaacaagagttaaaggtaggctgggcacagtggctcacgtctataatcccagcactttgggaggccaaggcaggcggatcacctgaggtcgggagttccagaccagcctgaccaacatggagaaaccctgtctgtactaaaaatacaattttttctgggtgtggtggcacatgcctataatcccagctactcgggaggctgaggcaggagaattgcttgaacccaggaggcggaggttgcagtgagccaagatcacgccaattgtactccagcctgggcaacaagagcgaaactccatctcaaaataaataaataaataaacaaacaaacaaacaaataaaaaataaaagagttcaagttctttcaggcagcaagaatggcatatgctcaagtgatgtgtattcacagaactctaatttagctcagattctggagtacaggtcatggtggggagagtggaaaaaaggaagctggagagtttgggtagtctttgaagcaaaaagacttgaatcaggaaaaccttagtaatatatttgctgttttgaagcttggctctagctgcattgtggaaggagaatggattggagggttttagtactgaagttaaaatagacaacaggtgataaaggtccagatggctctgctgacagtgggattggcaagaagagatacacagtaactcaaaaggtagcatcaatagcagttgaatattgccactaaggaagagagtcaccaaagatgctttctgggttggcattggtttggtataggtggcatacactgagattaggattgcagggaacatatctgtgaaggtttggtggtagggaataatttactttggctctgttgaattttgctcttttcaggaaacatgcaactagagatacttaggaaagagacacggatatgcaaatatggatttttttttttttttttttgctgcattagccttgctgtagatcaaagacaagattaaatatctatatacatgtatgtgggtgtatatatgcacacaaaaagagaactacacataactctaattattatgaccttaacctgtagaaattttgtttactttggttttacaatacaaccaaaatgtgaagctttaggaaacattggaaaagacataaagtataatagataatctgtaaaaatgcaaatcatgaccataaaagaaccattatttctccccacaaatatcagtaagagtctttcattgtatttggaagtctgccttaaatgcagaattatttcaggaagttcaaaatggccataaaacaaaacttagtattatgtgtttatagttattataggtattgacattattttttataaatatgatagaatcaagaattgctgcaggtattctatgccaacaattggttgaaaagtgtgcacattaatatttaaaaggaaaaaaaagccttcaataatcttccaacacttcaaggtttggtgttataaggatagataaacagtttgtgcaaacattatttgctcccaagctttcatgcatactaagtatcatccattacaacatgtggggatttaaaggctgttaggactatctcatttgtaaatgtaaactgacctaagttatttctctgctgaaatctttgtagtacatctcctgtatagcagagtcgattatggagttcagccctctgaggaagcatccctagctagtctttgcatctttggtaccctgtgcagtgtttagcacatggtaggtactgtagttaataaatttaagttaatgcatttatgacttagagtcactacatttgttgcacaatttcccatttgtttttgcaacttaaactcattttgaaaaactgagcagttgcttttttcctttctgaattattcttgagcaaaaagtgagccttcttgtttttctgacattgtaatggaaaatttatggacttaagtacttcattgttgcttaccaaataaacgaatatatctcttctgcagccacgtttttgcagagacactggtctagattatcgtctggtaaaatccatagggtgagggaggtcacagtaacgaaggatacttactagcctgtaatttattttcaagaattaagacagcaacaggcaaagagttcaccagcacatatgaattagtacattggccactccgtacagggctatttaatgcatttgatatactcttagaattaaattgctgctttttctatgaaaatttgaagtaagcggttagggactaaaaagaatacttgagtgtgttggtactggatactcaattcactcagaccctgcttgaaatatataaatatataatcgcctttttccttttctcatgaacacaagtgatttgagttaatttcaggaacaatttagcttactcttggtaaatgatatataatcaccaactttaaaaacttctgtttaagtagaaggtcagaagtcttgtacttgtttgcagcctgaactacttgaacagctattcgtagagtacgaggacagttctgtaaaccctctgatgaagtgtgatctatttgcaaacgcgttaatgaaatagatgaccaaattatcttgtgcctttattgccaaggttgaattaatttgcttttatttgtctttatttatatgatattgattttttaattaatgaagccatttcttcttgggcatgcatattcttcctttttaaatttatttttacatttgtgactgcttatgaatctcagcatatcacttcattttataagtttgtttggagttcagcagtgagttgtttaaatgggattggcaattaactaagcaattaattgagttttaatagctcagggggaggaatgaatgtctggctgaagatggatatttattttactgaatgaagaaaaatgaaaagaacccacaggaaactatgccttgaactttaaaagtaataacaaagtatgtggaaagtgcaagaaaaatatttttcttcttagtggttagcctttattttgctatatgtaccaccaaatatttgatacttatattttgctatatataccacctaggtgttttccagctgctgagatacagtgctttaatggacattttattgcttaatgccttttggtgtttaatttattatacattattttaaagtgttggaccaatttttagggcctcccaactatcatcatcatgaattaaaatgttcagatgtttttatcagaggacaatattataataactacaatagtagatgatgtccaaaatgaatagtttaaattaaaataatatttattgatagacagtgccaaagagtgttcattatggcgtattatcagttgttaatagtgatgatcatgattttggtaattttaagaagcaactaccattttcttctagtcttttcttgagatgaattaagacatgtttcaatctgaaagactaaattgtgaatggcatagcatgttccgtgcagtatctgtaggtattaataggtttgcacaggagttgagatggagcaataatagaatatgatataaatggttttgtactgaggaggaaccagaaagtccctggaactgccatttcttccaactatctgaaaatacaaggatgaataattagtattaccatagtcagccctaaatgaagttaaaatatgcattagagaaattattttctgccaagcttatgcacacatgaattctaaaattgttctaattgaaatataaacaaattgtaaatattaacctcatttatgttttaatcataatattgaacactggttacaaaatgttctgcataggtaaaaatgcagaattaagagtaatgttccataaatactcctactgatgctttttttctaatgtgataaaaattatgcaacttttttggataaagagaatattttttatcatttttatgttatagggagaggaaatgaaacaaaggcaggcttgtgaacattagagatatgcttaatagtcaagaaagatggctccatctattttaattgagaaaaaaatgaattctgtctggctttaagccagttttaatattaacaagatttatctggctgattgccattgacccagagtgaactgacttgtgaagagtatcttcagtattgtttgagatgatccagggtctccccaatttcctaacactcaagaaatttaagtctgtcttcattctgttaaagcagtgttctattatagattattttaaaactactttgcctatcttttcatttcaggaataaatatattaaatacatactggaaataaatatgtatatctttagtagcaccaatacctttctttagttatgtaagagaataacaaaatttgcacatcattttttagaatttttggaacgtattatcagcacatgttaaaatggcagcactgagttgtcatgcattcattcatacctagggctttagaagtagcaatacatagccagaggtgtgaaatactcatttgatttggtatttctagtcataggagtttaaattgaggattcaatttgatagaaaccaacagatcatgaacaaaaatatgtagcataggagttgctatgatggcaataaattataatctaaatgtactttaccagaataagaagttaaaatatatcaacaacgttgaatatttaaccagcttttgaaatgttaagcttataataacagtgtgttgaaactttggaaatatttaggatatatgtgaaaatagaatcatgcaaaccaatataatcagagcaccaagtatacacagtaatatgaaatatatggaaaataatatgcaaaatatggtaagttaggtagtggaaatgtgctacgttgttttttatttttttcaagttaaggagtaacactagacttcctgctaggttttgatataatctatttctgaatgcctccaatgaggttgactcaagtacctctctaagcagttattctagtgcctaattccccttgaagaatttttgtgttgtctaatgttaatttcttcctttttttagctttagaccattactcttcatttcagctttctattactattttaaaaatagttttataatacttacaaattcctcataattgcttttttccctaagtgaagagtttccctgaagtcattttatgtgtgtaactgccctgtggactcaggtcagaaagtcttgtcactgcactcatgttaaaatgccaagatctctatctttggatcataaacctgggactttttatgttaagagaatatcatggaagatatttggaagggtttggttttgctttttagttaggtagaagagtccttggaggctatattctgactcttaattttacaaataaagaaactaaaatggaaagattatgcttttgggtgagccacacctaatttatgacaaactcaaacattcagtccagtttaactgacactcagaacttgcctattatatttaatattaaatgagctctttgagtgctacctgaatatatttctaaattacgtgaaaaaatgcattttgctttgcggtgtcaaacagagttgccacattttggctttaatatctatatcatcactgtacacattacttccgcatccaccaactttaattctttcacagttttattccttcctctgccatgcaatcatcctgaaagagaccatgaccaaaccatcactagaaactttcctctcttgatgctctgaatgagttttggcttcatgttgatggactcttatcagaacatgctcttggagataatgggcaatttccgcagctccaggagcagtttatttatagtgtcacagggttgaaggctcaactataaggacaaatcacaactgttactatgcattccccttaaaatgaacaaatggaagaacccacttacactatctatttattaaatattgtttttctaaatctgaaagtgaggtatttaggataaattctaatatggctttgctcagttgttttatattcaacaaaatagtaatattgcttttctcagcaaggtttgtgaagaaaaccattgatttttggactgcttaactaggcaaaatgcttatttccttatgtttatgcatagatattatcagccaaattgtcatggatgattttgatggtgttctgcatgccaaactttagaattctcagttactggtctttgtttttgttattattttaaatttctacttagtttgctgccatttagatgtctgagagtgcatgttatggaaaatagcgtgtaattgttagctatgaagctttgtttttgttggaatcagctggccctgcctcttaagggagaccctaaactcttaagtattcacaaggcacagtaagagagtgaacaatagaaatagaattagtaggaaagtgttaaaagagaagtttgctaatgacaacaaagcataacttgttcaactctggtgataaacaccaaatgggcttattgctcaaggtaaaaattgataaatggaatatgccgtggaagctcgtgagcaggagtactttgcccatacctgtgggcactcagtggaagccatgtgagagcttggtgcttttatgtgttagcctgtggaaacaatttcacttctgaaatgcttcaagagtgtttaagtataatggactttgtactgcctgcctggtctgtaccttgtagagcgctctcagcccattcagcttgaactccattttatctagctctttatccattaattttctcctgaccttgggcataaaatatatgtgctttttatgccatggtgctttgtgcagacaaagaggaatagcattaccaatccatcaccattatgaatgatacagcttaaaacaaacacaggtcagagacagatattttaagagcagatctgtattgattccatcacaacattgagctaaaaggaaaagaactctgagactgtaaatgatgaagtaagttttgacaaatagccacaaccatgcaagttgacttaagaatgtgcctaacgggcagtcattggtgtaaaaaaaaatgtatttgttattattaaaacctacctctcttaagtgtatttattaccatactttacacaccacattttaatgtgctagtgttttccctttcttgttgttgctcattgactcttgaaagcttttttgttaaaggaaaagggaagcttattaaattccttaatctttattaaattgttgcttttgaaatacttaaactaacctttaacagtaggtggtggcttatttgttttgcaatttagttttgagcacatcttgttaggattttgaaagtatttgtattgtggcaaatagtatgttactgaagtgcaataaattatgaggagtgtatttattatgaccattactgttaataatctcaatttacatataaaaatctccctatttaatataatgaagtcacatatactagcaaattatgtggtctcaacccatttttcagtggttgaaattctaatggactcgatctctgctataggaacagtcattcttgctgttgtaagaggatgcatagtatggtggctgatatctacttatgcgatggtgattgtacttccactacaacttcattacggaaactgtggtttttctaacagttcaccgcattatgtacccaaatgttgttgatatctgctctgtatttttcagtttcccaaatctgaaactttcattatgtataacaaaatatccaaatattgtgttgtattagttttcatcatgaatttataattcaaatggaagttttacaagtttctaattagtatggttttttccaatttatatcttccttaaaataataaacaaactttctttgatagaggtgattcttaagtcctttcttttagggatgtttttaagcagtggaagttttaaagtctcttttcttaaggatgttatatgactgctcagtttagataaatgaaaaggaatcgataagccaaattgcaaggtgtgattctttttaattttcatcctttgaaaataaatcactaccagatggaggggactgtagacacaccaattgttgaggggaacggagatgtgtgataattggaaggcccaattttttctccagtttttatggaagatgttcctcctcaaagagaaagagttcttctgaggtagaggttagtaaagttcttcccctctctgcctgtctgtagcagaggactataggcattttcattttaacattaatttctgcattcataatttcaagcagtttggaggatgattgcctgcctgatatgatttgggtaacattggatagaatgggcttccttctgcaaaatattggtcttgctttctgtaaccactagcataaccttttcctctggaagttttaaggctggaagagatagcggttcttggggtgggaggagttgtaccctccttgttagagggtatctaaagagagtttcacctacgtgggttaaaatgaactccctaggctgaagaaagatgtgttagtttgggagaggaagcctctggaggtaggaaggaaggtttttgggagagagaataaaacattgacaacaaacatgattttgtttaaagtcagatgtgtttttgaacttaaacttgggaagcatatttctatataaaagaaatgatgttagtgtttgtattgctgcatatgaagcattagatttgtgctaatgacacacaaaagctcataggtgggcaactgagtattaccatatttactttaggcagcaccgagaacttagaagaccaacacttatagacattttctaaaatattcatatttatgaattctgtagaaaatggagactgttatgcctctgaaagaaaatacttgcagaaaactcaggtttatactggaggtttttatttgacttttgattcaaaaatcagtagaatttgttgttgtaaccagattaaaaataatctaggctgtctaatagtgatatagaaaattaaatctaccagacacatatagccctgacctttctctcctactgaagctgagaatgagtctggtgtgttctcttaattgtgttttaccgaaggttaataatcagcctttcaaaacttcttggctcaaaatccatttagcccagatgtctctagcagcttaattaccaatttctttataggtgatttaggagtaataggaatgaaaggttccagggagatgatggctaagtcattgctattgacaggtaatgtgtaagttgctgtcacattgccttgaaatcactgttagtagagagggagggagggaggaatctgccacagtattcatgaaattcttggtcctggtttaatgtctttgagatttggagacccaaagaataactccctaaggttttgataaatggtattaaatgtaacttagcatctctgcaatgtatagaacacttgtatttaaaacattttgctgactaaaccaaaatctattggatttttaaattattattaatgattaatttgcagtatttagaatataacatgtttctctttctattataatggattgcctgtaactgtcagcctctgatacatactaggagaatccattaaaaatggttgacagccagttttgttaaatttccgtgaaaataaggtctcatttctaaatatatattcatagtgatgactttaatattttagtcttcatatagaattaattaattcaaaaatgtcacagtatacaagaataaattgtgtggcttggaatctgaagacctatgccttgatcctgattccatgaataaatgtatagaacctagcttggtcatcatatgttatttgtaagagagagaaataagactaaaaatatctataattacttccagcctaaaggttgtatgattcattcattcattgaggcatttaaaaatatctactgtgtaccaaaaatactgaatttactgagctcaaagagcacacagtctagaataggagattacacgcaaatataactgaattcatttattcataaaatattgagcagccactgtggcactgaggcctagcaaaatgctggaaataccatgatgactgtgccattccattcctcaaagaactcaggtcagtgagaagacgtgctttcccagatcactgcaatgtggtatccttagtgaagaaggacatgtgcccatggtactatggaagcaggtgagtaggacacgttaacaacaccttactcatctgaaattggagaagaggtcagggaagattattttggagaaagtgactcctgagctatgccttaaagaacatttgtctgagaggagggaacaggattacaggcaggttgtgatatttgaggcagaagcaatagagtgaatgaaaaataagagcagccttgaagcctggaaaaggcaggtaccgccaaattcatcatggaacccatctgcattgtttgtgttttttgcatttctggtagttattcattgcatcaatgtgaaacattgtttataacgtactgataaaatattgtgtcatttaggaaagggagaaattacttacaaataagataaataggagagattcgttggagaaggtagcattcgagaggggtggttttacggagtttatgtgaggagagatgtaagaaacataccttgcaaaagggtatttcaggtgataagaaaaccccaaatcaagaatgaagtttttacttggagcagcaaccaggactgatgaccagatctacccaaggcagtgtccaggctggagactttttgagaactgcaacatttgaccatcaatataccttgtctagaatttttaagaggaatgggctggaactatgtttacaatcactttttatcttaaaatgtatagtttctgggtaattcacaatggatatgaatttgactccattcttatttggcaaataatcatgagtgtctaacgtatttcagtctcattgctaggcgctgaggatcaaatatgaattggataatcctgccctcaagaagcttcagttagtgagagctactggtgatctactcagatctgttccttcaactcttgccctactcagaggtgaagttatggctataatgaacattgctgttagggccaacctctgtctttcactaagctgtttcatactgaggatattatcaaaataggagggtttaatgatcagcttttgatatgctgttagtcttatagttcaaacagccaaataagggatgtaactcccaagtatcctagtctgctgtctgttacttaggaacatgagtgaagaaaacaagagaggctcagctattcgtacagatttcgaaacagcaattctttgggtggctttcttcttgaagtagaaatacacctaaccctagagcaagcagttctcctacatacacccctcttcatatgtttctaacagtagcttaaaaaactacccctgccaaagagaatgcattggtctataaatgaaacttgctatacacacacacacacacacacacacacacacacacacacacatattttgcattcagtatatatcttttcagcggaagtattttcagtttctgttccactggtgattttgttctataccagcttacctgggagccctggtttataaccttcacatatttgatctataatacttcaaaaccagtcctgaggtacctgaaatctcataaaatttgtcttcttgttttctctctatatacaaacagcatttgaactgcaactttctatttctgtaatattccatggttccaaaaggtatgcttttgctattaatgctattaatgataaaactttgatgaataacttaccccagttctttttgataagcgtctcataaactatgcagaacaattagccagaaaggtgaaatattttaggatctttagcagtttaaatttataattaatggaagaaactgaatcttttgttgtattttttcttttttccttcctcttgatgtccattttagatgtgctctttttcatataatttttatgtcaagtatggtatttccagtatttaaaaaccaaatgcacctatttctgtatggtagcaacaaagatctaaaacgtgaagtgtcaaggggagaaaacatgggaggcaaatgtttcctgaaacactactcatgcataggaattacatttcaaattcgagtctaatgcaatgtgcagcatttagtatttgataacaaatgaatgttatcctttctgtgggtagtgaattaatagtttatttcttaagcaaccaaatatggttctcacatgaaagcagtctataggaaattactattctagggaaaaaaaggtcaaatttaaaatagcagttgattacatttcaaacttcattgtgcgaagagttgtcatatctggcagtgtaaactccccggtcctccagcccacccctttccacacttcctccctgttcctgtgaccatgatttcttatactcaaaaccactgcggttagcttgaaactccacgagcagggagcagattacatggccacatgttcgtctctccccgtcattgagtttttacttctaattttgtgagtagcttcataattactttcatttgagggcatttttcaatgaaggagcttttgtatttctagagacaaattttgctgaggatttttatccaaccagtggctacattttgagaatctcatgatttctttccattttaacacttacaatgtggctagcatggattaatatttattttgcttagattatttaggccctttaaaaaaaactttcttagactcttccctccaataagtgaatgcacaccaacccaccatacctacatatgcatttggataaataaaaatttccggagattcttgtccaatcaagatcaatgtaacatgacttgattgtgaatgtcaacttttaatttttttgagacagagtcttcattctgtcgcccaggctggagtacagtggcacgatcttggctcactacaacttccgcctcctaagttcaaacaattctcctgcctcagcccctgagtagcgggattacaggcacgcactaccacatctggctaattttttgtatttttagtagagatagggtttcaccatgttggcctggctggtctcaaactcaaactcctcaagtgatccgcccgcctccagcttctcaaagtgctgagattatatgtgtgagctaccgtgcccggcctgaatatcaacttttattttaaaaagattgttgaaacacgcctgatagtatgtgtgtatgtatacagatgcatcatgatttttgatgaggttacatcttgataaacccatcataatttaaaatattgtaaatcaaaaatgcgtttaatatgtcaaacccactgaacatcatagcttagcctacccaattttaaacatgcttagaatacttacattagctaacagttagaaaaaataatcaggaaacacagtacatatagtgtattggttgcttatcctccagatcatgtggctgactggcagttacagcttggatctgctgtccagcatcaccagagagtatcgtaccacatatctctagcctgggacatcaaaattcataattcaaagtgtagtttctactcaatatgtattgctttcgcaccgtctaaagtttgaaaattgtatgccgaggccggttgcaatgcctcacgcctgcaatcccagcactttgggaggccaagtcaggcagattcacttgaggtcaggagttcaagactggcctgtctgacatggtgaaacctggtctctactaaaaatacaaaaacttagaactgagtgtgatggcacatgcctgtagtcccagctactctggaggctgaggcacaagaatcacttgaacctggagggtggaggttgcaatgagctgagattgtgccactgcgttccagcctgggtgacagagggaggccaaggcgggtggaacacaaggtcaggagttcaagaccagcctggccaacatggtgaaaccccatctctactaaaaatacaaaaattagccaggtgtggcggcagatgtctatagtcccaactactcaggaggctgaggcaggagaattgcttgaacccatgagcagaggttgcagtgtaccaagattgcgccactgcactccagcctgggtgacagtgcaagactctgtctcaaaaaaaaaaaaaaaaaaagtctacatcaaaactttgtaagtaggagaccatctgtatatgcatatgtgtgtatatatgtatagatacttattgagatacaattgatatgtgatcaactgcacatatctaaaacatacagtctgatagttttgacatatgcatagacctgcgaaacttcaccacacttgtaattcctccatcttggctgtctgtactgtagcctcaccaatacgcttcccaggcaaacagtcatcaccctgtcactatatattaatttttattgtagacttttatataaatgggatcctacaatgtgtatactcttgtgccaagctgacactcaggcttattatttctatattcactcatgttgttcaacatatcagtagtttattattatttattgccaaatggtattccattacatggatatatcagtttatttatctactcatctgccttttcaacaattggtgctggaaaaagtgggtgcccatatgcaaaaaacactaagtttgactcattccttgcaccaaatacaaaaattaactcacagatctaaatgtaaatcataataccataaaacctctgcaaaaaaaaaaaaaaagaaaatctttgcagattggattaggaaatgtttttcagctacaacaccaaaaacatgaatcttaatgataacctacattgcattaaaattttctcctcaaaacatattattggccaggcacagtggctcaggcctgtaatcctggcactttaggaggccgaggcgggtggatcacttgagctcaggagtttgaaaccagcctgggcaacatggtgaaaccccgtatctacaaaaaatgtaaaaattagccaggcgtggcagcacatgtctgtagtcccacctacttggaaggctgaggtgggaagatcacttgaacctgggagttcgaggttgcagggagctgagattgcaccactgcacaccagcctgcatgacaaaatgagaccttgtctcaaaaaaataaaataaaataaaataaataaataaataaattattatgagaaggaaaaaccaagccaggaactgagaagttttcaaaaaatacttaattttttaatcttagaaaggtgacaatataattaatattgtcatatgtactttatagaatatagatttagcttaaagttttatgaaactaagtaaactgaataatgagaattgagagtccagataatgagtcctcagtacttttacaacagaactatcttatccaccttatagcttattgatgcctataggaaattctgttaatcaaaatgggaaaatcagaatctgtcactgtcaccattttggatatataccttcatcttcaatctcctcttgcttcaaatgtatcagttacatttgtttccgtttaacagcatttccaattgatattaggttattcccagtttgtggttaaatggtaggtctttaggaaacatctttttaaactctagtaggactataagtaacattctagtgatgtgacatgcattttttcaagatggatggcatttaaaggagttatagttttgcaaagcatctaactttggcactggaaacatttagatcactaaatatatataaatatatatgtatatttggacatctcaaccgttacccttaccctttacaatggtgccaacactgctcctgaatggaaaaaaaaaaaaaatccaaggatcctttcctaaagactttataaaaataatgaattcttgaaatttgaatttatatatcactgaatcactgacgcaggaattttctgacaatttgcagggttccagctggtgatgtgccctccactctccaccccccctcacccccaccttgctcagccctgggcctgctgctggaggcagtcagcccgctgagtctcgcttgtacaccggcttggcccatggctgagctgggtgcaccctagcccacctgtgttatagtttgtactcacatttgggggttcctgagctcttatcctgcgtccaagaaaaatgagggtaggctgacagttgaagggtgaggatgggcagagaagaattttattgaacaatggaacagctcacagtcaggggcagcggtggggtgggaggattcctcaccccttcagtcgggtggtttttttctcagtgtggctgggtctggggctttttatggactcagaatgaggagtatgtgctgattggtatgtgaatattcaaaaaagattaaagcgaagacaccactcaaaggtgggcaggacagtgtagaaaaccaattaggaaagggtagggataagtaaaatacatgaagggtggggatcaatcagaacaaagtgcaacaaatgggaagacaggttctcagtctggtccaaggatttaatttttagcttggctttcaggctttaaactgtcttcagtttggaggtggagtttaaaaggggatcctgccccatctgactaggcatttgactgcctcctttcactgtcatcaccatgtctacggagtgttttttttttttttaaaggaatgcctttctgcatctttatttacacttaggctaaagagtcctgaggaatttgtcgtttgaatccagcctataaactgtaacctcaaaaagacagatccatttgccagtagagatttccttctaaacactggataaccctgttgtgaagaacattttatgctccttatacaggcacagcatgatcattgcatcactttgagaaaccactgtttaccttaaagtctttaaagggtcctgtttgtttaatggttgggtgtgggaagataactacaaaggtaattcattctttccattgctatgtcatctgcaattcattgaatgactttgttcagctcctctgcagggttatatagctggatactcatctatacatacatttttttaaatttaattatatgttgattactcttaatatgaaagagccttgacaatgaaacagtgtatatatgtgtgtgtgtgtgtgtgtgtgtgtgtgtgtgtatgtatttttttttaagttggtactgatcatttgacttgcctctgtctaaattacctgtattgttttcttccactccccccattttgcatttggccttgttatcaacaaagttttaaacttggttatggacagatagatcatgttatctcttaaagatttgcatggagtttaaaaattcatctcatttttataacttggttgatcaacatgtacagattatgattttttgaattgagagattataaacattgttcaaattataataaacccacaaaaagcagaatgattacttttaaggttatatgaatagaggcaagcttaaaacataattctttcctcactaagaaaagaagtaaaatcagttttggatttacttctcccttgatgttctgcgatcttacttgcttactgcatatagactttcctaagaaattcctcttaatgatacagttgaagatagtaggaatgaaatcaatacactattactttgttggagatacacaaaggttttcaataaacactattctgcaaattaatgttaattgctctaggtagagagaaacaccttatgaagttggaagctatccatgtacattgataatgttctttgagagtcgaaatggtgttctttgaagctgacttctcatgggctagtaaattaaagctgtgagagctaaactgtgatgggctcaagcaatcaacacaggtgtcagtttgaaaggtgatagagggattcttttgcagccccacttgatagcacctttctgaaagttgtgactgaagcttaggcattgggactgttgccagcatggttctgtgtgcagaaaaggagtgaatctgttgggcttctcatccttgagaactgaaatttattactttgtcctcatgatgggaacatccacaaaggatggtatttaaggatgataacttctggtttctctattcagatgaaataagcataaacctagcccaagagcaggtttcaaagtgatagtgaattgcattaagtaaaatttgattgcacatgatacaatatgaacatttgaatttttaaattgatatagttcatatttgagaggtatatgtgatatttcgatatctgtatataatgtacaataaaattaggataactgggatatttatcactgcaaacatttctctttgtgttgggaccattatagttcatttcctctagcgcttttgaaataaacaacgaattactgctaagtataatttttctactgtactattgaatgctagaacttatttcttctaactgaatttttgttgattttttctgcattaattttttcttttctgggaaaattaaaatattatgtcatctcagtcagaataaaaacaatttggcataaaagagatagaaacaagtaaaacttcagttagctattagactatgtaaatgtaggccaggcattcagattttaaacgcagttgtacttcttgtgaatattattattttgagtgtttttgtatttactcaattaattgataagttctgatgaatatatattacctctaaaggaattttgaagtaaattttaatttttttagaatgccaagcaccattttgtggcaattaccattttatttcagttcgccattgcatgtaagtcaagtcatgattacacgtaagataaggtgtcataaaggatgttcaccctattttggtaacattaatatgaacactcaccataaactaaatggatagtgatgacaactgacctaaaataatagacattttttattagataacggtttgtacaatagcccaagcccgttgactgtctgggttctaggcttcatctggcctgccatgtaaactgttaatacgtttcagagagatgaaaatctgacacatgtgaaaaggctgtttctgagctctctccatcagagcaggcctgaaagatgtccaggctatttcagctctctgggaggtgctatatggggaatccaaggttaggatgtggcacgtggcatggctctgtgagacttgccttgttggtaccacatcctgagagggaagaaaggagggagagtctgttactgcttcttggtgatgaatcactattaggaaatagtacaggtgactcagctcatgtttattcttcctggcaaggctgaatgaaaaacataaaggagagaagatatagaggaagaaaataaaacatctttagttgtctccgtttgcataaggaaatagctaattaatgatcctggaggaaatccttgagtattcatttaaagtttaaaacagtcaaacctaggtagggaggcaaggcctgctttgtccgtctctctgtacctctcatttttaaaaattgtctgacacacatcattatttctatatcgggaaaagaatcaaaggctcacttattgtagcagaaataatagattaattagttacataattttttttcaggcttcacagttaataaagcgttctctaaatttatagtggtggcttaaaggagacaaaaaaattagagtaaacttaagtaagtagaaaatgatctttacttctatgtttatttccttgtttcttgatatgtatacctacaaatttataaatttatatatatacacatatatgcatatgtgtgtgtgtatatatgtgtgtgtgtgtgtgtgtgtgtgtgtgtattttgtttttcttttttttttttttttttttttattgagagacagtctcgctctgtcacccaggctggaatgcagtagcgtgatctcggctcactgcaacctccgcttcccatgttcaagcgattcccctgcctcagcctccccagtagttgggattacaggtgcccaccaccatgcctggctaatttttgtatttttaatagagacatggtttcgccatgttggtcaggctagtctcgaactcctgacctcaggtgatccgcccacattggcctccgaaagtgctgggattacggggatgagccaccgcgcccggcccaaatatatatatatatatatatatgtatttacaaatgaaaaataaagagttttgtttctaaaataagtttcaaaattggaatggactagaataggtatcattttgcttccaataacagagcatgacatgtattgagttcttgctgcatatcagacactgtgctagtcttaggcaagctgttgatttcaggaagttcgctctcattagtaatgaccgttgtcaagaccactgagtaatcttcaatgtattcatggcgccagagtggttcatcttcatcaaggagtaggttcccctgtacctcggctaacagaagcaaactgcatcactctgtctgcctcccttccactgtggccctgctctctgaatgggcactccttcctctcactggtcctcctttactgtataccacaaaccacttcctaataatcaatttcagctacaaattgtgctgatatgaaacaaccaatattgccaatattgtattaatttatataatgggagaatttaaagatgtatgtgcatataaggactataaaggtcaactcgggaccttttattggcttgtctttctaattcattaggttactcaccttgtaccatcaatgaaagacatgggttcgattctgtcacctatgctatctcttttagcctccttaccaatccagatgctgtaacttcaaatattttctgcttggattcttacactttttttacctgtcaaaatgataaatttgtacattctaagacagaataagcatatgtaactaagtgcatagtgaaagtgacctcttataatatagcaaacccttgtatatatgcaagtggactccttggataggaaagaaatgtgtggttatattaattaaatgcatatttattctaacagatatataaagaaatataaaatacacaagtatgtgtacatgcagatgtatagttagcctttgctaattaagtgcttttagcacagtatattttggtggccttgaatatcctctatatactttcagccatttccaagcattagaaagtccatgattggccacagatttttgttgttgttagtgtatattacacatttagtcacagactgttagaaaaacattcatggttaagtttactctggtgttttgcaacagaatttcaactttgacccatagtgagtaatcaaacatgacccaaattagttatgacatatgctctggacatagtaaagttaaatgctgcctaagagaccagacttatatgcacaaaatgcctttaatctgcatttcattgaagagacctttgaataaatttttagctttctcagtgacagagtagtgtaagaatgacagaagtcttaagcagggcgagagagcttgaaattcttgccttctgtgctgtaaaacaatgtaacagcccagatgttttcccaaagggtagcatgctctttccagatccgccaagacacattttttacatccatctgtccttgttccacatcagagaaatgaagatgtcttcacagatctgcatctgctctgacccatttctgtactcccatgcttccccaagggtgcaatataaagtccaagatggaccttgacccgtggtccagtggaatgtttatcagtcttcttatttgttgcccactttcagtccatctgcaatctgtgctccagtgcttcccctacacgtgtagactctctttctagatgtagacaaagcatccttcctgttacttcagatttcattgacatcctcattgtccctgcctgactataggaaactgcattctaagttgtgtctaaaataaaaaccagatcccattttggagagatgtccaaaggaagatgatagaaagccagaaggcagcaaggctgatgatactgctgccatttaaagactgtgttcctctgagaaacttggatttagtgtttaacatcaaattacccatggggaaatacacatggactcatataaaaaccttctgcattaactctcagcttcccaaagctaacatgtggttgattaccaagtaagagtttgtttgcttttactcccttttagtctttttggttttttctctgttgcccaggctggagtgcagtggcgcagtcacagcttactgcagctttgtcctcctgtgctcgcaggatcctcccacctcagtctcctgagtagctgggaccacaggaacacactgtcatgcttggctaatttttaaaagtctttttatacagacagggtcttgccatgttgcccaggctggtctcaaactcctaggctcaagtgatcctcccaaattggtgtgattacaggcatgagccaccacacctggcccctttgagtcttaaatatttgaggaggcatctgacttattctgggaagttagtaaattataatagaagaaatgttattctcttgatatagtaacatttagcaaattagaagcaagtatctggaggaacaattttttatatatatagtgtatatatacataattggattttcaatagctaagtcatatatactcataagtacaaagagacttaagtttcaacttgatggactctgatcctggatcaccttactcttccaacaccaaagcccgtaaaaatgatagaaagcgtataaaaacacaaatatgttagtgttttgtggggtttgcaggcttctgtgtgctgcttcatatatttctctgacagctctacagtgcttggaccaacaggtcaaaataaacaaacgtgttggacagtgaatgaattcttatcccaggattagctttctgttttttagcagaaccattataaaattgtatttctgtttatacctagccatctaaatttgcttcaatagcctggcactcaaagtccatttcttagcctattaatgtgtcacaattggacttagtatggcctctgtgtcagtcaaaccacttttcttctttttatggggtgatcatatacctctctgtgttcccagcacatgctacactccaagtttaagttccttgacccaaaggatatttatttatagctcatttagaggaaaacaaggactttttccctactttttactttcccatatttaaaatatttctatattaaaatcaatttctgtgatatcaaaacatgagaataatcatttttttctatttctagcaatatcagatttatttctcttcctcataactcagaatcctccttgttaacaaagcttttatttattttttaaatccttccttccccaactataatctgtgggttttgttttgttttgttttgtttgagacagagtcttgccctgtcgtttaggctggaatgcaatggcatgatcttggctcactgcaaccttcgcctcctgggttcaagtgattctactgcctcagccttccaagtagctgggattacaggcgtgcaataccacgcccggctaattttttgtatctttagtagagagagggtttcaccatgttggccaggctagtctcgaactcctgacctcgtgatctgcccacctcagcctcccaaagtgctaggattacaggcgtgagccaccgcgcccggctaatctgtggtctttttctctctgaatttcgtaagagactggccgccttcttttttgtaccatactgtaggtgctccatctccttaagttaggatagaatttacaggcaaacaacaaggtcatagcttattaaaatagggttatataggttctctgagcataagaagaaggttcttatagggctttatggttagaaaaagagaacatacattttagacgcttgatcttagccaaaaggctgagaagcgatgagagcatacattttagaatgctgagtcatgtacctgtcataaaggtatactccagttcccctctctcatttcttttctatagctttcgtatttattattactatctcctggtagatagtgtagttgattgcatagggtaagtgtccagtaaacgactgataaataaaggattgatttaattattttagagtggaattaatgcattccactacttcaacttatcagaagatacatgaaagcaaaccaaattgctccttgttttcacgccacgccaggggactcaggcccactgtttgagctctttcaagctgcttgaggtcagagcaactccacattgactattttctgcttccgtagagggtttctactctgtgttttcctttttttctttcactaatatttctataaaggcacagtttaacaaaaactgtatcatagcatttttaagttgatttgggatccgagtttagttgtaatctatagggtgccataatatactttgtaaagcaggtcactagtgttttgctcaacttttggttataacaagtttaacccagcagccattctaacgattcttcatattctgtggttcagctgggcagttattctagtctgggccagctcaagtgatttatactgtctctctcttgggtctgtggtcatgtggcagggtagctgatggctgggtaatgcagaatgtgtctgggatgtggcatgctattggctctagcaacagaggcaattgttctccagaagtgtttgtcacacagcggcagtcgtggggctcacaagcagccccagtgctagtgacttgccaagtatctacttgtgacacatttactaatgccccattgtcaaaagcaagtcatatagccaactcagaattaaatttatggtcattatcaatccaccacagagggcaaagcgagagtaggtattcttggggttgcatttggcttcttctttcctccagcattgctcatgaacaccccagagaagggtcatcatccatattcagtcccagccattatgctgcctacctgatctggtcgctggttggatttcctatttgcttggcctccgttcatcatgaatcttctcctgaagctgcgagaagtctcccagggctgcttcttcatcctctgaagagtgcaatgaaggtggtttggtgtgaatgcctctgtcctctttccatgcacctcactgaggcttctttatacagtgctctgggagaaaagtggataccaaatccaaaaacacatgtcatactctgtcaaaaactctctcacgctggtccgttctgacacagcaagaagagaaacctgctaatactttccctttttgacaggcaccgccaaaccatacaatgatttttcccagagagaaagaaccctgtactttccaaagatctgtgacttttccttttctcagttttgtatataaatggggtttggatttgggttttgctagggttgtggttattggtaataggtcagttctgtcttctgttagaaaccgtgcaaggaggtgcctgtgaccatcgcctgaaaaaagcaaggtgatggtcacaggcctctggtccaggtcattgatagcttcctttaaaatatatggtgggtatgggggcagtattgccagaacttttcaacttggatcttagctacaattgaagtacagccagaaaagttgtactcaaatcccaacatagattattttatctacacttatttgcttagttcaacacatggtccattctttaattggaacaggatgactggatcacatttctggtttgatctattccaggcttgattctgctgattatatgttgataaagtctgtgcaggtttattctaggcaaaaagaggttgatttggtcctcatagtcaacattttgtggactttcttcattatgtttggaaaattgaattattacacctataaactttgtagaaatgttgttagcaatttccagttaaaactaattaatggttctccttcatgatgaagtaattgaaaatgatcatgctatttcccacacaggttgtaatctgaagctacttaaaatgactggtacttcaggctcctgaaaaattgtatcactcttgcatccttgttagtcttctaaagttaagaactattagccttcgttaaaaaacaaagaggaagaaaaggaaaagagaaaggaaaagagaaagaaaaaagatctgccatatactctcttatctataataataagggttttgattgttgaaaacagcaaaaataaaatgagatatgaagcatataaggatgagattaaatgggtttaaattatgaaaactttcatattaaatgtctgttaatggagaacaattatataaagcagaacatttcctcaatggcttctgaaattgaaaaaaaatttaattacaaaatatgtttgtgctatgggtcatggggcccaatgcctacggaggttaaagtcacttaaggaagggattaccagttattagaaatgtaccctttgatataattatgaagaaagataaaatactccaagggaataaaatagctattgagcaaaaaccacccccaagtgatagtcttatcatatgttttcatagggatttgccattatggtatcatgggagtgccaggagtgaaatctattcaaccacactgtcactgcagaactgggatgctattgttggtgatgagtaattgttatgagagctatagcataagctcactgtcgaagacaggcccgtggagagaatattcttttcatacccagccttggtgctgttgcgttcttatttctctaaagagcctgacccaggcctgtacaaaagaaagattgaacactggatctgccttgggtgttcttgtcaggagttctcatagttaaagctgtagactatagggccaatggatctattaagaaatcttagggctgagcttttatactatcagttacattataccatatttctaggtttctcttgcatatggatttagatttatttaggtgattgaaaatcatgatctcttctttaatttgttgctactctttccacaaattatgttggagaatgtgtgtgcacataagcacatacgtatctgtttgtgtgtatggtagatacattatccagtaggtcatttaaccaactaagattttgatggccttaaaatatttcagggcaactaattataataaataatgcagaatatagttttgattttactgttaatctcatacaatctagtagtagcagtagtggcagcagtagtggtaatagtaaatttttaaagtatttactatatgacaaatctacttttgagtgccatacatgcattaaatcatttaatactcatgacacttcaaatttgggaggtaccatatacatgtaaggtatctatactaatcttaggaacatgacaatatttatattggaatgtaggcctatttaaaaggccagagcaatcataagccaatagaacatgaaaaacaactttttgttttcctaataatataaattggaccctaaatttttcaaattcttggggaatacagtaaaaactaaacaagtcttctatttgttcttttcaattctgactgattccctgttatggcttttgctttgagcttggttcagttcaagttaatcagtgatgtttgtcttaatgttgcactcctacattaattttaatcttctttcagatgcttcatgccaggaactatatgaatggagatctgaatatagatacgctaaatgaaagagcttgaaatggtaccctttttgtctgattgcatggcttgaagcaagagttaagaatagtatctttcttttgtaataatttttaaaaaattggctcaatatcctaagctaccattagaattattgggtgtttttcctagataatttacaatttgaataattttatatttcctatttaaataatttcccttggggtttatatcttgtgtttattttacttcatctcccctctcaaagttgcattactttctcatatgcccctcctcacaaggcaaatattcacacatatttttctctatgtttaaaatctacaatgcaaaataatataattgttcttatcccttttagttatttaataggaatatgcaaaaatgttactgtgtggaaaacatacttggaacattgcaaaacccctgtttcccatactcttctcactgtaaattctttgctgggtcatctcatccatctgcatgattccagctgtcattttcatatgagagaaacacaaatcttgacctttctctgtctcttcttgtgtcttttatattagtgacatcatccctgcctgctgacctaccatcattcacgaaggaactaagaggctagaaacttgacactgactcttaccccatttttccttaagtaaaatgaatactccctaaaactggtggaatgtttctccagtatgcgtctaactcatctcttcctttctcttccaacgatcataattataattctatgttatatccgcacatagactttatcatctcacatttaaactaatatagtaactacctaactgggctttctctttgtcccccttcactgcactcccttgacagagattgctttttagaatgtgaagatttttcttttacttccttggttcaaaatatccagctgtggcccgggcacggtggctcacatctgtaatcccatcactttgtgaggccgaggcaggcggatcacctgaggtcaggagtccaagaccagcctcaacatggagaaaccccgtctctactaaaaatacaaaattagctgggcatggtggtgcatgcctgtaatcccagctactcgggaggctgaggcaggagaattgcttgaacctgggaggcggaggttgccgtgagccgagattgcaccattgcactctagcctgggcaacaagagagaaactccgtctcaaaaaaaaaaaaaaaaaaaaaaaaaaaaaaaaaaatccagctccagctgggtgcaatggcttacacctctaatcccagcactttgggaggacgaggcaagtggatcacttgaggtcaggagttcgagaacagcctagccaacatggcgaaaccccatctctactaaaaataccaaaattagccaggtttggtggtgcgtgcctgtagtcccatatacttgggaggctgaagcacaagaatcgcttgaacctgggagggtgaggttgcagtgagatgagattgtgccacggcagtacagcctgggtgacagagtgaacacctctctcaaaaaaaaaacaaaattccagctgcatgcatatacaacctaacacatgaaccccagattccttccagcttgtcacagttggacctggccagccatctttgcatcatccttcaacagaccttgcacactgtcttcctacccctgtccgcaaacaaaagcattcaagcagtgaccgcatttcaccttgaatccacctcgcacttatttaatctttcctggaccttagattatacttttccctgtgccttgaaggccctttactacatttctatcaaaattatattcatgctcttagatctaccttctctggtctccagcaaaatcgttattcacccctgtgctcccttagggtttgattagttgacacattttctgtgttcacatgcacgttttcaccttacatggtacaacttttaagggactgtttttgcagctgtcaggtgctgagcaatgttttacacagagagtctgagaggtgttcaataaatatttgttaaattgaacaaataatacactgctatttaatgtttgttaaatgtgattataattttctgcaagtaatgtaaacatgtgctttgtacaaacatacatatccacacataattatatatgtatttttgtgtgggtatatatctttgtgatatttatcatttttatcatgggctgatattggaattaaatccaatgcctgtgacttttctaaaatagaaataatagtcactctcttttttttttttttttttttaaataggattccacctcatcacgcaggctggagtgcggtggtgtgaacacggctcactgtagcctcaacctcctgggcccaagcaattttcttgcctcagccccgagagtagctggtactacaggcacatgccaccacaccaggctaatttttgtatattttgtacagactggttttcaccatgttacccaggctggtctcaaactcctgagatcaggcaatctgcccaccttggcctcccaaagtgctgggaccatgcctggcccactatgcctatttaaccctatctttatttctttcttcctttattttttcctttaagttagtgtttactaaattaagttttttatatcctttctggtaagctcactttaataagtttattgtttttggtttagcataactttgggtgactttaacatttctcagactgttatgggaaatgtggattcatttggacatgtactgacatctttcagatcatcacttttgtacattatatatttttaaaaggttgtatctacaatatttatgcctgtgtctatgataactttatttcaaagagatagaagagtttatggaggaatgtttcacatagcaagataaaatggtatgacagtggagcaggaaaattttgtagtaagacaggttaatgttaggagtatagttggaacgtgcatacggtccatgccatggacttctgtgcctttgctaaataaaccacaattttagctccaaatctactaacatctctagacgtgagaaagagggaaactgtgacacagatgcatcatgtccataacataaataacaaatcagttctttagaaaaatgatagtatggccaggtgcggtggctcacgcctggaatcccaggactttgggaggctccaggcaggcagatcacttgaggtcaggagttcaagaccagcctggccaacgtggtgaaaccccatctctactaaaaatacaaaaaagtagcgaggcatggtggcgcacgcctgtaatcccatctactggggagaccaaggcaggagaatctcttgaaactgggaggcagaggttgcagtgaaccaggattatgccactgcactccagcctggactacagagtgagactctgtctcacaaaaaaaaaagaaaaagaaaaaagaaagaaaaaccataatattcccctgaaaccaggggaaaagttctctcccatagttcttgagaacgaggatatagtcaaatagtaaatgctattctctgcatcatatgcatgtttaatttcacaacattatagggcagttgcttgctaaagtccctcaggttaatctgtcgaattataacaaaacacatgtcagtttaatctgttctccagcagatgagagaaaacagtcctggtttctagctctctcatcctttagctaaccaaaatcagtttttatattatatggaggagtggatgaaattgcataacttcagctaattctccataaatattactcctctggccaagttgttttgactgtcattttaagattgagatccctgataagtacagatgaaagcaacactatgtggtcggttaagtgaagcatctcagatgttaccactgatctgtgttaaggctaaataggtacatcttcttatgaaaactaaagaggttggtgatattatgtgcttggataggctagccacctgataaattgaggtggacaaagtgagcacttctacgtttagctagagtttgtataaagtttgttggatttcttcttgaacaggcttaatgggaaattaaggaatgaccaatttataccataaagtatgtctataataattcaaacttgaaaaactattatgaaattataaacaagtatccatgtcattcattcaacttaaagctaaaaggcccttttaaacaccatttgaactttcaatggtgatcaatcagtagaaataatgtactttaataaactgaatgaggtaatgtctctgtagactcagttattgaaaatagtcaaacacttcagaatatttaccaaagagcatgactttgactgtaaaacagttgatctgtatagtccttgccttctgaaaatcactgtgatgaaatcagtgatagttgactctgttctaggaaatgttatacgttttatcaagatacatggttttcctcggaactacctcatgtcctgcaattcataaataattttgttgagaagttttccatttgatctgctttttagaagaataatccagaaaacagcttgtctcatgaacttagggatcctggagtccaggtacccccgattaactctgttacaggttccatttggaatcacgaaaaactgaattatcagaaatgggtccctgtatgtctgaacaaacaatattatctttgtcaaggacaaaatataagtatgaaaacgaataatatccatgatgttgggaaatgaatttgaaaatcaacaaaaattatttctggagagtaaaagagaggtgagagtggagcaatgtgctgtttgttaaatctaccactagctgcattttttcctcacaaccaagataaacatttaaaaactacgattgtgtgtgctagaatatgtttaagtctctgtcatattaagaagcaccaggaaagtgaatatcccagaaagttttgttctgaaaccctggtcatcatgttttaggaaagtgaattaagctttgaagaaggcactttgatacaaaagtgcctcctgacaattaaaaaaaaaaaaaaaaaaaaaaggactgtctttagtatgacccagctgttattgtcaaaggattaagtctgtgagaaatcatgcaacttatgtataagttggtacaaaagcaaccgctgttttaccattgaaagtaatggcgaccaggcatggtggctcatgcctgtaatcccagcactttgggaggccgacaatggtgggtcactgaaggttcgggagttccagatcagcctgtccagcatggtgaaaccctgtctctactaaaaatacaaaaattagctgggcacagtggctggcgcctgtaatcccagctattcgggaggctgaggcaagaggatcactggaacccaggaggtggaggttgcagtgaaccgagatcacgtccctgcacttcagcctggacaacagatgagactctgtctcaaaaaaaaaaaaaaaaaaaaagttattttttttattttcctgcaaggtaattcctgctcatatcaatggcaaaagcaactgctgttttaccattgaaaagtaatggcgaccgggtgcgttggctcatgcctgtaatcccagcactttgggaggccgatacaggcggattactgagggttgggagttcgagatcactcgggaggctgaggcaggcaaattgcttgaacctgggaggtggaagttgcagtgagccaagatggcaccactgccctccagactgggcaaaaagcaggactctgtctcaaaaaaaaaaaaaaaaaaaaagtaatggcaaaaccttacttttgcaccagcctaatgcatgtgatatacccaataggttcccagcaaatggaagtctatgaaccttcaacccccaaaaaccagtactatggtgggctatgatatccatgaaaataaaactaaatttaaaatgttttggccaggcatggtggctcatgcctgtaacctcaacattttgggaggctgaggtgggcaggtcatgaagtcaggggtttgagaccagcctggccaatatggtgaaaccccgtctctactaaaaatagaaaaattagccgggtgttgtggcacgcagctgtagtccagctactcgggaggctgaggcagaagaatcacttgaacccaggaggcagaggttgcagtgagcctagaccatgccattgcactccagcctggacaacagagcaagactctgtctcaaaaagaaaaaaaggaaaagaaaatgtctttttcccactggggaaacattcttgattatattttatcttctgagttaattccggaaaaatgacaacatgtgcccatgtaactataatttgctcacaaaacctgtcgtgtataatatacaaagctgtattgcatagtattttatctttattaacaacaaacacttaaatagcattggttatattagggatcagtggctgaaatacacattcttccttcctttagtgaatgcacatacattatttattcagcagcctcatagccatcatcactgagcaattgaaggggcattaatcttgtggtaaacatcaaaaccatccactcgtggctgttgggggattggtggattatgtcatgttgctatgccagtgaattcaaggctgagaaaactttttttgttgtcaatttgctgtcactttgttaagaattagagattgtatgtttcccaaatttataacaatgtgtcagtctattacaactaaacgaaaatgagcagctctgggttgttttcaatatgtaagaaaaaggttttattacatcgcttctgagtatcatcttatcattggaaacttatatctatttaattggcatgttgtatattaaaatgtgacagccgtgagttatctataaggagattcttaatttcatgtcttcataggaacacaactcaaattattcttcctcttattcaggagaccattggctgtcatactctaatattttgtgaattccttttctggctagggagaaactacccttgcatgctcaactgtcttcaaattgcaggaattgagctattagtggagaaaactgatgcaaatccatgggtatttacaacccattctagactggctcccagggaacttctggtgcgtctgtagtgaggatgctgagctcacgtgtgtaggctgaagcagacatttcttgccttcatcctgagacaaagcagataaggaggcaaacggcttgctctacgagccccttttgccaattcctgaaggaaaagctggatcagtgttcaactgacagacacttgctttgtacttagtgctgtgctccatccaggggcagctctattggtgagagtccttcatagaggcatactgtttcatgagtgcctcaaatacatgacattgcttcccaagggaagacatgactgaaaacatatgcaaacaatcataacatttcagaaagccatccctgataattctccttcattcctcatcttcaaaatattaccaacccttgtaaaattgacattcaaattattctgaactttttccacttctccctatctccttacatcttcctaatgtaagtttatcttgccacagggctatctcggtactatcctaaataacatgcctacatcactttattcttattttttgcttttccccaatgcatttttcataatgcagttaaaaagccattttttaatgccaattttgtgataagcgacatacactcccagtacacatgcccgcaagcaccgaagtgcccacacacttgtatttaccttcaaaacccttctttcctttcatttgcttttggaaaaagatcgcaatcctttatgtatgccctcaggttttgcctgaaaccctttttctaatttgctgtgtttaatctattgaagaagaaggtcaaggttttagaatttatgtggatgcttgacaactcttccatctagttgcaaaagataagggatttcattcatgtaacttttggtagtggttttggccattgtttggcagttttactttgattgggttattttccagatgtctgaactcctgttgaatagcttcttaatatttttgatatttgaaagcatagtgaataaatttctatcctgtgtttgcttttatatatgatattcttttgatagagaggaaagttcaaacatttcgaaaagaaataaatcatagttgtaaacttctttgggcagtttcataaattgatagtcctgtgatttcaaagattttgaagaaaaacatacattgacatacacacacacaaacacaaacaaacacaaaggctgggcgcagtgacgcatgctggtaatcccagcactggaaggccagggtggaaggattacttgaacccaggaggagtttgagagcagccctgggaacatagcaaaaacccatctccacaaaaagaataaaagaaaagacgggtatggtggtatgtgcttgtggtcctagctgctccagagtggaggcaggagtgtcacttgaactcaggagtttcagactagcctgggcaacttagtgagacccatctctatgaaaaataaaaataattgagccaggtattgtgacacatgcctgtagtcccagctaccctggaggctgaggtggaaggatcccttcagcctgggaggttgatgctgcagtgaactatgattgcaccattgcagtccagcctgggtgacagagcaagaccctatctataaaaagcaaaacaaaaaacctagttccatttggttattctctggtgttaaattcaggctgaattttgccatataaatagaaaactatttgcatttatgggaaatgtttccccatagatctgtaatacattctgagacatataagttatctttaactgcttattcatgtactcctgtagttttcattttttcagtgaaacattttatatgtgatgtttgatgttttaagattttgatcttttcatctttcaagacaccctctaaagaaaactgccattacctctgttttcagaatcaattttctcctgtcagataaaacaaatacctaccacagtttgcctttaaaactataaaaactgttactgaatgtggtaaaatagtgaaatgctctttttagaaaaattatttagacatatctgagtcactttattttgttcctcttgctcccattgccttacattattaaagactagagggtaacaaccattttctgtaatgtgttcttgtttcaggaagagagaactgtgatgagctgaggggaaggtggattgtttctaaaatttttgaaagtttggcttaaaaaaataacatttggatttctgaagctattctaagttaattatgttttaattggaaggaagatcctcaaaaagtttgtcttctatcttaaatttttatcagactttatcatttctctaaataaaaataataaacgtgcattatgttattagaatattgatttctcacattttcttttcatgagcttgcaccttgctcttgagttatcactcaattttgttcattgtttgtaattaaatacttatgccttaattttataggaattcatgtatttttagagttaacttttttcagatattgtcatcatttgtgtgaaattggtaataacagttggagtgtcatttaaatagtcatggtattcaagagggcctcaaataaagtatatatttaagaatgtttgtcacaattgggaaagcaatgcttgagtatatctagctacccagatgctttgggaataagtctatatatttctgataatatgaattaattataacagtttacttctatataatttaaaattttgaaatgatcccaatcttatagaaaagtagaaactacagtacaaagaacttattattcctgaactgttagagagttaattgccgacatgatgccttgcctgtcattcccaaatactcagatttatacaaacaaggcattctcctacctaactacaatgggactatcgaaatcaggaagtaaacactgatgcatcataaccatctaattcttagatccgcattcacttttgatcacatttttccagttgttcttacttgtgtttcaccagttatcgccattcaagtttttataattttccacagaggctccagttcagaattgtattttgtacttgtcaacctggaagagttcctcagtctttctttgacatttctgaccatgatagttttgaagataacgagcctgttatttaacaaaatgttcttgtttggggttttgctgatgtttactggtggtcatatttaggttgtgactcttttccaggaatattgtggaagtgatgttatatttttctcagcacaagaatttgaattatccctttactggtgttattaactttgattttttaatcaaggttgtttctgtaagccttctccaatgtaaagttactaatttttctttacatattttattattattttaaaaatagttaaaatttttaaaatttaaaacttcaaaattatttgtctttaatggtatttttaggactactaccgtgcttagaatacagcaaaatcatgtaaatgggagcattattttctaaattaatatcattggcatcagcagcagcataaggagcatcatttttggtttctaattgcatactgcaaatctaggagatgcttaagactttccctatcatttaatctctcacagactgctttctttatatttaataaatttatgtagggagtccctttgatactatgtaaagatactatttctcctgaaacttttaatttactcagttatttatatcagtatggatgcatgtctttattttattcagtgtgttataacttgttaatactgtcttttttaattttcgtgttcaagttgtccaatatttggtcaataagagcccctttaagctggcttctgtgtacatttagtatatacctttcattctttgagtattttcttatacaacaggataagttgtgtcttctttgcttgttctcattccttgcttgttccagtctcattctttgcttgttccagtcctaattggaatcagtgatttctctaaggagttttctgaagggaagctttctgaaaggaaagtgtttcctttcaactggagaatggtatttagaaaccaagatctgaatacaaggtgtgaccattgctactgggtattactgctcccagcctctcttggttcagctagggaagatgtctttgctaagtttatataaagaatgtatgtttgtgcatgcatactcatttacaagtcatatatatatgtatacatatatatttaaaatatgtatagtatatgtatacaaatgtatatatatatgtgtgtacatatatatttaaaactaggtgttcacaccaacactattagttccaatccaacactacacaattgattctgattttcttttttttataacatttgatggcttagaaaatttattcatatatacttatatttaccaaaatatggtgaagaaaccacattgaatgttttctgtagtcccatttgattgagcttgttggtttgtaactttttacaaagctaacaaataatggatgcaggatccaaatccaagtctctttccttgtttactatttttgtctttgtgcctctttttctaaaaaacaagaataaaaaattattttctaaaaataataaaattcattttatgatttaaatatacatttcggtaaagtggttaattatttgaatattcaaagtaaggtaaacatttggatggatgtaaagggtgagtataatgacacctgcttgttgataaatataaattgatagggaataatgagatttgtgaaagtggatggatattggattttatctaaatgaatcccaaagaagggaataaatgtgtttccctgatgcctaagtatttagttaaacgttcaggtattaatagtgttactaggtaggaggagaaggtacttcttttttttctcaatgcgtttatttgattatgaatcacaaaaagggtaatcatttgctcaggccgagcactaataacagtatgccttaacttaatgcaatgtaaacttggagctaccacatttagacaaatgataattaaatctaactggggtttatgttctgctatgtagacattactttgtaatttgtaggatgattgcatgcattgcttctaaacagtttgttttattctctgcccggagtaccttgcaaactcctcaaaatgtgaggaatatttcataaaatggagctttgctctggaatgctctgtgggtagctggttggtatgctgaatatttagtagctgctaatgaggctcttagcttaacaatgtccaattttctattcctgcatggcataattctatgagaaatctttcgagactcttgtatccagtgactgcctttaagagatacctaaatctactctgaaataaaagcttagctgattgatttatagccatattaagacaagcatactatctgtatgtaataacttgcaaagaggaccttgggaaaaaaatttttgtatcttgttcataattacttttttgggaacagatcttatatttatcgtatgttccatttggaatgtcatgtattaactgtcagtttttttttctgctttatatagtttcttgctgactggactagcatttgatttgtaattagaaactatatgattttttcaattttattcatatgcgtaacatttcgataatggcccaagagcccaactttgctagaaaacggtgatttagcttttatttctttgctctttatttttctgttttcagtcccttattcaattcacttacaggaaaattgactttgaataataatggtcatgatgtcaacacagtacaaattataccctgctgccatctggaatggtgaaaataaaagctttatttacactgtttcctttaagaaaagaatgttttttcctcttcttcaaggactgtattctggaaagaaaatggtggtccttgtttgtagcctgatactgtgattcattttgaaatgtaatgacttgaaaactcattgttcgacaaagtagcaaatacactatgataatcctctgccttccagcctctgagacactgatctgtctccctgtccagataaagctttggagtagtcattattagtcccataaaccgaagagggaccttgtggcccaaagtcatagggtagatatgttaggtctacttatatctgcttttctggtctctgtactgacttttggtgcctgctcatggcagaaggcccgccattctcagcccttcctaggtaattaagtagaaattacagaagggctaaaggtataggcacagtactaaatctcagctctctaggaaaattacttgacatttatcagccttttcacactcttccatttctcatctaccttgtactggctaacagacatggcagaattctgtctcttctagaaccaatcctgagggaatgagaagcctataacatatgtatatacacacacacatatatacatttatatacgtatatatgtgtgtgtatatgtgtgtgtgtatgtatgtatatatatgtggatttttaaaatgtagatctatttttaaagtattattacatctcatggaacttgcgtatctagtccatgccatttaaaaaataaaagtaaaggatgaccaagtattcaaactcttttgttgtcccattcatgagttgactgtgattaagagtttcatcactacatgatgaagatttatttgaagaatagcaatttgcatagaggaaacatgacacaataaaaagacaccaaatctagagctgaaagactttctttaattttttactacatgtaggatatgaaacaaataacaatattactgagtttttgttttatagccacaaaaaaatgataatgataccatccttatttacctcaaggaactctaataaggttcaaatatttgtattttagagatactgggcattatagtgctttgcattaggtaaaattttaaatttgtctaatatgatcttctgactaaattccattctgttaaaggtgggatttagtaagagcatcatattagacaaatctcatcgagagatttcccctctccagagctgaacaattaatggagctattagaactagtttatggagactttgtacagaggtgtttcttgatttatatcattttccccaaacagttattttcagaatgttaagaaacttttgagatgaaaaaacaaaactctgacttcttggcatcatctttttaaaaactattttctttaagaaagccatatagccttcttaacatgacctactccccaagatgaggaatacttaatgccccttccctgaataactaaaagaaaaatgcctgccatgatatagggaaaaacagttggttccagtgttttcagttgttcacaacaacctttgacatcccaaatatttagagctatttttaaaattcatttttaggaacaaatcatctgacaatatggattttatttatttgtactgttgattaatcaaagagcctaaaatcttgttcaaagggaaaagagggtatttattggctttgcagaggttacttggcacaaacactatgctttaaatttagttgcgtgtctagataacccctgttttttatgatttgcatagaataatttctcatttgcagtttattgctgcactacttgtttgatcaagccttagagtcacatgcctctgatccctttagatctattgatggagcttggaataaagcaagtacatatatgctagtattttactagatgccagacactagtgccaggcagcactaggcacatttaatgcatcatctaattcaatcttcctgtgtatgtgcttggtactattattactttcaaagaagctaattatcctgcagatacaattaaatcacaacaatatagagattatctagattacttcatacccagtgcctggcccagtccagcacaaaggaggccttcaataaatatttgtagaatgaatgatgccatctgttgactatccggtaggtttttagaactaatagttcaaattatcttcttgtttcaatatatggtgtaattttcataaatatcttgttttaaagtatctatttggccaccttatttgaccaccttaagaccaatgtgtatttaaattttccgagaaagttcgtactttttcttaagtataaaaatccactgactttctgctgcatagaacactactgattctctgacacgtgaaaaagtccatatatgtattatatatattaaaatgacagtcctagtgtgtgtgtgtgtgtgtatatatatatactctaggaatgtcattttaaaaatacgctgcatattactcgtctatcatttttcttgttttcttatgttaatgaaaacttttctcactcagtctttccacccgtcaaagaaaagaaatcactcttgttctgtgagagtatatgaatgactcaaaccgtaagatatccagtgacttagaaatctgtattcctgtcagtgaaggaagacccacagtgtttgcctcaacaaaaaaactgagtggttcactcctgggcttttttagccattagtttcaacaccaagaattccattgttattctatagatagaataacagtagaatatagatacgtgttctattgtgttctttgcagtgtcattgtgtttatacatgtggttttgtcatgtggtcatgcttctgacacgtaggaactgaaaaccaatatatgagggaaagcctcctgtaaaatgaaggaagcaaggactaaattgtgtgcttctcacatagcaaccgtgataaattaaaagcataaattgcatattctcaatggaaggaaaatcacttgctgacgaaactaaagattgtgaaaataaagtcacaaacagccattttttaagtctctaattctaatactccttatgacactaaaataatgagactatgagatagctttgcctcttaatagactgatactcaaggaggccaaatgtgtagtcacaaacagttgaagaatgactgtttcagtgagtggcattgaggaatggtatttcaatgaatgacattccaggaggaattgagagatacctcatgagtgagtgctgaaaaagtaattgtcaaagcatcataaaaatgtctaattgtgagtatttgttgaacattgggaaggttacgaagaaagtaacaaatagctcctgccctcctgtgagcttgtaagagttcacacttacatactaactattattacggtttattgataacactatttggggacttttaaagaggagccactctgaactgtttgaaacttagaaaagtaattccaggggatgaatgcttcatgataacagctgcttgtctcttcatccatattgtgtttttgttttattgtactgccattactgccaaaacctctgtattgtcaataatatctaagtgttcaggtatacttgccaaatttttaaatactgcacttgaagaagcattgatgtaattgatgtaattgacacgctttttctttataaacatatttgtattaatcttaaaaattgggatttttcccaataccatggcaaacagttctttattgaagacttcgttaaatcagttggggtcagagtcaaaggactagtctggttgaattcacgcagcaagagccctagcaagattaggcaagaagagctacttaggaccaccttggaaggagcctgtagccttagcaggcaattcagattttcctggcttccttacaaagaagagattcagtgtttgtgaaagtggagtgaaagtaagagcatcgttaatattgtttatgcatgaacagtgaaaacagtttaagtgaacaaatcatgtaaaacctgttacttgatcattcacagatatgtaaggcatgactacctacaaaacagtgtcagactattttcctcatggattcattcctttcaagtcctgggtaggtcagggttgttaataagttctaccacaatgggaagttaactctggaagatgcttacattcatttttctctttccttaatggaactgaaagttttgtatcagcatatttcattaagataccaacagattcaaagagggtgctatatttccaggtctattatagctgccattccaaacaaaatatgtatgactctatgattcactaagcacaagtatgtagtaatctgccctttaatggcctctcaaaatgacagaacaaatggctttgtgaaggtcaagtctgatttaaatggttgatgaattagtagctaattctgcatgattgaatattaatatggaacagtgataagtaaggcactttaaagcttaatgagcacattaatgaataggacaaaatgtttttcttttcacctcatgtaaaagtttaaagctactagcatattgacaatttgttaatttttgctagctgctttttcctgtgaaagtttgtgtggttaagttattaaggatattgatttgattcccaagttcctggtaccacacatttgaggagccgtcaaaattgatgttatcaaatggccaaggcagttttatataaatcactaataaatgtggaaggtgaagaaaaaagcaattaacgtcttctaaactacacccacggagataagcattccaattagaaatttcattatttctacagtttgttttatgttgaatactgagttttattgccaaatacctgacagtcaaattggaaacaagccacaactgtcaacgtgtaacagctctggctatttgaatctgttacattgtgatgtttctcatgaaaatttaacgaagaaagtgcattcaaagagattctgtgcaaagggggatggatagaatttaattacccttattaaaaataagaaaggaacgctctttacattttctgtcccattagtatgcaagaaagattatctttgttgtgcactcgtgtatatgaaaagggggctctggagtgttctttatgagccaggaaggaagagaaaggtcatgaaaatgtattagactgcttttcaggaaggtacaagtcaattttgtcggctatccccaaggtgaggactatatttcttataaacggttattaaatctagatttctttggtaagagcctttagtaagtggcttaacaatcttaagcctttggcacttgccactgatcagcactgaatattggctcagttcttccgagagatgaacttgtagaagaaaagtaatgactagcagagcagtatttatgcaggcaaatgtaactagtacttaaacaccatgggagagatacagtgtcctaggacatacagaaaccactcaggaatcgcaaggtgatttttgattaacctaagttggttgctttaaaaatggaacataacaacaacaaaatctaagagctttttcagaaactcatttttatgaaggcggtatagttggtgttggagcacttgaggtaaattacttttatcctttgaagcactttgtgtcaatagctgccaagtgagatatttaataacataacgtgtgtggtatagcagctattgatctttctgctcctttttccccccagcaacatcagaactatgttgtagatgtaaatatattggcaaaacctttaaagccataaagaacagcctgatgaaattcatgtggaatagattattaaaaccagcatagcctaatttgcatcccacttttaatttttaactttctcttggagccttgaaaaatcatcttgaaattcaatttttaactactgtttctgacacttgtctactgtagacctctgcttggctgacgatgtgtaaacattcacaaaaacaatgtattactgcttccacaaatgagccacatctttcaacttaagtgaagttcagctcattgcagttaattatttttataagtgtgtttagtacccggccctaactacctggtctgataggaaggtattatgtcatgaatcaggtgtcaaatcaaacttgcctcagcttcttttggtccttcacagactgtgttagtaaaagatagaaactttctatcctgcccagcgggagagccagagtctacgcttttccttaatagtccatcaattttatcttacaataactgcatctgttcagtgaaatttctctttcttgggagctttaatctttggtagcatcttacattctttcgccattcacattcagaatctctctggtccctaactatttaactggttgcctctctaccagaagttctgcatagtaggatatatatattttttaaacagtcactgatatatattcatacttaggcttaggaatcagtggagtttctcttaaaatctggaaacccaggctagcatgattgcaagggagcagaatacagataaaacatggaagaactcctggtgtggagggataaactcatgagttaataagtacaagacagtggatttgagtagccgctgctatggtagctctgaggaggaaagaatgaaatatgtttgagagaatttggaaaagatttacaaagaaggtgactttggctgcgtggcttcctagaagcacggagtacccagcaaacatgatttgtctgggaagtggtgagaatttcaatgtgggcagaagaaaaatttcctatgagagagttgatccctaagaggctgagaaaaatgagacctgattgaaaaggactttgctagtgaggtttaggagactgagtttacccctcggctctagagggagagagttggagaacacatgctgttgactggcaacacggtggaggcatcaaaatggagcttcttcattagaaattctaacataacctcagtatgattcaccatcaactgtgaattcatggattatactggagcttgtaggaggcacccaaggagaagcgatatgccagatctgatgatatctaatgttctgctcgctgctgtttatgctttcgagtaattttagaattggtggcttatgaaaatttatcagtggccgtgagggggtattgattaaatcaatgccagactcaattggaagtaaaaatatttcatgatcacgagttaatgggtacagcaaatcaacatggcacatgtgtacatatgtaacaaacctgcacgttgtgcatatgtaccctagaacttaaagtataataacaaaaattcatgatcttcaaacaaatggccatgttctaatttggataattgccacccatctaactaaaattctttcgatgcttagatagaacacacctttctaatcctggctagaagagctggcaatgtcagttatcagtgtggagcatgattgtgggatttaagtgattttaatttctcaagagctgggatctggaacagtttcgatgtgggtagcaaaaagtgaattttgcatgagttggagattcaaaatttaggaatttcaactttttaattactgaaaatgatgcagatctttgggatggaggaaagcattctcttatccctgtaaggaacatgtgtttttgtgccattaataaggagttgcttttgctcttctttttcaaagcatcctcagacaattttctggttaattgaagctcttacaaagtaatcgatttgggttgaaccttatacttgtgagggaaaacagagttataagaaaaacataccagctttgaaacagatagcgtgacctagcttctgcttgttccccaagtactctccaagctggcactgttggcttccatgcttctctctcggcaaaacctttcctacctcaatgcctacacttgtgacattcccgaatctttctaaaatctccttctcccctttttgtgacttggccgattgtgttctttcctaaatgcctactttaaatcagagcttcctctgggtactcactgatctcaagcacaaaccctataattatttctccctctttgctcttggaaaactcactgcatcccctcatcatagtcggccccgtctgagctctgtgttagtctgttggcctcttacatagagtgtttactcttctgatcagtagcagcattgtgactgtgttctaatttattagtgcctggtttgtgttaggttctcaacaagcactgagtaaggtaaagagagatttctggggaatctcttgaatttggagcatctgacttattaactgaatgtttctatcaccttttgtcttgcagaagatcaaattcccaggggcttccctaccattgacatgggcccacagttgaaggtggttgagcgtactcgcacggccaccatgctttgtgcagccagtggtaatccggatccagaaatcacttggtttaaagatttcttacctgtggacacaagcaacaacaatggtcgtattaagcagttacgatcaggtagggtcttgttactgtttctactaactcctagagaatttttttttttaatttttctctctccttatttttaattttaatttattttttatttctaggtactgatttttctccctcttctctttctctgttacttaatgggtggtccatgtttgtgatgtcatagcctgtttcagagtctgtctttctccttttctctgtgtgttttgcagcttctgtttaatccacattgctcactgctgtgactgtatttttggtaattttttaatttactgctttttcgcagtatttgatggatccattttctcctctttctttcttctttctctgttttcttttgaaacaaatttatttcaacattggacttcattcagaacttgcaaggagatccaatggttgtatccattaaaaaataaaatgttcatattaaaccctaaaatgtttcaattttattaaagtatgttttctgctatcttttctacatttgaactcatcaaagtaccaaagtttagtaagtctgggcacatctgctttcttttcactaatacataaaaacacagaaacgttatctcatgagtaaccagatgtatgtttttaaaagtctttagaaaataccagtaaaaggaggggatttttattaatactatgataataacattgtgagtgaacattttctacacattagccacagtagtgtgcgcccgtcaaggtttttgaaccctccagtgactggatctacagaagtctgcttttggtgtagactccagcttttgctgttttctctctctctttacccttttctccttttcccattcccatcccaagtttatgcctttgctctcttagattaaaagtagagataattctaaatttcttaagttttagagcctgtccctaggtaatttcacagggatatataataataagctgtttactttgacattggtagtaatattggtatagaattctaagttgtttaactgcctgtcttcccagaattctcagcttttgacctgtcctgtgatgttaaagcgtcttgttaactgcctcttttgcttgttgtcagcagaattgtgtagattagcattctgttattgtaaatgaagaattaattattcacatgtaacatagatgatttagtatataaagctttaactctgaaaaatttgtaccaaattataaggaatataataatatttttatgctgtctttcttctctccgtatttaaatctccagaatctattggtaagtgcttagttctgaagcgcacttcaaccccactaatttccatatccagaatattattattattattaataaaatgcatggcatgcattttactaactgtcagtgtagacaccagatctctgtagtggctcccacacacacctccacagaactgttatcgtaagaacactgtgcagaaaaattaaatagtacacaagttatggcacaccaatgtagcatagcaagtagtataagatatccaatcaacaatgtttgtttccagttagtctttagtgtttcctatcacagtatatatatatatgcatatctatatatatacttaaatagattagccagtattttcctaaactatgtctttaaaaatattgtatagtttttttttaagagatatgaggcatataagatataattctaaccctatatgaccccagacctgaaaactcagttgcttctctgagaaaggcaatgctgcctattgcggtctttaccctctgtggtataatgcaacttgttttttatgatctaataatactatctaatatattcctgttttaccaatatagtaattcaagtttcttttaagaccttatttaattctgtaaatctaatttaattcttctccccagccctagcctccttcttctcgtactaatgcttcttctttctaatcttatttgcattcatattatccacccaggtggtacaccaataagaggtaagagtgctgaactaacgttcacagaatgatcttactcattctttctgtcctttcatccctctcatctttgtcctgttttcagcgtcattccaataatgtccatcaactttttttttttctttgtactgtttggttatgatcagtgactctcatattgtgaactttcctttcctttttctttctctctttgttttgttcatttctttctttatgaaaatgattatttaagttgtgatatgcttcaaagaaagcatatccaggtctttagaccacagaccagtcacagcgtaccatctgtccctctttttttttccttttcttcttcttcctttttcctttttctttttttttttcttctttttcctttttttttgtccaaccggagaaaaaaaaagatcattttttttcttccttagctgttcttgttctggaccaaagccaaggtggtctggagaacagtggcagacatgcagaagacaccctggagcatctgctttttgtctttatctttcaaaaggtttttgcttttgttcttcaattcttttttctcttaatgtcttaaaagtcaaagaatgactcccctttccacctgatcccactcgtctacaatctgacagcaatgcttttttccccacttctttttttcttggattactcgtctccggatttttggatcttctgtccttcaggctatggaaacaaaaggtgctcagtattcttggtggtatgtggtattgctggtttttcatacttcgactcagtgtgcatttcttttgtaattcttgttttgtatttttcttggggttttgtgacaccacactgctaatcccactggtggattttgatgggtgtcttaggggatccatctcagggtcctcaagcagtggttggttggctcttccttgtggcacaggccatgccttttaactttttaaaaatcttctaattcaactgctctttgtttttcagcaaacgtaataaatgattgtaagtcgtggaaaactgtctttcttttcttaaaaatctgcatgtcttaagggagttttgtttctttaagtgatattttgataatttataatgactaattttaattttttgctttgtgcagcctttttgtgctcgctgcgtatttttggctctcttcagcagaagactttcttgaaaacccagcctggttttttttgagcgtacctatcttttgcgccacttttggtacccaaatgaaacaaaacaaaaccaaaaattaatcttttgttttatttaaaagccatacttccttgaagcagtctcacccatcttcattttattagtctaggaaataagagtgttaattatgactagaagtcttgcttgggaaaagagatattgatttctaatgctagcattgatgatgtaaaaaaaaaaaataatctctatatgtttttctcatcgcatcattttctgtctgtgcaacttagcaagagattgaatcgacgttgagtggaccttcgctttgcagggcttttcatattgttaagaggtttagctttctgaactgagaaagccttctctgatcatctctttggcaatatattttatatccatacaggagcccttcagattgagcagagtgaagagtctgaccaaggaaaatatgagtgtgttgccaccaacagcgcgggcactcgctattccgctcctgccaatttatatgtcagaggtaggaatgacataaccctggcatcgcttcttcattcaggctcagggggagttgagacgccgcagggtccgtgttgttatattagtagttaacaagctggtttggtaatagtgaccgtagctgaaacatgttagtaaatagaaaagttaaaaatttaaaatgtgttgtttaactccaaaagacaactcttgagtataatctgtcctgaggcttggagtttgtaagtatatttgcatttttacatcttggtttctatttttactgtattgattgaactgtgctttgcatttgtttgaggttttcttctttttctttctctttttttctgttgtttctcttctgtttccttattaaacccctgaaataattgcttggtgtgctactaatcagttctctgtgcaattccaagcataaaggtgtttatgtcttcatgacccctgctgctgaaactgtaaggataaagctgctaactctataaaacaagtgctacatgcaaatagcacagttgcatttctgtcttcgtatactttcttaattataaacacatagtattatatatacatgtgtattcatatatgtgcacatatgtacacctttttgtttgaattattaagacttaccgaaacatttagttttttgattgcaatggaaaactgtattttaaatagtaatgtgagttgtccttgagacaagaatgaattatgaggatacattcatatgttctcatgaagtaatagaaatgattaaactgtgagcttatgaatggctatgcctttccattcaactagaaagaagtacttcctcttcccgagagttctcaaagccagttcctgtagttttttttatccagtggaagtgttcttattcctggtctacatatctgtgaataaccacaaaggcatgggtgggggtgggattaaagaaaagactgagagggctttaagttacaataggatgggttcccttaagaaaatacctagcttgattttgaaatttttgttagaggtaattttgtttccctggggatgtttttctctcctttctttttttatggagtctggggtggggaaatatgaagaaagtcatttcttctctaaattcttcgaaagtcccttgatcctttttccacaatagtgacctcccttgctgcatgaggcatgtgtaccttcttccatggaaaatttcaaaatgatgctagctattgtttctaataccatgttagtctgtgagatattgctaacttttccagctgagataggaaggatgaactagagcgaataaagatgttcaagtagcagttgaaagccttgatatggcctttttactctctctgtgtttcccttgtttttctcctttcctcatttcattgtgttctgcatcaaaccccctacatccctcagagctgcgagaaggttggtgtgttttttactttttacccaccttacaaaactattaattaaaccaataacaaagaatacaaatgaaatgaatgtagctgcattgtgttcttcttttggttaatggtatgttttagcagagaatgccctggccatggcttctggtgcttgctggtggtatctaactgtggtgcatggtgggagagaatgtacctgggtgcatggtaactggtaacacttaactctgtaaggtccagtgaacttggtcagtgttcctgctttccttcctgctccactgtccccatctcccaccctgcctttaatttctgtcttataaggatgcctgctgcccatagaatgactttttctagtttctcccctaatcccaagcatgaagactaaactctcctccatttttcttgatatgttctttgatacctcagagtctacactggctcctgcttgctttgtgtaacctctgtgaattggctgcaggaggcatgcttagctttctcttcttctcctatgactgtcattcacccatgaggccattgcagtgagccatctcaaataagcggaggtttatctcgaccttaagagcagccaaaaagttttcagacagaattacttatcttcttcttggggttatgaggttacttatcagtttatttataatttttaaaaaatctttattaaatgtatttaaggtgtgctccctaaagattaccctctagatctcaaattcttatggtatgacattttgccagtaaaagccccagatgaaaccaatttatctttcactttctccttgtatcacatccaaaacacatttacttaaacacacataaacctgcagattatctgaagcaggaacactgaactgaaattgcttggtaatttttctgtgttatgttgctttaatatgatctcttctcttaatgtcatgtcctgctgtatgttttagatccagtgtccctcaatttgaatgtgggcataaaaagccttttaaaagattttgttgtcatttatgttgttttacctttgatatgaattgaatggaatcctgtatgtgaaacacccagctccctttctgaatttgcaatccttacctttaacaacttgagcttaatcttctgtctttcaaccctgtcatcccctaagtccctgtgtttcaatcgttatactttacctccccctttcacgtttatttctattgcccccttatttcttctgcggtcattgctgtcttggattccagccattctttcaatatccttagcacgggccttgagattccatcttgtgcatgccttgcatgacccaatccagtatctctactggtgttagcctgtttcttcttctgtgactgtaaatcaatatgtatatacatttctgtgtttgttccagtgttagtgtgaggtcttgaggctgcatccactatgaatctgaaaacataaagtgcactttcagtgtactctaggtgatgttttccagggctgggatgtgacagtgtggtcccacacctacattcacatcaactggaagtgcacagcactgaagttggttttgatactcaacttaaacatgctggtgaccttccagcccccttttctgcatatacatgcctgcatagaatcattgttatatgcctgcatgtatatgtttttgtgtttatcttatgcatgatgtttgtgtattgttagtttgtagatagttttttgtggggcccttgtaggtctgaatcaacttttgtattagtgtgtctaagatatcaatgactaaactaaataaataattctgtgtatacacacaccatacttgtatggtctgtattatccacagtttttctttatgttttgtttttggacaatccacaatgtttcaattgttgaatcgtgtctgtacggtgcatgtcatgtgtttaataatccactttttcttgccttgtatatgttatcatttcccttgtgttttgttccagttcgccgtgtcccaccaagattctctatcccacccactaatcatgaaatcatgccaggcggaagcgttaatatcacctgtgtggccgtggggtcaccaatgccttatgtaaagtggatgttgggggcagaagatctgacacctgaagatgatatgccaataggaagaaatgtgctagaactgaatgatgtaagacagtcagcaaattacacctgtgttgctatgtcaacactgggtgtcattgaagcaatagcacagatcactgtcaaaggtatgctcaatggattatgctttgaggatctgggtacactcaagccaagtgactaatgcctctagaaagcccatccttgaaaatctaaaataattcattattcagcattttaaatgtgtgtataacctaatcatatctgtggtattatataacatgcataagcctagataggcggattttttcttggaagtatctggcagcctatgtagagataatcatcagaatattaaaagacagtccatggaggcccaggcactaaccagacagaactaggaattttacacatggtcgaccattatggtgggactgatgtgtacagtctacatactagaccagaaccttgataagaaccccaagaaaagtcaatatgagcattaataaatgcttaaaatttctaaatacaaaggaaaaagaagaaaaaaaaagttgaaatcaacatagtctagtaatagatgatttaactttttggtgagccctactattaaaaatcaaaaggcaagtaagagtatattctgttgtagttttatctttcaccttgcatagatgagtgctcaaggaatattctttcctttaaaaaacagactaaatataaccaaagtactatattacatgaatatttttgaactaaagagaaagagtacaagcatgtaagggtaccgtttttttttcccctagtgtttatagaattctagaaagtgtttgcaaattgagtcagacatagggcaacttaagttttctgcagatggctagaactattgcaaaatgaacacaaattatcttcttttcctaggcaatgttgtaggcatttggaattcagcagcaagtaagaagtacaagtttgctactcttgaaaagctgccattctagggggtgatcttagaaaatgcaatacacgttataattggtatcgcatctctaaccaagcgtatatatcaaatatatgctatataaaactaatgacatgagaacaaaggtacacattgtcaacatttacaatcgtgaaataatgttatattgtgtaaccttaatataataagcacacatgtatttatccgtacattacagacataaaacctgtactgtacaataaatgtgacttagtgaaactaataatgtcagctaaatatcagtgagcacagctttaattagcaatatttgtatttgctttgaaagttcagaaagacatgtaggggaaatctggagcacacacagccttgaaaaatgccaggtcagaatatttaaacaaatttcattttattattattttcagtaaattcccttgacaaaatactatcattctgtagttctttgagtagtgtgtaaatattgaatcaccttttttataattaccatttcagctttaaatatttgaaggcttgctgaagacctttaagaattcaaaagcaggggccactttaaactaatattttgttcaccttctcatctttgttttcctgactcttgccacttccctgtcttttccacctcaaaaataaacaaataaaacataagagtgaatcttaatggcaaattaaaataaatcaaaacaaaagaacaggttgaagagaatgaggtgaatgggtgctgactcatttattcagttaactgtttaacgattctcattaaaaacctaccgagtgccaggcagcattctaggcattcacaattttacagtaagtcagaagtacaagtttgctgctcttgaaaagctgccattctagggggtgttatacttcttgcctttatgttggcaaggaaacagggacactaatgggctgattatatgaatgttaccctttgagatttctctaaagagtcaactattagaatgccccttcctaccctaatagcactgcgtttcagaatcattgtttagaataaggcacttgaatatgaggtcagcaaagcagacagtttatatttttaattagtagtattttgatttgtattcttctgctaaaaagaaagaattagacctctaaaaagatggattttattgcaaatatttgtcatgtagctacattggatatttctgatgtggaatatagaatgcatattaatatgaccataacataccttaaaaagtgattggtgaatgtgccttaatttacttccttcagcaatttttaaatattaagaataaagcattgatttgaaatttctattcttttgcaccttaaaatttttggtttttcatttacaagaaaatttttagtaatggtattgtgtcttaccagaatatagatgttattgtttcatcgcaatttaatttcatttcaatgtattccacattttgttcttttcaatgtttatcggtatttcagttataccatttatttattggggcaaggggctaattggccaagcttttggtataataatagtaataactgcagctaatactaaggtttttttgtgggttccagttacattctaagaatcttagtggattggctcattagtcttcacagcaaacccatgaaatacagttacatacagctgtataatatgacttaaataataatatttttcccatttccacatgaggaaactaaagcaaagagaggttaagaaatgcgtgcaggatcacttagctaataagtagaggatttggatacaagcctaaaaatatgctatcaagcccttctaggaaagcaggatttgtgtcacctatgaatgttttcctgtccttcttggccattcagaaaactactctttgctataatttcatttaattaaatcttcagtagatacataatcctgtcattttcatagtagagtttatagatttttgaaatattatagggatgatgggtagtcattgtcttttatcttcccccatccaagccttacccaaacctccaggaactcctgtagtgaccgagagcacagctacaagcatcacactgacgtgggactctgggaaccctgagcctgtttcttattacataattcagcataaacctaaaaactctgaggaactttacaaagaaattgatggggtggcgaccacacgctacagtgtcgctggactaagtccctactcggattatgaattcagggttgttgctgtcaataacattgggcgggggcctcccagcgaacctgtgctaacacaaacctcagagcaagcaccatccagtgccccgagggatgtccaggcacgaatgttgagttcgaccaccattttggtacagtggaaggaacctgaagagccaaatggacagatccaaggatatagagtttattatacaatggatcccactcaacatgtcaacaactggatgaaacacaatgtagctgacagccaaatcactactattggcaacttagtgccccagaaaacatattctgtcaaagtcctggcttttacctcaattggagatggtcccctttcaagtgacatacaagtcatcactcagacaggaggtaagtttggttgaggagggaaatagggcaggagggaagggctggtgcaaagaggtgagaaggacaaaaacaaagaaggaacaaagatggtatgaattttaatttttgagatttagggcttcaaagcaacagatgatagatatctgaaaaggaacaagcatggacatctgaaaaactaatcattttgagcagaacaatgcattaacaccccttctttttaatttgtatgggaatgacttgaagacttctctatgtgagatagaacaatgtctcccccatgcccagttttgagaatagaaaaacgacacttctttgtaatagctagtatggtagagtggtctcaaaagagtatttaatttgtgtaagattggatggttcaagacaaagctaaaaaataaaactgttacagggccttgggtatttaaatggcttatatttgccagaagctactggcttgaaaataagtattctctgagtggctttaatttctgtttttctctgtatggcctcagtggataaagagagacagttaccgagatctcagatagaacattgggcctgattgattaactttgctaagagctacagcagacattagactattttatgaaggaaaacttggccctcccagtggttttatttttctaagaggttatcaaacctctttggtctttgagtcaaggtgatcagtttggctttgggctaatataaaataacaggcctcttctaaagtttattcttgagccacgcacagtggctcacgcctgtaatcccaacacttttgggaggtaggtggatcacttgagggtcaggactttgagaccagcctggccaatggcaaaacctcatctctattaaaaatacaaaaattagctgggcatggtagcaggcacctgtaattcctgctactcaggaggctgaggcaggagaatcacttgaacctgggagatggagtttgcaagtttgcagtgagctaagattgtaccactacactccagcctgggtgacagcaagactccatctcaaaaaaaaaaaaaaaaaaaaaaaaagtttattcttgagcatctgagagctacttctttgactccttattgtgttggcatcttttaaacctgcattaatctacgaatgttttggcatcatgctgttggcttgttttgaaatctacataataatcatattattggagacagtataatctgtagacataactcattgctaatcctggcaatgaattaataaattttctcagatgccagtactagataatgtacctatcatctatttcactgatacctgtgaatcactgacttgttttcatggcatggtctttatatgaagtatgtttaactatttgtccttgcttctaggaatctcagagcacatttatattaatagttcgcctgcctttattttcataccattatttggttcttattggcttgttcatggatttactcttttctctatgacattgtaggaaagccagctataaaaatatgtctcaccacagttgtattaaaaactatccatatatcttctctgtgtgccatttgcagtacttctgtatttatttgctgtagtaatatgcagaaaaaaaatactgtaggctgttcttaccaaaaaagcttctcattgggaaatgtagacatccgtaaatcttgttttgctttttcttgactaaaagtggttaactattatgagattgctttttattatactgttttagcagctacataacaattaaaaaattctaagaaattatatgggaacttacattccactttgagctttttaaatttctcagctgtgattattttttcaatccctggtcttggagtaacataaccagggtttgaagcccaagctttcgtttattagctgtcaccttaggtgatttatgtcatctctctctgaacttcagttttctagtctataataataaccaccttatagagtgtagtggttctatttgttttctagtgctcctgtaaaaaagaaccacatactaggtggcttaaacaacgggaatctattgtctcacagttctggggcctagggagtctgagatcaaggtgttggcaggattggttccttttgaaggctgtgagggaaatatacttaatgctgctgccctaacttctgttggttggtttgctggcaatctttgctgtaccatgacatgtagaagcatcatctgatcactaccttcatctttacattatgttcttcccaaaagcatgcctatgcccaaatttcccttttcactagtacacagtcataacggacttggggtcactcttatggcctcatcttaactaattccattgcaaagatcctatattgaaataaggttatgctctgaggtactggggatgaggatgtcaacatatggatttttgtgggatgcaataaaattcataacagggtatagattagataatggagggaaacattttgtaacttaatatgtaaaacattaaattattaatatgtaatcatcataatagtagctaacatatggaggacactatactatgaactttgcatgtatttattctcacaaaccaattaggcagatgtggaattatcccacttgccaatgagtaaattgaagatcaaagaggataaaacgtgattcagaaacttgccgtaggtcgtaaggttactaagtgcaaaagcagaatttaaatccagggattctggatacttttaactgctgtgttagtccattttcacactgctataaagagatacccatgactgagtaatttacaaaggaaagaggtttaatcgactcacaatttcacatggctagggagagttcaggaaacttagagtcatggcagaaggtgaaggggaagcaaggaccttctccacatggtggcaggagagagaagagcaaagggggaagagccccttataaaaccattagatctcgtgagaattcactcactatcacgacaacggcataggagaaaccacccccattgttcaatcacctcccaccaggtcccttctttgacacatggggattacagtttgagaagagatttgggtggggacgcagagcctaatcattatcaactaccattaccttttaaattaataatttgcttaatgtgatagtttttgtgtttttatgccagtgtaggtattcaataatgaaaagaggcaagagagaaaaacgcaattgtttcatttattcatatatttatctaagaattatacataacttacttctgaaacactgaggtagctattagattattccagtgcagaagtacatgaaaacatttagaaatggaaaaaaaaaaaaaaactaagtttatctaaaagaagtggaaggaagaacatttttatgaaagatcgttacactcaagcagtaaatctggctgaaatttaactaaatttaaataaatttggctctaagttttataagcaccagtttaaacatagaaatctatagtgtttcatatttttattttctgatggtaggaagattatctgagaaacaaaatttttcctaaacctaatccaaccaaaatgtgaatcttagacaattgtgagaatccttgtatttagaatgctaaatgaaaaaccctgatgccttcagtcgtaatctattgaaaaatatagaagtaatgttgaagtagacagaccatatctttatttttttatatgaccagtggacagaatatgacattgaatcataactcagtgaaggtagcattatcagaggggcaactgagttactgtgagctggggactctactttcaaaagctctgatttaatttaatgacagaactcagaaaatctagatgaatgggacatggatatattagaatagttattcccactctgtttaactgacttttttgcatgaagatgtttccaagaatcttccataatagttttacttttaatacatgttgattgagaagatatatagtgatgtaatgactgcctgccaagctcaataagctaagaaaaccttccaaaatagcacaatgatttgatctgttctataggcttaattaaaaaggccagtggatattagtggacacctaccaaaaacaatgatgtttgttctgatgtaattaatgccgagctgctccttaagaaaaaggagtaacaagaaagttactgactaaagaattcttaggatgattgctaggacgataaccattatgagatataaaatttaaggatatgattattttcactgcaatttttctcctctaaccctataaaaatttactgatcaataatatgtaggaattgaagtacattttaaatacaaatacacagaaatgtacattttgatgtcttctgtgtctaaaaggtactcatttaattttattatctttcattctgtgacattcacattcctgtttttgtttgaaaccggattccaaaagaacagtatttaggatcaaagtgagtttaagagagaagtctcacttttgatttgatctaatatgagtcacacagatggacataagtgaaggattgatgtaaatttgtgtatttctggtaatacagaaaatgagaatatgatctgtctgttttacagtcagagagtttttctccttgattgtgaacattagtacagttgaccgtgttgagtaatctttaaatggttttaaatatgaaaagactttcattgagatgattattttctgaaatatgggtcaatcttctcagttctccatagctctaacttctggcattacaaagtcacttgcaactagtttaccttgaaaatatggggaatatatggccattgacaaggaaagtatttatattaagctagaaaaatattttcattattagaaaacacattcaggaaggaaaaaaggacctcctatagttttcttgtaaaggtaattgtaccaaaagcatagggtaactatattttatagaagaagtagaaataaaactctgacaaagaagtagtaagttaaatctcaaacctaatgcattaaatgttgcttgatgttcatgctaattagaggcattataaatcttaaatcctaatatgtgtcttttttctgaactgtatttagaaagcatgtctgacctctaattacatctattcatttaatagattcttgaaaatcatctgacttatatggatatacctttaacagtatatgccttcaaaagataaagaattatatatatttatcaaatactaatgactagtatcaactttaaacattttagggatgttaatgctattacaaattctgggcattgcaaaagtgttaaaatataagctatgacattgagagacaaagtctgttaggtttccagaagtttataaatcatttcattagtgtatgtcaacaggcctatacaagcaaactagaaaaagactgctttctaataaccaaagttatgagtccaatttaaatgctttttctgaatagatttagcaatgagtaaaggagcactggatataaatacaactataataaaatttaactttttctcatttatatttaatgactgttgagaataagatttgtgctgatgcttgtgtattaagtacttattttgtcaatgatatatttgtggcatttacacatcagactctttgttttgaattttgctttgttttactaccgttataattctggctgtcggttttattgtcattatcatttatcaatatgctagatacacacattttaaaacatgtaccttaataaaatactggatattttagcaatcatgggttttctagtatctttggtcatatttcatatttatactatagcaagatgaaactgttgtttagcagtgcaatatgtgtcaacctttctttagagataatctctacattttattcaaatattaatctcttctaatatatcagcatctgataatgtgaaggtttctcttgttagtctttttcatcccttgtcttggagttgctttcacatatttatatagagtgtaattatagtaatactcaagtacttaacatgtatcagtaggattatgatctcattttagggactcgatagctcacatttctatttccttgtggacattaagtaagtaatcaagagggcggacatacttttacagtatataatgacttcttaaatataatattaaagaaaaatttttgcttcttttatttttgctttccatgtcctattgtaaatctggtttatggtcaatatcatatctctcctttgaatatgaagtaactgcttaaaggtctggatatgttgtttttatttgcccatgattttcccagaatctcacattttcttataaaatttatgttcagttaatcagtgaaggaaatgttacaacacagaaaaactcttgaataaaataaaaataaaataagatatacatagacaaaggactggtaagtgaaggttaaaaaaaaaaataccagtgagaaaccgtgatgtgtagtgattacaagagcataaaatatctgtgtgtaagaaggcgaggcacagtggctcacacccatactctcagtgctttgagtggtcgaggtggaaggatttcttgagcccaggaagttcagacaacctggtgcaacatattgagaccctgtctgtacaaaaaacattaaaaaattagccgggtgttatggcacacacctgtactctcagctactcagggggctgaggtggaaggagcacttgagacctggaggtcaaagctgtagtgaaccatgattgtgccattgcactccagcctgggtgatagagtaagaccttgtctcaaaactaaataaatatataaataaaatgtaggtaaatatttacgtttatacatttatatgtataaatacatatatagagagaaaacattaatagaaatgtgaaatggaacctctgtagacccaatatttggtataaaaattcaatagacagataatgaaagtagtcccatgtctcaagtgttccagagaaaacaaagtgttttcttatatacatatattatgctcattaggaccaatatgttgggaatttaaaaatacattcattttataccttatttaaaaaaattcctttgtgtcctcagcttcatggttgtggattcaaatatgacaaaatgccctgaggaagtgatatcgttaggtacaccctcagttcccgaggaagtgtgggtagtgcactcttaagccattgatgagcctggagcctgagatcatgaaagtttatttcatggcccatatgctgaatctagcctgtagacacattttgccccatacagtgcttttaaaattcaattaatttttagtaattaagaatggaaaggttttacctggaaggttcatgatcaacttctgtgaaggaaatcggaagctgggacaagagtgcgcccacatttcacaaggcagcaacctgctgtcactgagcatggcctgcggtccctcttcaggtggtgggcactctccaccgggccccaggccccatatggccttctcactcatctaaattacctgacacctctgagcatttgtattcgcaccacatgtttattttatatattattatttatttatttatttttagagacagggtctcactctgtcatccagggtggtgtgcagtggctcagtcatcgttcactgtagcctcacgctcctggactcaagtgatcctctcacctcagcctcccaagcagctgggactacaggcatgctccaccatgcccagctgatttttttaagttttattattttgtagagacagggttttgctatgttgcctgggctggtctcgaacccctgacttcaagccatcctcccaacttggcctcccaaagtgctggggttacagatgtgagttaccatgcctaagcctgaaccacaagtttaaaatctaataaatgaagttaacctccgaaccatttcaaaagaaggataaggaaagaacaggagagaaccccctgtacattagatgaagacactttgcatcaagtcgtctagccaacctttagctttgtgcaagaataaaaaggacagtgtactctctgagacttggatgtgcctacttaagtcattatttagaaggaaggggctcttaatagaaacaagcagaattagatgatcagacaaagcttgtgtcactaaacaagaatgaaatattgagaccaaccgggaatttactcaagacaaattaaaagcaaaaagtaaacagtttaagtaagaaaaagttaattaggtttccaagatgttttcaatcaatgtcaatttattattagcattaggcagggaagaaatgcgtaacaagcaattattatcccgagagcagcccttcagtgttgtctgtgtttctaattcttgaccatactgtagtccggtttggtttgagtcaggagttaacacaaactttcttgtttcccaggaaattgggagaaagaaagaagcaaataaaactaggaaaaaaatcagtgactgcatacataggcatatgtgtgcatttttagcctgagaaacccttttatcatgtgaatattaggttaggtcctatcataattttcccatctatctggtcactcttgtttccattattgctcctgccagtgcttttggtatttcccttttagaaataatgcattttccatttgctttgcagtttgcctatttgtgttttgttcccctctgtccctctgcctcttgcttctcaatcttttatcttctttcgcttccacctttcaatctaaatgattgtgttaggtcacccactgggcaggtactggggaaaaaaatgtgatactctgttcagaaggtaagctcccagaggcatcaaatcaatgagactctcaaggcctgtgatttttaaaaagagagagagaaaagatgatgaaggcaactagaaatatgaagcactgattatttgtgaccttaagcatcagtccaaacatatattcctttacacacacacacacacacacacacacacacacacagacacacacacacacatatatatacacaggctgacttaccagaggaataaaattatcattaggaattctacaaatcattcttgcagactgctttaacaaagggcattttttaaagccatagtacacagacataactataaaagaaaaggaaagcaatacattttctccaaaggcttcttttgaactacaaattatactgtattatatgtatttttaaatatttttgctgaggttgccactttagatgttttaaagcacactttagatgtttttttactcctctgctatgaagtattattgttctctttttttctttaaatataaatggaattcttatttaaacttgagggaatatgaacatatgttcagccacagcacattgagacatgccataatatcaagggtaatgatcaaaatgttttacaattgggaaagcataggcactcaccaatcagagcagacagtggccaagaacaatgtacgattagatgtgccagcgacaccctgactcagccttgtgtataatggatagaggggaactgataggcttaggtgtggactagaaagtttaggttactaattattctagttcatttgagtaaggtgttttaaactgaatagactttccattctttgttacagctgataaacagctcttccaaattgtctgttgaatagatgacatggctaacatgagaattatagatgatctctttaagttaccatatttctgataagtgtatcctataaacttcttaatttttgtagtagtttagctttgtggcactagagaggatattttgtttgtattaggtgtagttctttaaataatttaacatagtttagagattagaagtcattatttgtaagtgatagagttttgttttgttttgtttttcctttcttacacctcttcttcaaaatgtgggctggtaagaaaaaatgctgagtgattctgtttgcctgttaggttttgttattggcgtaaaggtaggatttcataaatttaattggaaataattttgaatgttacatgtagtgctagagagtaagttcctactcagttgtaaataacaatacttttaggtattttgtacttattatgcttttggcaatatttcaagtgctttatgtaaattatattatttattactaacaaccatatcatgaagtaaagaattttttccttaaaattgaattcagaggccgatatactttatacttattagttctactatatcttgtgtagatgttctactactccagagcaggatttataacattgtacttgccctgtacacaaagaggttaacttggacaaggtaaaggagcttgttttccactaagctggtacatgtgtacagatttcgaaaggtttaagcaggttacgctaatggaagaactttgtgaatactcctggtgattgtgagttcaatccattgcctccctgtttttagtaccagggcagccactaaacttcaaagcagaacctgagtctgaaacaagtattttgctctcttggacacctccacgttcagataccattgccaactatgaactggtctacaaagatggggagcatggagaggaggtaagactatagtgcttctcaccttgggaattattcattacgtggggccacttttttatttttgtgtatttatccacattcttggtcagagagctattgaggaccttgatggaaaagatttactaattaaaagaggaacttgactccccctcccccccaagaaaaaccccaaaacaacaacaatgacaaaaaacagtggttatttggaggctttggggaaaaacaaaacaaaataactcttgttcctgttggaatgtgcttctgacagagttccaagttccatagatgtatcaggttatggaagaataaatactcaatgagacttgaggactttctcttcttcatgaaagtatttaagtcactgtggggacaggtgactaaattagctctatatgttaatgaaagtccttggctagatgaatttttccaccctggtttcaaagattccccaatagcaaatgtttgtttgctaaaaagtatttggtatgaaggtgagtgtgtataacatttgagtatgctgtgcaaatgaaataacagattgtagaaggcatggcaattgttgatcgtcactgaaaagagaaatgaaaatcaatataattaactcattaatgggcactgttctaagggtttcaccatcaataatgcatgtaatttttatagtagcactggagctagcctttcttattaatcgatttgacgtataataaaatggaggcatggaaaaaaagttaaataatttgctcaaagtctcgcactagtggatggcagagctgggatttgagtctaggcagtcgagttccagagtctgtgttgttaacggttagggtctactgcttcttgagtgcagtttgaatacatgatagaaatcgatattaagatacatctaacattttcagaatgagaatacataatagtagtaagtatgtttcttttattattgttaaatccaatggggaacattaggacaaaaggagttaatggcactgtgtttgagaacttcacacatatattcattttattatgcctcttagcattttttatctgaaaaaaaaatcttcacaaagtgaaacagtccctgtgttctaataaagaatatcttttaaaaaactcacatgctaaatgaactactctcaattaacttgtagtacataattttggatgttataataaattaatatgttcttgtaaacttctgttttattccatctgtttgaattgagcagaatctcaaaagaataggttttaaatgcagtggttttagatttagctaacaaagccaatataaatcaagcactcaaaaagttatatagttgaaatgcagatatgacttaaagttttcatggtacaacttgagctattggtgttttctgtaaggtgtaaatcagcactgaattgtttaaaccttcatcacgaccaccaaactaaaatacaggcatacatagacacaaacatacatatatacaaagagtaaaggagaattgtgatgcttaaatgttggcatagctactgtgctccacaattgcttatttagggaatttctttatttcttacttggtggatctaaaattcctgaaaacttttgtatttgtaagtcagaacaccctagggatggtttctctagttttatatttgaatttttcttcttcttcttcttctttttttttttttttttttttgagacagagtctcctcactctgtcgcctagactggagtgcagtggcgcgatctctgctcactgcaagctctgcctcctgggttcacgccatcctcctgcctcagcctcccaagtagctgggaccacaggcgcccaccaccacacccggctaattttttgtatttttaggagagatgggatttcaccatgttagccaggatggtctcgatctcctgacctcatgttccgcccgccttggcctcccaaagtggtgggattacaggcgtgagccaccgtgcccggccttgaattcttcttaactgatttgtttgtgtgaatagcaaacactatttgataaagtgttaagattacacacaccattactagattatgtattcacttgcattttaaggtttactgcaggctgatgttcaagattgattacccatagacacttatatttttgctaaatgacaaattttaagcacggaaggtgagagttatagcatttgattaacgaaatcgtatatcaaaagtccacaaacatttgtgaatctattttttttctggctgtgggttctttattcacaaagaaagtaaggttttcagttattttagatcaacctagggtagtaatgtggtttcagataaattattcaactttctttagtgactaacgtgatattttacccattaaaacttggcaatttcaaatctcttttatagcaacctcctgtaaattgtatactggttactgttgctacttctggtcatgttttctttgcctccaattgagatttcagaaggtcatgggagatgagtagacatctgttcaattaaaattgcacatgttgggcagattccactaccaggggcaggtgtcattttctattgtgatctgtgtcacagcaacatacacacatttaacggcagaacatactcatgggtgttggcctctcaatcttcgtcttatctgatgtatttggctgactgtgtcaacattaaaaagatctctgacttcccttattccagttacctttgtagaaacttgccttttaaactgatattttcattatataatttccttagtatagccctggatactcactattgactcttttggtgatattttgatgagattataatcctgatgatagaaatctgatggtccagacagtatgattaaaaagtatttgcatgaaccttaatgaagatgaccacattctcttattgcttccagcaacgaattaccattgagccagggacatcatataggctgcaaggactgaaaccaaacagcttatactatttccgtctggctgcacgctcccctcaaggcctgggtgcttctactgcagaaatatcagctagaaccatgcagtcaagtaggtgtctctctttgcttactttctgcctttttatttcctcggggagatgttgctagctttcaccttcaccaataagcaaacctgctaatatgcttaatagttagtctctaggttagtatgcatcacacttcacaggtgaaagtgtaactgtgacttcttttggtctcatcacttgatccaaataacagatcccaccttcccacttcctacactgaaagacttttaaagaaggtagtagacgtccatgggtgaaatgtgggttaaaggagttagatcaagccctgtttaatgaattacaagtctttaaagcaaaattcacattgagaaccctgtaaaataatcataggagggcttcgcaaatgaaagaggctgcaaaagacaaaaaaaaactttatttttttaagcacacaggctttagctttgcaatcaaacaagtccttatttcatgtatttgtttctactaagaaaagctcagctctgatgacttgtttcttattaactctgtgtgtagtacctgtggaaatttggaacattgacagaaaatctgtatgtggacaaattaagaaacaatggaataatcgcaaacatatttgcaattctaaattgtattttgtttcctggggttcaatttctttttggagctgttacccttaagcatagctgtgtttatcacaatgggggttaattgttcccagggcagattgttttgcataaagtattatacaggattttgtttttggtggaaagtttggtggcttattattattaattgctttttattagtatgtgtttacagttcattcataaaaaatactatttaccttgaattgaagagttttgttgagttattttcttagatttctttgtgtgatattttgtctttactttttgacatagtgaattatacaatagatatctgtagtagaaatacattgaattttgtcaagaagatgctctgttaacctcatatttagacctatcagcaaacatgaaatttgtgatttaaaagattcatttccttccatacaaataagcaagttttccaccatttcattttctatagaaacttgaaaactttcagggttttttgataataaaatttatgtttttccctctttaaagcatgattattcacatgaaaatgattaggatcatgtttaatctattagtgattatcgtttattcccataaaattttctttcatttaaaggcgtaagcatgtaaattaatgcgttctctgtatgtctgctttgaattccaggcaggctaataaatagtattgtagaagataatttctaaaaaccaagcctttaattaagagaaatgttacatgcttcaatattatatttcccatggtttacaaacctcagtttttaacatatgtgtgtgtgtgtatatatatatatatacacacacacatacatattgaatagactttttataagcacatcaaacacttatctattccttattttattaaagtaaaattttcaaatggtgttgaatatattctcacaaaataggaggtctgaagatagccctagtgaaaaccaaatcagctttttaaaaagaattacagatgagtccttgctgttacatgaacaactcaatttattatgaataatgataatgcatgtaaaatagttttataatttgagatataagaacccctagtcagaatcaataaaaatgagattctagtggttttgcaaatcttattccaaatttacaaggctgtcctatgaggatttcttttttgtcagtacagagagcttttattttgatggactgtaataatgaacacaaggcacgtacattaagaaagactgataatcccctgaacaattggatacacctggcactccgtaatgttaagagtcacaaagtctagggaaatccccagactacacattcaaatatgaaatataggattgctttattcagtctaccatatacattgctttaaaaatatatgcgtgtgtgtatggacttgtgttatctttgcccacttgtttgtttttctttaggaacataatattattaagttttaaataatgatagtaattgtgctgtcttttattgatttttaattttttaaaatcataatgcttggttaatttgatggaaaatgattgctcagaaagtgactagtttaatttagaatgggcagtaagaaagtatgtcttctaattctaatataaaccctacattgtatgaataattatgtacaaaatgaaagaaattttgcacagaaattatatcttttccagttgatacttgggtttttaaaaaaacagttctttttaatggctgtgttattgacattttgtaagggataaatgattattattgattttaccaaattttgctggtggggtctaattcttcactagcaatggtgtctcaagaagagttataattaaaaagctgaaagctgacgtagggtaagtacaagttacagtcagaatcaacaatcctgacattaccctcgggtaggtaaatcttggactctgcattttcatcctttattgattctgcatgctcactgtatatgggctatgatcaatgttaacattttttttattattaaaactggtcaggcaaactcagtttttcagatagagtgaaccctcttatgtttgttgtttatttatttttaattggaactggtagaagggcattagcagttattgcaacttttcacacttaagaagcctttcacaaatgagtactgtatgtaaaccatcctcattctagaatatagaagtgaaagcttggaaacatctgtgaggcatcatcagaccctcaagtaaatactagcactatttgcagcttttttgaagctgggtagtcagtatagtgggggtgggagatactgagggattggtttagaagaatttttatcgcaggtaggtaattttatttgaggctccattatctcgaggtctcattttcacatattccccctacccattatttaacaattatttttggtcattaattctctttttggtttattcatattactaagccaaggtacataatttgtcattagaatttaagtttcaaagccttattttcattttgtccttattgttcgtttatttatttttgccttttcttttgttttatcattttttttttcaaccactcctgtcctttcacttaaatcctcctttaactcactaccaaaataagagccgtcagctcctcctcaagacattagttgcaccagcccaagttccactagtattttggtaagttggcaacctccaccagtggaaaaacagaatggcattatcactgaatactccatcaagtacactgcagtggatggggaagatgacaagcctcacgagattttgggaattccttcggacactaccaaataccttttggaacagctggaaaaatggactgaataccggatcactgtgacagcccatacagatgtcggccctggccctgagagcttgtccgtgttgattcgaaccaatgaagatggtatgttgcctccgctacgtcagtttgcacccttctgacacagtcttgatctgctgtctttcaataggctcacagtaatcttttttctctgctcatctttttacccagcattgctgttactttagtatttttgccaaagacttgtctttgctacagcctggccttttttttttttttttttttttttttttttttcatttttttcaatctcaatgcagtaatttgcttctctttaaaagaactgttggctcctatggtcttgcagtccagcccgtctctgtgcctccatctaaagtcttctgtgtttttcttggctttttgtagtcacttcttttacattttgaagttaacttttcaaaactaccttcttacctttttgttgcctttttgtcttacatatttcagagacattgatgctcaacattgaatttttggcatcttttgtatggaataactttgatatgagaaaaaaagagaagataatacatataatcaagaatctttttattctgccgtttaaaaagaaacctttaaaaaacacacaacaatcaacagccagtttttgttattatttcaatgctatacctctttgtgctttaatgctttgaacctcaaagcatcttccttggcttttgtacattttttacatgtttttctatttctctgatactctttttttcttccattttttttttttttttttgcatcggtcatgttttttgatcttttcttaaaaggtagagcagattggttaagcattttcattggttgaaaatgtttgtattcttcaaagaaaacatagtgggtttacccattttttgaaagagaaacctaagtaaagaaaatgcagaaaatgctctgatagggtgggacaagtgcctataatttcttttatccaatgatgttgttccagttcctagtggtcctcctcgcaaagtcgaggtagaggctgtcaactcaacatctgttaaagtctcatggcgctcacccgtgcccaataaacagcatggccagataagaggatatcaggtgcattatgtgaggatggaaaatggtgagcccaagggccagcccatgctgaaagatgtcatgctggctgatgcacaggtaagcctctgaaattatgtacctctgtttttatataataagtttatcttagttcatatcctgaaattgctcttattttagtttttcgacatttaaaaaatcctatacaaaattctagttttcatttcacattgatgtatattgatcttttcaatcagagttactatcaagtgaggaagggaattgtaatgaaatgacactcaagtctgattaaaaacatgttactttttccttaaaatacagatattcaaccctttacaaccatatttgagtttgcctttctgacttcaaaaaatgattgacttagttgagtcaaagggaagatttctaaactgcaattttgctgatggagtctactttcttctgtgctaaaacaacttgcaacttagttgttctaatttctaaatgtgtgtcttcttccactgaagaatagacatttttattcagggacaggtactcagtattatatttagtacttcttcatcaaattacatatttgatgaaactcattgtttcatgtcccagcaaatgaagatcgttacaatgatattaaaaattaaatcagaatttcctagcaaataagtgggatccttacgttgaaccaaggtttaaaaaaaaggtactaaaaatgagtagttgagtatgtgagaaattgtattgatcttagggcagtggtttgcaactatggtatcacaacccggttttataattagttgtttaaaacagagcattgaaaatttccaaaatttttcataaattagaggtgattcaaagatagtcccataataaattcgcttgagttttacatattttcctgaaaggaagatgaagatttcatcttgtaaccaccatgctgaaaattgtacatgactcatgtactggcttacctttgctgtgtcaaatggtgatgagatgtcatggggataggatattatgatcattggaatactttcattatccaagaaattggtgacttggcagggaaaaggatggagtttgtaaaaacatttgaaatttatttcaaatgaaaatgcgtttctttgtgtgaaagttggaaaggttatgaagcaagttgaaaactgcggcaccaggttgcccagttctacgttctcgtctgtaaaggcggacggatcccctggtcaagagatcgagaccatcctgctcaacatggtgaaaccccatctctactaaaaatacaaaaattagccaggcgtggcggcacacgcctgtgtggtcccagctactagggaggctgaggcaggagaattacttgaacccaggaggtggagtttgcagtgagccaagatcgcaccactgcactccagcctggcaacagaggaagattgcatctcaaaaaataaaattaaaaaaataaaaaaataagacagcaataaatatccctgtgcctctaaggaaagtacttacccccaaagtcttaatacaagtcaactctcagaagtctttatgttttcttcagttttgaaacattctaagtaaagggatctggattcattgctcacttatctaccccgaggccacttctgtaaatgcagtagtgcttcgtaataccccttcaacactggaaaggggccattgacttgatttgtataaataattattatgtagtgcctataaaaagaaagttatcgtagtataaaattaaagccatcattgctacgttttatcttgtaagtctacaattatggaaaagaaaacaatatgaccagtgtgctttggtgttctcctttggttcttagatattttacattacagaactgtaattctctccctagttccattgcaaaatatggtagttaacgaaattatataataccaaatgcattaaatgtgaactctgtctttttttctcttcttctttggcttttctttattaattgctgtttttccttgtgtattttctttctttcccatctcatttactttccttgactcttcactgaaatttcattacatctcacaggacttcattgaagttataagtgtcaaatataatgaaagatattaatctaaatagtgacttttaattgtgtaacttaagatagaagtcaaaataaatacgagtaggatatgattagaaacattaactttttctgtgcctcattgctatgtttcagtgaaccatacatttaaagaatgttagctggttttagtgataacagtaacaaaggatatttaatttgacttcccaatcagaggtggaggtggcagcaaatcacacattctttggaattttattgtacacactgctttatttttttgatttttttaatctaacaagggcaacactgcctgtataaggctttaaattctttttctttttattttgttttcctcccaaccttcttattctcaatcagtgggaatttgatgatactactgaacatgtgagtaatttttgactgttttgtcaaaagcagactatatatgcttgttttctctgacatcctttcacttatttgtgatctgtcatcacagtttgcttggatgcatgaactaacaaattatttttaagttatcttcactgtgtggtgcactttttattttggtttttgttttgtgaaatcagcatggtgctattgactgcgtaagaaatgtcatgggcttgtgatatttgttttgatggctgctactaactctgccttgtgacagtcagaggaggcatgctttaaaacacaggggtgttgtctaatcttttggcttctctgggccacattggaagaagaatggtcttggaccacacataaaatacactaacattaactacagctgatgagctaaaacagaaaaaaatctcataatgttttaagaaagtttacaagtttgtgttgggctgcatgttggataagcctgctttaaatgaaggcattgcagactggagatgtcagattgtttggtgtaggctgctcataatgctcataaatctgactccaggatcgcatatccagtagataacaagatatagatctggcactgattaactctaactagaagtggctgttcttcactttacccatacatatttgaatggtgaatggattatgccaagaagtagaaagtatgtcgctgagggaggaatgtttttaaaatatttgaatgaaaactctatgttatttattgagggactgttatgtatatgccactgcaagggacacatgatgtgacacctgcctttctagtgtttacattctaagtggctagggaagagtaaagttctgaaaagtttcatagaacgcagcaaaatatatggcctacagcagtggaccatgcattagtaaattagtggacagtgtcaataaaagctatgaattcagagacagtggtccaagatagtaaaagaagtcctgaagcttagttgagaatttaagggatgactaaagactgaataagtgaaaaagtgtgtgtgtgtgtgtgtgtttgtgtgtgtgtgtgtgtgtgtgtgtgtgtgtgtgtgtgttggagagttggaggtggaacatacatattttttaaagttgatcacagcaaaaccagtcattgagacagttgagcatgtggtatagtcacgtgacagtgagcctgacaatttgatataaatgaaggcttcgtgttaagtaactcagtggtaaatagagctaagaggtaaactataatataatactgggaaaaccagaagagtcaagctaaaaagctggccggtcagtctttaactcttcaatattagagtgatatagaagaaataaaaagaaaaatgagttaaaggctggcaagacggtattcttccattcactgaatgaatatttactgccaatgcacatggctcttgttgggaatcttgtaactgtgtgcaaggtatcagttctcatgggattgccagtgcagcagcatttttgaccgtaaacttctttgactataactcacagtaagaaatacattattgtatgtcatgattcaatgcacacctctgtttaactaaaataaaatttttatagaaccatgctttaaatgtataataaacactaacattaagtattcaagtttattccacttcattttctgtttgtttgtttctttgtttaaattctggtcatgactgactaaattgatttcacaacctactaaatgggtcattacctgcagtttaaaatccagtgacttagtggatagattagagagtaaaaaggtggcagataggaaagcaggtaaaaagagttattttgctaatttagtcatgaagtgataaaaatgcaacagagttgaggcagtagaaatgaaaaagtgatagttaggatcaataaaaggaagaattggcaaaaacttgctaagaactgaggaagagaaagaggtcaaagatagctcataagttttgcagatgtgttaccgttcattaaaatatggaagtaaggagggggagtctacttccaggaatgatttttaagttttagttcatttgaacttgaagtaacactgggtagtcacaggaaaacatctagcagatatttacaatgtatatgccactggagctcagattggaagtcacagctggaaataaatcaggaatatgggcagaaataattatttaaggtttagaaatgaatgcagtttcttttttaagattagagaaacagtagaccagtgactgtgacagaacctcaggtatgccaacttttaacagtcagggacaagaagcaaagtggagacaggacaggaggaaacaaagagaatgaggaattatggccataatatcaggcacatcacctcacagagcatactgaaacaaccaaggaaggaagtgcacccaccacttaaagaaagaaaatgtaatccaagaaaggatatgaccgtggcagttggaggtgtgtccagccgagattataccactgcagggaacttgacgcatttcaaattgcgttatgtctgttatcctctaacaacctgggcaagataatggatatgtgtggttaactccaatttcatgataagaaacatataagtctcagagtgcataatttcttgctacaaaatttggtgatggaagcaagccttgctgctttttccagttagccatgactgcttttcagcagtactccagtggcatgtgaggggaaccttggaaaccataatgttggcatttactcatgatagtttttgggatagccagtgtgtctgctgtcatttaaaatactgctcttgggtagtttacttggtttttctatcctctggaatgttagggaaaccattccaaggtcctggaaatacaacatttctcccaaatagtccatttatctggcagaataaaatttccagtgactcttcaggatgatatctgaacttcttgaatttccacagtgagatattcctactcttttgagaaagcatgttcccagaaactgtcatatttgggatcagcttcaacaattgagctctacggtatctgttacagccttgctaaaaaaaaacctactgtatttcacacaatataattcgtactcgtcactcacattgtctttagatttggaagacaatgacattgtgcattttcctaaatttatccatattcaatttgaaaacacagctgtgccaaaaatctgaaagggtttttatattgctgtgtgtgtgtgtgtgtgtgtgtgtgtgtgtgtctgtgtgtctgtgtgtgtctgtgtgtgtgcgcatgtgtctgtgtacgcgcgcatgtgtacatgcagctctggtatttgttcttaaaatactagaataagctaatagccagaatctctaaagaatcccataacctgcagtttaaaggaatatatcaaagagcatctggtcttataaccaccacagctttgggccctgactaagagaaaactaagaatttaggtaaatagtatgtgatatttaacaatttttagaaagtcaaaataaattgagcacatactagtgatgtggtaaaactaaagtcctgttgtattctttgcttttatggctgctttttaatgtgtgtgaaaattctcctcagtggataatgatttctgctcatagcctatacaaataaccaataaaaatgataatacaatccattaataagagagtcctaagaaaattctctctcagggtatctaggtccaacaacaaccatttggcaaaattcgtctatagtgataaaacagactatgctggcatcagccccatctgtagtctgtgggttacagtggatatgtgtggagagctgttggcataaaataatcactctttaatggaatgcttcctataagccaggcatagttctgtgagtttacctgatataactcatataatcctatggggtcctattataattccaacattcagatgggaaatggaggcacagataggtaaacatacttggtctgtccaagctagtaaggacatgcaagtttaagtttaagaattcaggaagtctggctccagatttcatgtctttgactaataccctaagatctacctcccaagatgcctgaagatgccccttcgatatcagcatgaaaacagatctccatagcatgagctcaggcatgaaatttccagggcttagcatggctgcaagggatgtgcgagcatttgcagaatgaaggcagacggccttgtttttcccccagagcattagtagcatgttttgaatcagtgacattctattttgtcatttcaggacatgatcatttctgggctccagcctgaaacttcctactccctcaccgtcacagcctacacaaccaaaggagatggtgctcgcagcaagcccaaactggtgtccaccactggggcaggtaatcatgtctgtgcatgtatgtgccttgaacagtaatactaactttttaaatggtataggtagcttctagcaggcttttattatagtaaaatcagaggaaataaatggactatggtcaacttttgtgtttttagttcaggggtaaaaaaaaaaaaatagatcagggaaaaaaatagtccaagtgcataatttgtccaaactattcaatcagtcattcaataagtattttttttttttttttttttgagcaccttctgtgtgtcaggcactgttaccagcactggggatgaagcaatcaacaaaacagaacaagaatctacactcatgaaattcactttctgaataggactagataattaacaagtgacaaaacgagtatataataaaatgtcagaaagtggtaaggtgaaaagtaaaagcgtataggcaattaaggatcaggcagcctctaggggctgagaagttctggtagaggaaggattatttaagtcgagactcaaatgacgtgaaggatcaagtcccatgaagatctggagggaagggatctgggcagggaagtcaagcaacaatgtcaacttccctggaaaacaaatccccttagaagagctgccatcttgaactgggttcatgacttacagttctaccttttgtcattttgtcttccccaccccctgctgtggggattctaaagaagccaaactgaacaaaagatagaaaacaaaaaagaaaaagaagaaaagcaagaaggctaaatagtataaaattactcccctctaaagaataaggtttcttcaatgctttttaggatgactttggtcagccacagtaggaaaagccagcatgaaggaaaatctggcattgtagaatgagtaaattaagagataattgcagaaggattctcctcaatcctcatatatggcaatctcccgtgaacatgtaaaccatgatttgatttactctgcccgaatcacttctcaaatatctttttaggaacatacctctatgtaaaggcataaagtaaagaacagctgtgatgttgagtgccctcctgcgtgccatgctcactgccagctttgtctaaatgtcataagatttgcctcgctcgcatcctgccacctggaattgcctcaaacagcaggattacagatggcaaaactccttcaaggctgagtcttctgggcttttttttttttttttttttaaataccattgtatcaagctaatttaatgccctgaagagcaggcatgtattcagtgaggggcatgatggcatgatgactatctggctgtggatccagtctctgttagaacgtcaacaacaaagaattgaatctcaaatggaagaaaatacattttatttacctacacttataaatatgtcataataactctgaaatgttttatatgaagcaccactcccctgttgcccattaaatggggtcatgttatgatgacaagaaagtagtggatttatagccgaggaatatgaattttagagaaaggaatgattttgtctattttaacgtcactaaggctagctcatccctttttatttaccatgcagtagacattttagaattttggaacttattcacatatagaattcctttggaattttcattcacaattttagatccttcttaatcaatagaggcttcggtattgagatagaaaatgcttgtaatttagatgcctacacgtttacttttgtaagacctccccactgcatctgggaagaaggcagaagaatccaaatttaattcctttaagagcgaagctctagttttcctttgcataagcagccgctactcatggtttatccctaggcaattagtgaatatatcaatttgttttgtctactgtattaaaaatcctcgtatatttatgtgactgtgaagaattactgagtttatctcacagatgtgagctcctaataaccataattgtaaaggtatttagttacagctcccacaaagaattcaggaattcttgtgaaattttattttaatagtaaacttcctgattgtgggatatttgtttattataccttgtttctacaacctgtaaagaatcatatcttggaaacgagtactgatcataatttaagtaatctacgtaagattcatataacctcaaggatgcttctgaagaaaatgttggctcttatgtttcaatgcttatgaaatatttgtattttctttgttaatcctcccattattctgtattgtaataattagtttactgtctgagttcttgaggttaaaggcaaacagaaaattcattggtttgacattttctgtatatttttacatgaatttcagtactatattgaacagctatgtttaaggataatcaaaagatgactgtgacagggagaatttggaaatattagcccaagtctagtcaattgtgattgttgttgcgttggtactagtttaaattggggctaaatttagagccactgggactgagtacctcggttgatctccaatgattccaattgctaaaaagtaaagggcaaccacacatacgtaccaattctgaagtcctaggaaatttttaaaagaatgtaagagaataagaaaatgtaaaagggagaagagtttatatgtcatgacgtaagttttagagttatttactttgtaactggaccttctctgcttcttccaatgtgttcattaagaccctgctgaaaaatgaccttccaactcccctgagtaattatttaagaccctttcatcttaccaaccctcaagctccagtgctggagtgagcagaaccattgaaccaacagctggcatgacttataaaagtagtctacagaataaccctaaggcattagaaacctgactccacagattgcacaatctattccacctgattattttcccaactagaatatgcctgtattagagaacatggaccctgctgcatccgtctttatttcctcactcaactacctgtgtgccagtgtacaagtatttgcacaaagtgaattgttggtaaatgtttgatacctatagtgtttctggaagccaggaatgcagtgagttccattgccaatctgtggagtttgggagaattctttttaactatgtattcaatgatgtagaactctcctcattccttttcccttttttatcctatcctgattccctggataaaataccacaactgtcccaaacccttactccagcctgtttaaactgcatttactgtttctattattcacatgcttatggaaattttaggcatcgcttcgtgtgacccttcatgtggccagcctctcctgaggtgatattgggtgttcttccccaagctgcataagcattcatttctttactgagtccttcctttatgctttgtggcacttccaggctggttgtctcatagttttcaggcttagtaaaacttctgcccagggaaggaatgactgttgtgggtttggcaatagagagcagactgagatcctcctgtacagcaggggaagccagtaggtcagagctaatgctcttatttctatatcattactttgatctcgtgattcctagccaacaagcctttctgtcccaggataagaaaggtcatgccaacatcaaaaacaaaagagattactccatcctaagctttaactcccacagaagagtaaatgtatacatctacaaagtcagtgggttttttcctagactttgccagcccattagatttatccaaatgtgtaccatagcaatattataaagtgaaacatcagttactaagaacatgctcataaatgacaaatattagaatgcagtctctatttgtggtttagatcaaaaaattatttttatttatcctagctttacgtgcatctcacggaaacaggatacacggtgtatatattattatgcagttcgttggaactagaatttcaaaaaattttaataaatatgtttaatctgttgcctctggagaatattgagaattaatagttgtgtttccacccactcgtttcaacggagtttcatatattgaaggctgtattctctgttgaaagctctatttcaccatggatttttctcagcagagactcaggtgtttaatccttgacaccatcactgacatttggacaaatcatgtaaatgctctatacacataaaggggaattaaagatgtctgccaatgtccctacattaaagtactattttaaaattaagataattgtaaatatattaaaagcaagtggaatagttcacacagtttccaacttatggatgggtggtgttctgagagtgtgtgttggtcgttaagatctctggatgcatttttcctgaggaacacaatgagtacacaatgatgtggttcctgggcctaccttcaacacacatgttttatatatacaacacaacacacatgttttatatatacaacacaacacacatgttttatatgtataacacagcacacatgttgttgaataattatttatctaaaaactttagaaactattgttttcatacattgtagattagctgagttatatcagcatgtgatgaatcttcccagcatgtgaaacaaaactgttgctccattggttaaggaaataaatatcttaatgatatttcttagagcagagcacatctccacttgggtttcactttctgaaatacaaaatgaagaggctaatcagtccatctctgaggttaatattctatgtattgtctcataatctttttagtgatttttttaccttcatctatatccccatggtatgattttttatcacctgtttcccattactgtaagctttcctcctttcctaccatctttctttttcttcacattcataattttgaggcacagtttcactgtcactcaggctggacagcaatggtgtgatcatagctcactgcagcctcaaactctttggctcaagcaattctcccacctcagccccctgagtggctaagactacagacatgtgacaccatgccttcccccctccccccgtagagataaggtcttgctatgttgccaagctgtttgtttgtttgtttgtttgtttgtttttgagacggaatttgctcttgttgcccaggctggagtgcagtggcatgatctcggctcactgcaacctctgcctcccgggttcaagtgatgctcctgcctcagcctcccgagtagctgggattacaggcatgcaccaccacacctggctatttttgtgttttttgtagagacagggtttctccatgttggtcaggctggtctcaaactcccaacctcaggtgatccactgcttcccaaagtgctgggattactggtgtgagccaccacacccagccgctggttttgaactcttgggctcaagcagtcctcccacctcagctcccaaagtgctgggattatagacatgagccaccatacttggcctttcttcttctttctgttaacttggtttagtttttattctgatgatcatccctcaatgtctttcactgtggattccaataataattgctctccattaaaaataaatacagacataataatacattgaatgagtagattagaccttttcacatatctaacttaaaggtaaataaattatgtattcattggaagctagcctttcaccataagaagtttaatattcagattattaataattatggttaatattgatagaatgcagaacctcatgctaagacttttacatgaatttcctcatttattattcataagaacaatataaaatagctcttaatataattcccattttacagatgaagaacttgatgaatgatgtggatagtaaagttagaaagtgcaaattaaattcatagtaagtcaatacgatattattttgtagtttggtttttttttaaacttttaagcaacatagcagcacaattaagcatttaagcagtcgactccagacagaggtgggtttgccttatagatttctcacttgttacatgctagccttggaaagttttctacctctctgggcctcattttctcattatagaagatagagataataataactaatccgagaatgtagtgaggagtcaggaatgtaaaccaattgtgaatactatatgcaatgcacttagcgtgacgccggtacattgcacatattcaacgaataaataatcattatagttattcttattagccatatctaattggctgatctttgctcaaattaatttatctttgatatgaacctttatgtgtgaaggtttaaaacgtgcaggtgtcaaaaaaatccccttaagctgttgtttcaatgataatttctgttttgtgtccattatcaaattctagtatctcagcctactttaataaagtaagacaaggagcatatttccacaaaggtatgtaggtcaaacattgcctgttttgttttgttttggtaagtaagaaaatgggaataccagtagagtggaactccctcatttggcaatgactgaaatgtgaacgttcagattggttggtcttaccactccatcccatgtgctccagttccagggaaacctcggcttgtgattaaccacactcagatgaatactgctcttattcagtggcaccctccggtggacacatttggacctcttcagggctaccgtctaaaatttggccgcaaggatatggagccacttactactcttgagttctctgaaaaagaagatcactttacagctacagacatccacaagggagcatcatacgtcttcaggctctcagccagaaacaaagtgggctttggggaggagatggtgaaggagatttccattccagaagaagtaccaactggattccctcaaaaccttcactcagaaggcaccacttcaacctccgtccagttatcttggcaaccacctgtcctggcagagagaaatggcattatcaccaagtatacccttctttatagggatatcaacatcccccttctcccgatggagcagcttattgttccagctgacaccactatgacactcactggcttaaaaccagataccacatacgatgtaaaagtacgtgctcatacgagcaaagggcccgggccatatagtcccagtgtccagttcaggacactgcctgtggatcaaggtaggatttgtctgcttacggccttcctcctttaaaggattgtcagtctttggaaatcagtattttgaagctataataactgatcagcccattcatattaataggttcagcaaaaacaaaaaggtaaagtatgtaaaacttactacgtcttggatgccttagatttcagttatagaatgtcaagcaagtctggctgacagcaccccaatgtcctcaggtaaggaaaacacaatagagttggctgaattggagagaaaggaaagatctctgtgagaatggggtattaaaatgaatgctctaaacaggtaggaaaatcatacttctctctctgatcaaagtagacagcatctagcataagcccctatggtccatggtggaaaggacaggtcatctgttttaagaatagtttaaatacactgtttttccttttccagcagtgtttgcaaaaaattttcatgtcaaagcagtaatgaagacttccgtgttgctgtcttgggagattccagagaattataactccgccatgcctttcaaagtaagttgttttctaatttgtaagaaatcacagataaaagtagaggggacagtttatctgggtaagttatttgcacagcaagcagaccactttgttttggccacgtgtccttgctattttcatttgtgactttcacatgggagacagtttggtgctttgtaagtgtgtcctttacactctgaagaaggagcaggagcttaaatccagggctggcatcacttgtaggttacctactactttgaacttgaactttttacatctaagctagtgcttttgtttttcagccagagaatgaaatttacatggtttctacctatttatattataataccctgggagtttctgaatttgtttgttggcctgtattcttggcacattttaaactctggcttgccattaagagatgttagcaagtacatatttatgaaataagaaatagagaaacatttttgaaagtaaaagtatatttagaaagaggaaccaaaacctttagaaaataggcaatattcataatacgttgaaacgtagagcttttctgcacatattccattaagatcacatacaactgacaggtctaatattgataagttattttctatatatatatatgtatatatctatctttgtgtatttttgatagacttggaaacattttatcattacacagtaggaaatgacaggaaaattgatgtgatctccagaattatgactactcatggacttagaaatcacctaaaattagaattgactatatatacattttccaaaagctagtgcacattggtttagaaaatatattttgcctctctgataaccagattttttttttattggttttatctctttagattctttatgatgatgggaaaatggtagaagaagtggatggccgagccacacagaagttaattgtcaacctgaagcctgagaaatcatattcatttgtgctgacaaatcgtggaaacagtgctggtgggctgcagcacagggtcacggcaaagactgcaccagatgtattacgtaccaagcctgccttcattgggaagaccaacttggatggcatgattactgtgcaactgcctgaagtacctgcaaatgagaatataaagtaagttgattgaaggcttagggctgaaggaaagaattataggtaaataggaacattatatctcaaaattatagaggtcgtaaaagaagatactgcttaatgtagtgaaagattcttctgctcagactcccagttttgctatccgagttcttttacaacgtgtcctagtattcattgtaacacagattttcattaatttaacagtgagtttttaatctgtattgcagggacagtgttatttaggagaaacagaaaaacatatagaacatggttcttactacaaagctttttgtttgtttgtttgtttgtttgtttttgtttttgtttttgtttttgttttgagacggagtctcgccctgtcacccaggctggagtgcagtggcgcgatctcggctcactgcaacctccacctcccgggttcaagagattcccttgcctcagcgtcacaagtagctgggattgcctcagcctcctgagtagctgggattacaggcacctgtcgccatgtctggctaattttttgtatttttagtagagaccgggtttcaccgtgttagcctggatggtctcaatctcctgaccttgtgatccacctacctcagcctcccaaagtgctaggattataggcatgagccaccgcgcccggctactacaaagcattttatgtcatagtttatggaataaggtgaataggtgattaactctaatatttggcaaaatatttttgtaattatgaagaagtcttacaaagtactaaaaggttgaaaaaaagggggggaaattagataatggtatatgacactgatgtattaaaagtaggaaaaattccaaaaagttaaagttaaaaatgacattggaaaaaatataaacattagaaaattcaagttttctggtttgaatgtagcacagcatagaggccaacaggcctgaagtggaaaattaaatccagtcaattaaataagtttgtccaaggacatatagctagttggttgaataactaatagaagaaaaaagtattttcaccaaaatatatgaactacaagtactgtggtagactccggggaataaaaaaagatggattcctgacttcaaagaccttaccatagagtgagagagatacagagaaacagacagatgtagtaagcgttaatgatagaattatgctttatcttaagagcagctaattcagaatgggtcaataaagtttctgaacttaaatcttaagggataaataggaggcatacaaataataaaagagagactatatgcaaagggagtggtaagtgcataggcccattactaaaggcacccagtggtgccatacggctggatcccagagcgcctggccacaagtggcaagagaaggaagaaggaggcatacaagagccaagggtatacccagaagtgaaaactatatcctctagacaatggcaacccattacagctctttacacaggagagtggcatgataacatttcaataatacataataaaattccattttaggaaatatttgttgagcatctattgtgctacctgtttggaataagaataaatcctttctcatttcttctatctcacaccctcaagtttaggtgaaacttgctatgccaggtttgaaggtcaagcagagaggcatttattcatagttcatgcattgttggaatttggatagatgggagcgccatagagatagtggtagagaaaattattgggaggtggtcacatagttgactctaggcaaataacaagattctaaaggaagatgatgatgatggaagtaggatgcagaggtagacatgagttacactagagtagtagtacagcatacattattggtagctgctttaatgatgagatcaagagagtaaaatatggctctgagttctgagcttggatgacaatgaatgatggtgtcatcctaaaggataaaaaaattcagaagtaaatgagtttaacgttgtgtgtattaatatgaaatatcagtgaaatacctagttagaagtgtgggcttagagaagttattaagattaaagatggccaggcatggtggctcatgcctgtaatcccagcactttgggaggccgaggcgggcagatcacaaggtcaggagttcgagaccagactgaccaaaatggcaaaaccccgtctctactgaaaatacaacaattagccgggcatggtggcgcatgcctgtaatcccagctactcaggagactgaggcgggagaatcgcttgaacctgggaggtggagattacagtgagtcaagattgtgccactgcacttcagcctgagcaacagaggtatactccgtctcaaaaaacaaaacaaaacaaaacagattatagatatgcatttaggagttgttaacaaaatagcaatggtttcgtggaagaagacagaatcattgaagcaatgaggggaaaatgtgaagcaaaagactaaaataaaggtctccgttaataggaagaagagagccagtagaggacacagagagggattattagaaatctaacaggagaactgagccagagcagcatggcaaagggattttctagaaggagaaaaattcaaaaagtggtcaaaaactccccaaactccagaaaacttaaagcagatggctgagaaaatcaggtattaaaaaacaaaatcagaaataagaagttttaaaatagtataatttgtgtaatttaggtataattaataaattcagacctgatacacatcctaaaacaacctttcctgggtacactttcaattattgtttatttgataaaataattgatgaatttcaactaggtgacagaatttcaaaaagattattactaaaatcagtgaaaagaatttctgaaagattattactaaaataaattcagtgaaaagaatttctaaaacattattcccaaaataaattcagtgtaaaataaagtcttcacatttgtctactcttatttttttttttttttttttttttttttgagacggagtctaactctgttgcccaggccggcgtgcagtggcgccatctctgctcactgcaagctccgccttctgggttcaggtcattctcctgcctcagcctctcgagcggctgtgactacaggagcccaccaccacgcctggctaatctttttgtatttttagtagaaatgggatttcaccatgttagccaggttggtctcgatctcctgacctcgtgatccaacccctcagcctcccaaagtgctggggttacaggcgtgagccacggcgcccggcccttcttctattatctagaaatctgaaaatgagaatggagtatttgtgtaatttttatcccaagcaatttcagtatgacagcgggattatattccttgatttgtgtattcattctgaatgtttattaattgatcttgacagataaaggatatttatgaatttttaaaaccactttattgaaatataattgatatgtaagaaactgtgcagatttaatgtatacaactcaatgagtttggggatacgtatttacctataaaaccatcaaggccatagacatatcagttatttcttgatcacataccctaatagtcaacgttaatgtttcagggattcagtagcgacagtgtgtcctttctcattgttctcatacagcatagttaattgggcaatttggacaagcaaagagttcactgaagcagagtcctatagtagagaaaattagatagataagggaggctgtagacgaggctcctaactccggcttattagttcagcagtcctagagaaagtgacaaatgaggctttttaagctgaggcttaaaaagtgacaggaagttagctgggccatgggagtgggagtggagagacagccgttcactcagaggatagagcgtctctgatggtgtagaggcaagagaaagactagcaattgttgtttggccacgttgtacttgtctacctcttaagactttcctgctggcatccaacaaatatatattctatacacactgttttgtcaggactatttctgggaatagaaagatgactgagattaagtcctaccttatagtaagagaatagattcagaaaatagataatgtgaatataatggggtgagtactgccaggtattgtgaaaacataaatatcaagttttagcccaatttgggtgtcaggggaggcctcctgaaggagatcatatctaatctgagtctgatagtgtgagaaagatttaagaaaggtgaaaaagttacaaataatgaaggaacagggaaatgatagactataaattcattccattaaaaaaacatgcatgtctcttcaggaaaagagcagttgaaagaggaaaatagtatagtatattcttcagcatttactattaatttagttttcaatactttcttttatttatataaaaatgaccttttagaggctgttcaccaaattgtgttgctagaatgtgttagctattattggaaattggcacttttagtccattggtggtaaactttagtttcattttccaatttctgaaggagttgagaatattgcagaatgttttctacctttgtcagtttttatttttagcttgttcaattttttttgttttatttatgcactttccgcttctatatttgaaaagggagtcagggaaaaggtataaaactttgacatcacagaaatgagaccattacaaagcagaaaaagaaagcaaactattttggacattttttgttttctaggaatgaataaaagattctcagaaatatattacagccactttggggaagaaatgagtgaaagactaaatcaggaaagtacttgagtgagaaaagtatcaaagaaatggaaaatgaaaagcaaatcttgtagtgaaaagccttagatgatttctatttattggaattcttaaagggataatagtgtaaggttactactcctgttttctagactggttaatgtaacacggtcaggtattacaagaagctccgtgccatgctgtgtcacttgccgtggttggcaagtttagaaattaggaaaggttgtagctttttattcagtattctattagaaaaaatgtgaggaagaaacagaactcattccagaacggtgggcaggttgctaacttttatttagatgaaagctatccagaaaaatgcttcctatttgttttcaagcaaaatgcagttttggtgattgacacctgttttcttgaccaacagaaaccatgctgtcatttctggccaagttaatgaggaggtcttggcccctactccttaactcctcaacaccgaaaaagtgtctaatgatttctaattaatttaatatctctttactttcatacttggttgttgtattttttgtgtgccacatcaggagagttccctcacagaaaggctaaatttcttttgtaacagccttaaggatactgcaagttctggtatcaggaattctgtggtgcttaaacctactatttaagtagatttggggagcagaatgccagtcagatctagcagtgctactgttgttcagaagcaagttgtaatgacatagggaacttctgtgactttatagagcagaattttactctgggtatttaaaaaatgcacaacacagattatactaggagaaaaaactaccagaaggtactcaatgtaaattaattttataacaaccgttttatgtttataaaaaattgaaataaagaataagggtattctatgaaattttcaatttctttggtcttactaatttgttctcaactttttcttttaaacaagaagatttttgtggaagcatggcttacagtgttgcttcataagatttgtgttccactattagcagcctaatgaagagtaattaatcatgtgtttgtgagttaaattactttaactcacaaaggcttaaatttgtatagtactttgcaatttactgaggatattaggtttcatttaagactcacaataaccctgtgaggtaggtattcttcctctaatttacatatgagtaaaatgaggaccaatggtactaagtgtcctggccaagatcatacagctaatactagtaatggttaatacgaacagagggcatactaggtgctttgcaaaggatgttacacacattaactgatgtaatcctcacaggaatggtgctccttattttatagctgaggaacacacaacatacagtgacttgccccagctggcaatacaaaaccagagaggaaaggcttgaatccaggcagtctggctccagagcctatgttctgaaccacagccctgcctctgtgcccataagtttattggtcaaaatagaatttttttttttcctaggtcaattgataactgattaaaactccaaaagaagtagacataaacaggactgccccagacaaaccttagaactaagagtgaccaggcatatgtgcttgggtacagatcacagaagtgtgtgtttagtgtcatgaagcaataaagtcagtgggttgccatgagaatttaaggagcggtaaagccaggaggcttacgcaaggaatgacattcatcattaaactcctagacggacttttcacctcccagttaaataacatgtttgagaatgctaatacacactaacacaaaaagcctgactgaatttgaagtgggactgccacaaaaaccagagcttgccttctcatataattatggggaactgggccccttgatgataacatattaaatgaaatcagtaaaactttacttaatataattaaaactctgaaggttagatttaacttatctaattaaatctaatatactgggaaaacacagcttactttataagtagtcaagggctttccagatatattgattctgaagttatttatttttctattactttaatagttaaagtctatgttgaaaagctgttttgagtctaaactccaggcttgaggcagacgggcaaagcagaatattgagtttaattttacccatatataaagctagctccaaaagcaatttatttttttttttttcatttcaagcaagttctttcagctcatatgatttggttgatatgaatttgtagggcacatattagctgcccatttcactcctccaatatgaatcatcttatctttcttaatgtcctgtgagattagaacaagggtcacgagtaggccagtaaagaaaagaacgtttgcaataaggagttatattttctagaaactctatttgggcatgccattgctggtttgaagaaaggagaaaaagcttgatgagactgagagttgaaaattctgatggagaagaaccgccaaatatttttgactgcctgacttaggagaggcattaattcctaagagccacctcttgtacccactttctttacagtggaagaataattccatgataaaatagcaaagttaagcaaatgttgggggtattatatgtatgtctgctttagtaatgtttttataaatatataaatttgttgtataagaaaatgtatagattaaaaatggttcatagagaccatataatgggggtaataggtttaaaaaaaatcagagaagatttcacttagaaaataatcagttagtagatatttaaggagagagaatagttaactaggtgggagtgacagaaagttctaggcaggtggaacagaatgatcgatagtttaatgacagaatggactgtcagagatctccaacccctgggccatgaatgggtgccaattcctaaccttgttaggaacccgaccacacagcaggaggtaagcagtggggagggagcattaccactggagcgagctccgcctcctgtcagatcagtggtggcattagaatctctcaggaacatgaaccctattgtgaactgcacatgtgagggatttaggttgccggctctttatgagaatctaatgcctgatgatctgaggtggaacagtttcatctcaaaaccatccccccaatccccaccctgtccgtggaaaaattttcttccataaaatcagtccttggtgccaaaaaggctcggaaccactggactagggtaaatgcaagaaactgaaagcctatcaagctgtagctgagagggcacagtcagagggattcaggcaagatcctgctggccttctgatacctttcagtctttatcctaagagaaatgaggatccattgaaatgttttaaaaagtggaaatggcagaacaaattttgtattgtgaattgaaaatttcagagactgcactagacggggctaaagtcaatagagagagttgagagagtaaggtcacagtctgggcataagacatggaatgaggccagaagagtggcagtagagatggagaaaagcacgtgcactggagatagggtttggaagtgatagaacttagcaatagattaagtatgacagagggagagaataaaggcagattgtcaatgataacacctaggtttctggcttgtgcactgaaatggattgtagtgcaatgttagggagggtttattttgaaaggcatattatttcttttattttaaccacagtaaattgggggtacttttgtaacttaaagtcagataaaccagtggaattcagaagaacattcttggctaaagatatgagtctggaaatcatttgcatatagctaagaactgatgccctgaggtggaatgagatctaggatgaaaatagggtctggatagaagttcttggccagagccttgaggagtgtcaccattgtagctgggccgcagatgataaattctgctaaggaaataaggttagtgtggaaggagatatacatagaaataacagaagaatatcacagagaaagggctcagaatgtttcatggagagtgttaacatcttaaaaggtctgctaagagggcaagaaggacagaagagtaccagaaactccccttttgatgtaatgccctggagatcactgagcaccctggcaatggcagtgaggtggagtgaggaggcaggcgctaaagcctagtcagctgggaagtgaagggaaagggaggcagtgggagcagcaggaacacacagctatttgcagaattttggcagtcaggagtgggagaaagagaggtgactagagtgggatgtggtttgttttgttctctatatgacacatatttgtacatggttgaaacctaagtgatgggatcaaatggggaaggagaagttgagatatatgagagagaaggagtacaatgtatggtaaacttcctaagaaagtgagaagattgaaaacaattcaagaaatagttaatggccttcaaaagtagggccagcccttctactttaccaaaagaaaatgtgtggtttgtttacagatctagatagacttgtactttggtagacagatgatgagggaattcttgtctgaatctttgcattttctctttatataagagatgaggccatcttctagtggggtggtttgaacgtccagggtttcaggctagaggagaaagtgaaaatgttactgtggaaaatggaaggactaggcaattggagcagttattaggaaactagatagtggtaagattgccaggccgtgttgaaggcctaactggggttgctgattatgaatttatggcattattctgccctgtgctttatttctcaagctgtgttcagctccctggattctggcacagagaatggcaagcgtagatttcagctaaggtagagtggaggagacgggctttggaaagggagaattgaagaatctgagagcttcagtggtacgtgggcccgacctatgaaggttgaaatcacccaggatgatgacagagtttggagaaaaaagaaggccatgaaccccgcaaaagaatcttccctgagagaaaggagatgctgggggaggtactagatggcaaaaatcagccagagaagatcataatgtagctggattgcatgaacttcaaaaaagaaggggtttgttactacaaaagcaagagagtggaagaaaaatacctgcaggaagcgatgggaagccaggaaagaaaccccaaaccctgactctgaggttcatgggcaggggaggagggatagatccacagctgccatatgagaaggctgcaaaggaagcagtaccctcaggggagagacaggttgcgggtaaggcaaggaagttgatatttacaaagctatagttgcagagagcacagttgaaatgtgtggatttagactgaggtgaggctttgtatgatacagaatttcaaattgccactgccctatttctttcaatgtgcaagagctgctttgaagcaagcttcactttgactgccctagatgaatgctttagagatcagcggagaaaaaaggttgtggatatcttgccgcaccgttaattaattgccgtgggggaggctgttcaattcttatcccagccacaagtaaaatgaatagtgggggagtgctgccgaagaaagaatggattttttttttcatgtacaagaatggcaactcaaagtatgaaagcagaagaaaaaattaatgaaactcatcagcttaaccttgatttacaagattctgaaggaggacaatggtagcactctgataatatgcagtatcattgctttatgtgtagcgctcttctgactttgagaagttggtagtgaaaagcaagaggttccttgacaagtgtgtttatcaagcacatctgcagtgtgattttgtacgctcagttgcagcctctgtcattctcctccatgctcatttaacatgatggacttgttcggtaaatccttcagatggtgggaggacaggagagggggaagcttactctggatcataacataaaagatattggtctctgtcatacgcagagaagcctctgccttctcctcatcctccttgatcattatgattgtttgtagtaaagaaaatgaatggctagctggtgtaatcctgtgtatctgttgattagttgctcagggcaccatggagaaagcattgtggtatagttgtctggtttgagttgaattctccattaggggaaaagaagtttgacaagctctttaacctgcagctcacggaatttcatgcagtcttactgaataagatagttcagatgcgtctctccggcctgtgatgttcatactagccagtagcagctggtatctgtttactgctacatgccacacacactgtgctgagcacctctggtttatttccccccatatcacagcctggtattttttactcacgtatttcagaatatataacagattctggggtctaagccaaagatcagcccaaactcccagccagacatatctccaagtgccatattcttcaccagaatgctctagagcagtgccgtccagcaaatataatgaaagtcacatgtgacattttaagttttctagtagcaacagtgaaaaaataaaaagcaggtgaaattaattttaataatttattttatttaacctaatacatccagattattttataatgtatcattattttaaaaattattactgagatatttcacactctttttaatgctaagtctttgaaatgcaatatgtcttttacatttacagtgcgtcccagtttgggctagtgacattggcagtgcccgatggcccccaggggctagtggataccatgctgaacagctctgctctagactcttaatggaaacagagttcttaatcacagagagtttactgagtttattacaggttttgctttgagatgaatagaaagaggccttgctggcctctgtggtctctgtgattggtctctgtgattcagtgtgacacagggttgggagtgtccttcctcttgtttctttgtcctgtgtggtggcctcctcttttaaaggtatgggggtatgtttaggtccgtgtgtgtgtgttttcattttcacagtaaatctccacgaagtgtatggagtccttagaaaatactttatgacacatagagtaaataagaaaaagagacagaccactgccaccattaagataaatgtagctttgcgtcccattactatctgttttaatttggcaattatttaatctctacagatctgtctttttgcctgtgaccagtccttgtagccttataggctatacctaggctttgctcagagaatttctctgtaggaggacaaaaccagattatgcatttactataatacctgagaagtaggaagtgattaatatgttattattaaacagtatgttcaaagtccttgtatagttactactaaagatcagtatgagcagaatccctaaacaggaatatgaaagcagagtatatactagactgaagtgacaaaacagctttacaaataacccatacctatttgtggatgggtgcctttatacattccttaaattttagttgactgttctcagtgtaagtattcagttacttttgtcttttcgtatagatgtcattatagtgatagctgttttgaaggcccttaagtcgtgattttctccaattttctgcggtacttacctcgagatttgcaatttgatgggtagaaaaagaagggaatttttaatatcttactctgtgcaattatacctaatttttgttacttaaaaatttttaattcaaataaaaagcattttaggtttgtataaacaacagcactactaggtatttatgtgggctaagagtgaaatttttcatctatatcctccttttaaaaacatcttcttataaattcatgtcatagaaaatatttggttcagcagcttgtggtggtagattgcagtattctagccttgtatgtgtccagcaccagggccctaacaaactatgcctgctctgtttatgatacctaataaagagcagtccaccatgatgatattaccatacaagatcactgcaatcacacataaatgtcttcccgtgttgtttttaaaattgaacaaacaggtggatatttgtcattgatgtaagaaatggacaagtcaccccatatccataatttgccttcaacctcattggtctgtggaaggtttaagggtatatccacgttttcctcctttcaactaacctaacttttatctattcattcttgtgcagaggttactacataataattgtgcctttgaagaaatctcgcgggaaatttatcaagccatgggagagtccagatgaaatggaattagatgaggtaactgtgtcattgttggccatgtcttttattcgttatttaatctgctgcatttccgcccccctcccttggaggcctttcaggatctaatctgggtgctggcttctccatacctagctggttggatggttcagtgctatgggcatgctaacccctggggatcccaacaaagatcctttggctttaattaaaaaacattaagctgcaataaagcttacaacctgtctaatctttgttggccttaacattttgccccttgctccttgtaaaacatgatgtagaggtgtggaaggtgaagtgaattgtcagcaaagacttaatcaccattggtataaatcccaaggtccccttcattagtgcaacagttgctgaggctgtcacaaacaccaagttgcaatttgcagcagagttcatttgacctacgatatggtcttaaccagtttctcacagaattctgttgattatcagatgtttgccttgttctatattctgtaggttttcagagtcaaaaatgcatttaactatagagaaaacaaatgacaaaattgtgagcaaagcagaatatatagaataagaaacaacaaatactaaatatataacgtggatttccaaaatcttgcaacagcaggtgcattataattggtactcttcttgtataaggacatttttgaaaggtaatgcataacatgaagaacaagacataattactacatacttctatttaggcaagaaaatatgatccagaagtgttgagctagatccccagaggaccacagcaagttaatgagtagaattcacattttaaaatacagaagagcctttgttattttaacatgatgctgttttcaatcagttcataaggcaaataaccgtaacgcccccatttggcaaatatgagattttaatttattgggattatttatagcataggccacatcttgtagtacaatcttttatttctaggtatttcttctacctcaaattagtacaaacagagcaaggaaaagaataaattccctacctacattacagagagatgatgcttatttcatatctatgtctgcacaaaggagactgtgatctgaccagaaaggttgttagctttctttggcagacgtgtgtcatctctagaagcgggatttatgatcactggcttcatttatctgaattaaatttgatcgtgttcagacgaggagatgagttcaaggttaggcctatgcttttgtgtcactagtgattagatgatcattggagctgtgtaaaatgagacattatttcaataatgtcatcaagtaatttagatatgttataatttaattgttttgttttgatggtgaaggaacaaaatcattattctgtgatattcagaaaatagtaatcctttaactgaaaatgcagaatgatcagctgctcttttctaagcattttgaagccaaacatgattttacttgcaactgactaatcaattaatcttgatatattctttactattttaattggttctcagctgaactacagaagtgtcatcatcctgtttaagttgaaatggaatttaaaatgcaaaggcaacttgtagaatctatgaattgttctacctattaaaaaaaagtttttaaggcactgagatccaagccagaatgacatcaaatagttttaactaataagctttccttagaagtaaagccgtttggtagtaagtaatagaaagtgattctcttttgtagccaggttttaacctccaaaatgcacagcaacactaatggattaaagtatagggctatatgactttgaactttcttgcaattaaattctgtgggtctccgctgctgattcccataacaaagggtcattttaatcatccaagttgtggtgcattaatctgtataatggtttgataaagaacattttattaattcaaaatttttgggtcgggatgggttgtttcccacttttcttactgatataattgagaccacattgtagaattaatggtggaagaaataagatatgcattgactggaaaatgaaaattatttctgataaagaactaaagcccttgatatatcttctggaattacctccagtacatcttgtaaccattgtggaggggaacaaatgaaagtaggctatggcctcactttatgcttactcatccagtttttgatccctacagagagtttttttttttttttttttctaccatggataataaaagcactgtagtaattttatctatagcttgatactgccaggtttgacaaagcagtgttcctctcttaaatgtatttgatcaagtaatttttcagaaaggcctataattcaaattgttggaaccatatcattgaatagaatggtggcctaaggggatttccacacgtatacctcatatctaggcccataagaaattgaaagaggctttccaaacagcattactctcaaaattatcttctgagttcatttatcctttgttaccgggctgctctccacatgatacatttataaactgaaactcctattgtcaaggtcaaactgggtagagcagacattgatagtcaaaatgaatttggggcagaatgactcccagaatgttagtgatatttaattcagagcaggtcatgtaatagatcatgagcttttcactgcattgtacttcaaaggcttgttgtaaaataatgtggtcatttgtggttgtaactgcaacatgctggctgactttggtgtcatctgagcccatttgaaccatttaacgtgtaacacaggaagcatcctgcagagattagagcaacctaaaggggcagagtgatgctccaggtttgactttaatgaatgactgcattgggtctaagaatacccaaaagctcaaatattttattgtgaattacttcctataagtcttctaaagaaaccctagcagaaagtgcttgtgggaatgacaatgatatggatgaattgcgactattaactacatctgcagtatgaataaaaccaaggtagggtttgatcagtgaagtagaagaggggacacagtcacataaacaactcatgatgaatgtttttgattacccagcttcaaaaactgttcagcacctctgcagtgcattttccttcttggtgtaataggctactgtccttaactacatatcaacaataagctgtgtaatgatgcttcaattataatacttcattaaatatttggtatcggattttttttaattagcatatgaaaagaatcaagaaaaaagaaataatacattcatctgccttgatgtaagcagatacataaaaattatatgtataaatacacagagttagaacaatttagagtatcagagcttaaacattatatttccttatgatattgtgtaatcattaagtaaattacattatagttgaaaaaatctctaacatggaatttcattttatttcagtaattgagtctaattatatattgagactttcttctattgtgcctcagtttcctcatttataaaatgaggataatattagccatccttatagggttattacgaggagtaaattggagctaatgcatgtttaggatccctagaacagtgtctggcactcagtaattgcttaataaatgaaaactattattgttataattatcagtattataagtaaagctaaatttgacaacaagattaaaagatagtgctacctttctggccttgtgtttttactggccaattggtgcataattgatcagcataactgaatttattatgggatggtccaattttgctaaacaagtgatgcccaatctaccgtggttttcctaaaacagcttacatttcatgtaattttaattgcatcaataaacttaaattcacagaaaattttagcacgttataaattaaatattattgaaaaataatgtcggccaaaattttcctgtaactgaaaaactggttttttacatttttaggatacaattttgaaccagctgaacacatttactactcccagtgtaggagggactgtaacgtacgatcaaattcctaatggaagaattcagtgtttatcatatatacagtctgaagccattttatcacagaagcctagccttgatcatgccaggctctcattctactaagtagagatcacactttggttcttactagatcatttctatttacaaaaacagggctagtaaatagttttgctgcactgtttccataagtatcttaattttgtttatcaaggtgaagacaaggttcattcctttttccagtttgtcctcaaatacatagacttttctattaatacatagatattaaaataaataaaataaaaattcttcccaagaaaatggcgaaaagactgctgcttacatcaacaggcatcccagactaatacagacctttcccttgttaaaccctgtgaaataccaattttaattggagaagtcaaaggtaactttgaaatcagtgttcataaccactgttagtatgattttctcgtaatgaaggagtcaatgaaaaataataggttatccagaaataaactctatctcttttctttagaaatacatgaagcatctgtatatacatgtgcatgtgtgttttcttcagggcagtactaaaattaattttcatctaccttgcctatattatctggcaatatatacacactcccaagagaggtcaattctagaaaaagttgactccatgataaagtgtaaggaagtgcaccctaattgcctaaccagggagctaagtcaagtcagaaattggtaaatgagtaacaatgtctatttaatatgtgtatattaaaaattgtttattggattctgcttctgctgatttgagggaatttgtatcatatgagttatctcattactcaaaacaatctaaagtggcactaacctcttctaaaatgtggctatatttaaagatttagatggctttgtctgaggttaatacttatttaataaatctcctgcagggcaaggcttttatgaatcaagctgacttttttccttagacaagttatgatgcactttgagagaatttcattagtgtaggaaatgaaatgagctacagcaaaggacctcattgccctgtgtttatagcctagaccttgtcagagcagtccagtatcttacctctaccttaacaggaagagaagcatttgaaatattgagagaactgagatttagtgatgctgatgtgctatatgaaatgtgaacaaattgcatttgggttgttcccagttctgaattaatttatctcattaaattatcaataagctgggttattatttacagttctttttctgtttcccacttttttccttaagctgcttaaggagatatctaggaagcgcagaagcatccgttatgggagagaagttgaattaaagccatatattgccgctcactttgatgtccttcccactgagttcaccctgggggatgacaagcattatggtggatttacaaacaagcaactccaaagtggtcaagaatatgtcttctttgtgttagcagtaatggaacatgcagagtctgtaagttaattatgatggcatctgtttcctatggtacgcttatacattttcactggaatgtggttatttggggatttgtgggtatatccatcctcattatttctcatgaactgttattaagtgtaataacaggctgcctactctttgaacattgctcaatatactccttgagactgcattacaaatgagactatgtctctgatgaaggaaatttaggtggccctctagtttatgaagttccagatcgataggacatggttcttgataccttctgatgtaacacaaatatcatggtgttagaaccatcattgcttacaatctccttccatcatcctttcaaaatgactgttgtccaaaaaaggagactgttgcataatacctggttgacattagcccctgtgattgcaatgggaactcacaagcttggccattcaacatggcatatttctgaaaatactgactttgggggtgattgtatttattctcctatatctgccaagtgagaccacagtgcctctacccggattcatgaggaaggtctatctagaaagaggcaaatacagcagcctctttaattgtagaaatttatgagtgactgtatcagtgaaaagccaagaaagttagaaaataatttaataaaagagagaattcctaaggtattctaaataatgagttttcttcttttatgtaatccatcttgcttatatgtcattttatgcttcagttactttgaatgtttaaaaaaaaaaaggggagagatattgtagataggcagggggtgaattttgaagtggcagtacacatgaacatttaatatacatattataaacttcgttttctaatcggtgtctaaatatgacaggtgtggcaacccagttgagccagtcatttcccatatagaagcagctcacaatgtatcaaagatttctccacatcaggtgttagtgtgtacagtggggcctctcttcaagtgactgaaagaattcccccgtggaaaatcaaaacacaaaggcagcctctctgcctggtttacctttgtgctcagaatgtcatttgaaaacaaagtaatggccttcctggaattttaatgttcagatatgctttctctttctagttgaaggttttaaggcagaacatcaagggaatggaatgttaagaaatcatctttttcttttattcaaaaatgacttttaaatatttgagaggaaatttcttttaatagctctaggaacatttcaaaaagcatacttagagcattgaggtagatcagagaatctagcaaagaagagaaatctcattcgatcctgcagactgaaccactgaactacacactgtggtttctgatgtcttccgctagtgttttaaatgtgtcacaactgataaagagtctgcccctttctttagtatgtcatctgtttattaattacagaatcaagaattttttccaaatttgttaatgaagttgcccctttattctatcatctttctcagcattgctttcaaatatctatgatatttattttctttatatatcataaatatttgcaggcctaggagagacttgtatccagctagagtcattttgcagtaataaagcctttgtgtaagcctcaaatttccatatcagtttataacaatgttccaagggtagactggtaatttgcaaagagaaaatacttctccgtccctctcaaagacacaagctatcccctaatcctttgtctcatattaagaatgtcagataactggtttggaattatccaaaatttaatctcttattgccacgcacaagaaattatatttttcattaggctggtatcattttatgattttgttttcttttcattttcatatgtctctgtttcttgaatgggttggaaatctatgttctttgggaaaacctgtgcttagacttccatctcaatggaccgtgattattatcttaaaggttcttggtaaagaatttcaaatgagacagtattgcctagttctgtctatgaaactgttttaacatcacctacaaaatggagtgggtaaagcataaaccaaaacaattatataaaaaatcatgtttcttagatatatagttctttgccaagtcctttgtgtcaatcctcataccatacacatcttttttttttttttttttttttttttggctgcctctgagaagcttggacatatatactgagtttttatcttcttgtaatgcgttagaaaatctgcaaatctagtcagtctctttcctgggcacaatgacgaaaatgagagagaagagtagtatacaagcattcagtggaacatctgttctcctgcttgatggccaagctcattgtacttaaattcagaatagatgccataaactaaattttttaaagatgcaggttaaaacatttaaatatatgtaccaatcatgaaaagtgagcatatatactgatgtcttgacaatttcagccatttgaaaagatgaacattttttgtcttattcagccaagatttgctgagaacccactaagtacaaggttcattgctagctgctttaagcatataaacacaaataatatataaatccctaccttctaggagtctgtagtttcgccaaagaaaatgaagtatatatacaaataaaaagccaaaatacagtttggtgagtaccatttaaaaaaacaaggactaaataaaaatttagctgtgttatttttatcttttttggtttttttagtagaggggaatgaccgatcactgccagtcaattaaaaagaggtggtttcattggaggcagtattcaagtgggggcctggagagttgttcaatttcaggagctaaatgttgtggaacttgtgagggagttgaggaacaagaatagagcctttagggagtagtagcaagaagcccactgtgatggaatgtgttgtgtgtcgtaagcaagtttaaagtaaaattgtggatgcccttgagaaccatgctaagttatctacgttttatttgggaatcaagagagagcctcttgaaggctttatagttgcagtttaggatgatacctctagcagcagtggagactatgagaggaaggaagaagctcttggtatagttaggagcacataagtaagggcctaaagaaaagtggcactcatgagactagaagaagagcagatggacctgggggacactgattagctaatatcagtgtttccattctattccttttttctgtaaggtaaaatcagtatccattcttagatactgagaggatgagagaatttgggaagtgaggaggaagggaagaaggatctgggaaaaattaagaaactcatactaatttgaacatatatgtaggggtctctagaaatgattggaaatgaagatctgggatttcatagagtatctgagtttaggaacattaatgaagagacagattctgcatggaggttgatagttaaagcttgggctgaccttgccagataagagaggacaagagatgctagtagagaatagaacttaagaatacgggttcagggccagccacagtggctcatacctataatctcagaactttgggaggccaaggctggaggattgtttgagaccaggagttcgagaccagcctgggaaacatggtgagaccccatctctataaaaaaaatttttttaaaaaaagaatgtttgtctataggatggagtcagagataattaactcagcagggcatgagcagttggaaagatgaggatgggactggtttaattcaaaattgagagagccagagataaaagttttaaagaaggcaaatctggaaaaattgtctagaaaggtaaagagtaaataaaggcaattagatttggcaaatgaaaaaaaaaaaaataggaccaatggtggtttggagtgagaagagatgaggagtgagtggtagaagcagggcagttagtggatatggattagtttctgttggattggaaagtggaagatagggccttgaagggggcaggtagagccaagaagatgttttcctaatataggctaaaataggacagaactaaatgggatcggatatcatagaaataaaaatcatcgatatttagtccatttcttctccaagtaactgtattcttaaaaagtatattatcagttgtctattgagaacaaacataccaatctctgagcaataactgtaataaaactaagtgagaactgctgaattcttttaagttctaaaaattctatattttataaagccatatcatcaattctgtacatctcgcatctgtaatttgaactgtggaattctcttttgaaattgtagactttatttgttcatgctttggcctccatttcctaactaatatgcagtagtattaagtagtaccaagcactaagaagcacagtagtactaatgactaccgatattcacatttaattaaatactgacttattttgcattgtaaatatgtactttggtctccttaactgtatgataatggcttgagggctagaactctagtttttctcttgattttcacacagcacctaacgccttggcacaatgtaaatgttcattaaacattttgcaactggttaattactggtactttacgcttcataggatcatttaatacaccatatagaaagcccaataaaaagtgtctatgaagtaatttgtactatcaaaatgattttattataaaatagttcactctataaggaaatttgtattacaaaacatcttccatcctttcttttctttattctcctctcccctcccctctgttttgctaatattgcatcacacacttatcattaaatccactatttcctggattttttgcttcttctaatgttaaaggtacttatctagaaagtcattattttataactgaaatagactctgcttttcctcagaagatgtatgcaaccagcccttactccgaccccgtggtgtcaatggatctggatccgcagccaatcacggatgaagaagaaggcttgatctgggttgtaggtcctgtccttgcagtggtctttatcatctgcattgtcattgctattcttctttataaaaggtaggtttgcccaatatttctgttgtaattttggaggctgccttatttttgaagacttgatcattgttctgctgtccttaggtggttgattttagtagaaatacttcagtgccatttcaattatttttggaaaagtgtttacattacagtaagatcaaaatgtaaagactgtactatttggaatcttattcagttttggtatagacttctgttgtccaacatgcatctattctggcctccaatcttctgagctgctttatgcagataagcacttttcataacaattgaggcattagtgcattcacaagcaaataattccatgcaagctttcatttgattgttttagataattaattgctcgatttcagtgtgttttttgaaacactatcacgattttgcaatttgtatacatatcataattctaatttgcgcaagtgttgagatagctccctgtagctatttctcaaaatttagcaaaagcagataaaaattaaggattaaggaaggggaaaaaaaagagaaggatggagaatgaatcgtctcccaattttcttctaactcttattccacatctgcactggtgaattcgtgtatgtgtccaaaaagggatgccaaggtactattttccttttttaaaaaatataatctcagtcttattatgcccatgtgttgatttgagtagtgtctttgactacagttaggatgcaaataatctgtgtctacccacatttttctgatatgccactctttttcaattttatttctgcctctaacatctaatctctaataagattttttcccctagggcactggccagtcagttagatagaggacattagtaattgttcttataaattctttctgtcttaagaatataattataatataaatatgaacttataaagagtagcatataatatactttcttaaacatttaaaatgactaaattcaaaattacttccctttatatagatttttatttttttccaatccaaattgtattttcacaaaactttaatccatgttctcgttttccttgtggtgtgttatattttgaaatgctactgtgaagttgatctcatccttctactacaagatagcttctctccctgtccctaaccttggccttcagaatctaaaaagagtatcttcattttgattcttgcttacatgcttaatctaataatctcatttccattcactctttttcctacccatctagctcccttttggggggtttatattaattattttcaccctcactcccttgctcttctgtccctggaataacgtttttcccccataacctcttatcttgactcttaaaaaaagaaactccttcaaaactcttctcttttgaaaaacttgtttttaaaaggctccatttcattttattccagcattaagagagggttgagaaaataaaggacaaatgaaagaagttcataaccataacccattaaattgcctatcctattttagagttataaagaatgaaagatatatccatcattattttttttcatgaacactgccatcattcaattatccgtgctgtaaaatagctgaaaaagtaagtgtggaaagccaaaatctcctctcatttgatgatttgaatcttccattccaatctgtatctataagcatgtatcttaaggaacccattgtattttattacctctctccatgtaagagataagggcaggaagcatgaggtacacacctgccccgtgagtaatcatagaccctgtttgagtccaagcaggagctggtgtcctttgctgtctgtacgctgcacttttttccagaagagaattcaataataaaaagcagtggtataattctaattgttttctgggaaatattgatttaggtagtcacatactactatgggagtaggtcaaaaaacaagggattgttgacaggtgtatttctagaccatatgacatgacattttgtgattatttgaaatgggaaaaattaatgccttatttttaagttatgttttatttggatatacatagctatcattaaatcataccaagcaacagatgtatatggtatttgtgaatcagtcatgtaaatttgaagaaatatgattatagccctaataatttttaaaagataactattttcttccttcatctgcaagtgcttaaaaaatcaactcacttataatttttcctaatcccacaaaaagaagtatcatatttaaaggttttatgactctgttaaaatagagtagcattttagtgtgggcctatgtaagcatcgtctaatgcaattgttgggaaatgcacacatcctcgaatgctaagtatatttagctaaccatctgaaggcccatgaagcatttctgaaatagaaatgcttgcttcagcagtaaagaacattcctgacttgaaattcaagtagaaccaacaatgtccttcttgattatcatgaggcagttcaaaaggaaatcttctgtacccaatgaatagtgtcttttatagcttggattctgagcaaagttaattacataataaatagtccattccctctttttaggtgcctttcagtttatatacaggtcattggtaatgactcagaattgaaagtattattattattattattgtcagaatattttacttcccatatgcaaatactgctttgagaagagaatgagaataaaacgttgttgactcacattatattgataatccactttatcatatatctctgcttctaagatgctagcattagcaataggtctgtagctacagatagttttatcatataaagaagtatattttacccagctgtctgaggagactttgagacttattcctattagatctattcatgtggaaatggcatactctttgatctggcattctgttcatttaacttttgtttttaatctagtaatctgtatacctataatacattgataatcagtaacaaaaaaaaatcaccagggcttggtaagatccctaaaataccctctgaatcatcagaaaattaaaatatatttggtatatctttaatgttataaattttcttgtactataattttgaaaaaatattatatggcccatgacttaaaatacacattccagagataagatagtagcaacgttcggccaagtactggactgaggagccaagaaacccgaatccaagtcccagttctgtgactagctggttgcatggggtagaaattcatgccaacactctgagcctacatttcttcattacaaagttagtgggtggaccagataattagacctttttaatcataatgcgctataatctgaaaacattaaacaccagataatagtattggtactgcacgtccatctactccaacaaaaaattcacaaggcaattgaaagttcttattctgtatatctgttacatatgtaaggcttttcagactttattccagaactgtccaagaattatttatataaaaaataaacatttaaaaataaactgttaaccttacctctatggaaaagcatttcaagatggataaaaagtgtttattacatactatggaatcaaagaaagtgtagatcaggtggtcctagaagtctgagatgcacttcaggcaaaattaacatccttgaatggtaataatctagcctgcatgcacactatttttccatccccatcccaggatgtggaaaccatgagctagatgagactgaaatgtaggcttcagtttttccagccttttcctgctccaacactggctctctgcaagctttgtgtctttagtcttctctttctgtatcaaccctccatacagttccaagccctcatcaaggaaatgcagtccagaatattttgagatgctatgaagaaatatgtggccacacccaaccatactggaagctgctggttgactctgctttctggcttctgagtaggccctccctaggttaggaatgcctttcctgtcactcccctgccactccttttggcttggataactccaactcatcctttggaagtaagctaggatgctacctactaaatcaagcctttctgggtgcctgcctcattttctgtcctctcttctcctcccctctctagcagttcgggctgctttaggatcacttttcctgagctcttaaagtactttctacttgtctgttgtagaacctactgcgttactgtcaatgccccttttcttggcactttgcctccactaaactgcaggtcaaggactctgtcttattcattattgtgttgctactgcctagtagagtgcctggcacacaaaaatattgaataattaaatgtatacaagtcaaacagtattaaacaaactcaattccttctacatgttgactccatcactcaatatcaactttattttggctggcaagagttgcaataaaatcctcggcctataatttaaatttaccagttgtgaaagctttcaaacttagatatttgtaccacatatgtacccaggtgtatggtgaggctgacctttatctggaactatgaatttgtgcatatgaatactcaaaacagccttttaatacatagaactgataattcactagatggttttccatcctgaggcatagatttttctacaactgattccctgataaagtcactgattttaaaaagtgagcaaattggaaacatttatatagaattctttttaacctggcacactacgtaaatcactataaaattaagaataagaagaattaaccaatgtgtttgatatcattttcatcatttactttgtatgtgtgtgtttgtaccatttaaatgtggatttttttatttttgaaaagagatggattgaattatctcacagggccagatattccagccacttgggtatatatttcattggcattaagaaaaacttagtacctttattttgcaactgggaactcactgaaaactttgcaatttgcctcaaagtgaagatttttagattaattgttttcaggaaaaggttatactctgcagaaataatatggttatttacacaatcaacatattatcacaggtgaaaggatctataagcatgaactagttgtgttcacagacagcaccacagactaggaaaatacatgttctgtcaatggctggtaataaaatgtttttctggattagcccaactgtataaatgggccatgctctgtagatttataatgatgggtattatattttcctaaactgaagatgcacttaatccttcatgggaaaaaagatgtggcaagaggtgtttgaagaaatcatttctgccaccttattaccttttggtgtattattcaattgtgcaaatttctgtatagttcaatacaatttgcagatattttatatcatgaaaggaatgacatacctcttaattgaaggctttttattttaaatgaacgaatttcttttatggaatgatgctgtattcccattgagtacattagttttctcatagcatgttttttaaaaatcaaattatctctccactgtcgaacacttcctgggatataattaattgtggcagtattttataggtgatggataaaagtgcacgtggcattcacacacacacacacacacacacacacacacacacactatgtattcagtgatgtaacttcatgtcctctgtttagttcataatcagaggtctataaatattttgattcgctgtcgcttctgaatgtatgtcagttatgtgtccttgcttgtgaacactatttcttaaatcttggttgtcatggttatccttgttaccattggccaactaacatttagcctttctttttcctttttttgctgcattaaaatggagcagtaaacccgacaggtgaggaatagagaacaaacccctttaatgttcagtaagaaaaaaataaactggtagacttcagagttgttgaagaggggagggcggggctgcacacaaaagataatacctggcacgtggaagatgggcaaagcctacatatacacagtaacttcattaagatgattctggggaaaataaatattttgtttacattagaaaaaaacagattaaaggcgaagtttaaaagatagtacacaaaccaatatctgagttttgtttgtggtcaagattaaaatgggcatttgtgtgtgttgatgtgtttacagagcagacatgtgaggtgtctcataaactgttttgttttgttttgtttgtttttaccaaagattagttttcaagtttgagtacagatcacctaatgatattagcattttcacatcctgcaaatattgatgacagtgccttagtgagaactcttccccaattcaaaattattatccatgtctcccagtcttgaataataagagcaataataatagctaaaatacactatgtgattattgaatgattaatccaaactaaccctctagctttctaactcatatctatatattcatatacacttatgtataaatatacacatgtaacatatatataaattcccgattaaaattaaactacaaaaaacatcttgaagatcacctacctttctcccaatgccatattccagtggtttccattgagtggcctctggaccagcagccatagcgtcagcaccaccagggaacttgacggaaatacacacccttggaccccgcctcagacctactaaatcagaaagtctaggcattggcccaccaggctgtattttaacaagccttcccaggtgatgctgatgcatactaaagtttgagaactattgctgcattatttacactaaaatcactttatgttggtcagcaagcctcatgttcaatgataagaatctttaaacctctatgagggtgtcttctttgtgtggacatctctagtatccatttgtccagcagaaaaacacgtgcaaaatagtttgtttttgttttttcagccaaaagacaaaacactttaaactcacttaaaatactacctttcatcggccaggcatggtggctcacgcctgtaatcccagcactctgggaggctgaggcgggtggatcacaaggtcaggagatcgagaccatcctgactaacacggcgaaaccacatctctactaaaaaatacaaaaaattagccaggcatggtggcgggcgcctgtaatcccagctactcgggaggctgaggcaggagaatggcatgaacccgggaggcagagcttgcagtgagccgagatcgcaccactgcactccagcctgggcgacagagtgggactccgtacctttcatcataacacttttcatattttacaacttaatgctttctttttctattaaaatgagagagttgaaccaaaacttagacatcctcttctaatctccctctattttatacacaaataaactgaaaagaaaatttgtagttgacacataccagtagtggcagagttgggattacattcttaatgttaacagaaacaaatattttgattgatttacttgaatattgatggtagatatttctaataagtatatgtttctttcaaaagcctcttctcacatgtctgtatatctttgtttcaagaccatgaattgatctttcactcaacttctctttgtttttttcttccccccagatgagagcctggtgaaagcaaaataccccgtagaccagagtagcatttgtattgtgtattacccacatcccaaacaaccacatgcttttatagtattagcagtttctgacagatccaaaatgtcaagtgatcttccatttccttttcacctacataactcctccacatagtagatagttctcactgcaagaaataaactcgcactaacattttataatcttaatagaaaaaaaatagagcaaggcaaaatttaaaatctgtttctattcattattctttccatttttcaaatcgaaaatgagaatgatgagacctctgaaatttatcaggaaaaaaggttactagttacattcatgttgggcctaatttagaccattatatgtcttttaatattttatgacaacgttttaaaactctttagtattattaccaatgatgaccaaactcttcatcttccacatctttcctagaaatggtttctgtgttagaaaacaatcattctagcacatcacataataagtgtttaaaaataatgtgataagaatgtggacagccagaattatccatgttgtgatcatcgaaagaaaactaagcaaaatacatttaagcagctggttttctatttgactaggatttcaggagtctgaggtcttggaaataatttcatttgaataaacagtgaaagagaagttagttattaaatgtcactacatccctccctgttcattcaaattgtgaattgtaattttagtcccatgtcttgagttttctgagactcacatctttgcaacaagatgtaattcctaactttccttgcaccagagaaatgggctaaattactttagagagttttcttttctaccctccagctcagtgtcactcaccccagccacagggaaaaagaagataaggaggttaccctacaatacctgtaagagtaaagtagttttcttgcccagatagatatttctaattctggtttccataatcttgcaagaatggcagagccacaatgggaagggagaaaaatccaaattttagtcgttgggcctgacacattagtaaagaaatgcatccttgccaacttatgcaaaatgatcaaaacatgagaagggccattggtattatttgaagtgagaagaccaaccatatgtttcacgtggaattgactggctggctgcacccagtgacgtttcattaacccatttcgattttgcatcttcagtggtaaaaggaatctcttagtgtggtgaggcgaagacccatagcacagacacagtgacattgcctactctgaaactggccatcatgtcctcctttcgcatggtcttatgagcctgtctttttcttcgtcctcatatctttttcaccagccctttgtcttttctttttcttttcttcttcctttctactccatagaactggagctgccagtaccttggcaggtcgcagaatactgctcacctctgattggtggaatgggttggcagcacattttgtcccaaggctgtatctgacacctttaggtagaaagaagaaatcctcagacaggttaatctaaggtaccgagaaagcaacatgtctaataggacttagccatgaaaatgtattccattaaggatgttttgccaaaggcactgcacttgagcaaatcatgtgcacgtcccctttgtatcaatcttctcttcaccccctggttagttttattttatacagatgagcagaaatgggaagaaaggctatttaacaggagccctctggctaaccatagaacgacctgggtggcattgaatgagaccccattgccacagcaacactaatgagctgtaccacagtcacatcgaacagagaaaaggaaagttcctaaacactgtgcagcaccttttcccccccacagtaaaaacgcctttgctttgagcaggggtgagatactaggattgtgactgtggtgtagagattgcaggcgttagtatttggaaaaaaagcactgtttgaaaatggcttctattgattcaatgggtttttaatctaattcaaactggaagaagatagttaggactctgtgattaattttttattggataaagaaatcttatatacagatctgacatttcttgcttagaaatttgttaaaattacataatgagagcttaaatggggatatctaataaagctagtagatagcttttagaacaaagttaaaatgtattgtgtgaagaatcacatttataacaaggcactgtcaatggcaccttgaatgattatcaggagcgctgatctacccaccaggtgaaattactttttctctgatctttctgtgaacctttcattaacaaaatattaatcacagttagcttaacactgttaagagctaacactgttttttttccttcacatttgaaagagaaaggggagttctgttttacctggtcccgattatcctaggcattaggataacttggcatcttaaaaatgcacttgtgtttacctgccttatgggaaaatctacggcatctactctctgtagtcaccacttatatatacttagggctaagggggacagatttagctgttcagcttaaggtcaggtagtttctctatggtaacaacagtcttagtattggcaacttaggggtatcctatcctgttcctcacaaatagaactagtagataagagagaattgctcaataagggtccatgcgtatctcaccaagatccctttgaaaccaaaaggcagagttgctgaattatttaatcctgcagttggaggaggacttcgagatcattgacttaaacaaaaattttagacctgagagaacaattaggccaggggggaaaagcaacccgaactgggtcacaagtcagctgggttgaaaagttgtaaaactgaaaacttgggaggtggggggagtgcaggtgcaattctctgcttttctatctgtttcaattgatttttcttttcttcttaaatttctattttccccctataggaagagggcagagtccgactctagaaaaagcagcataccgaacaataaggagatcccttcacaccacccaacagaccctgtagaactgaggcgccttaactttcaaacaccgggtaagaagcatcacacatctaatccacacacagtctttcccagaagttgtacagctcaattgatattaagagttgaaggtatcactttattttgagccattttgttcatcctgctcttttattttactattatggagacttgcccaagcaaaagtctgaaaggaaattaagttctttctgcaaaccggaaattgggtagggaagaaaaagaaatatgggtatccttcaaattttggaagaactatagtctttataataatatctaccatttttatgggctttgattattgtttttattatttccaatgacaccactctggaaagaattcagtttctcatcaagtgaatgaatgagtaaatggatgactgtacacatctttcatcccatgggaaagcatagatttgttctatattttcctttttgtttgtgtttatggtactctgaaagaggaaggaagaaagggagggagggagggaggaaaatgaggtaaatatttttaaatattacctatactaaatttcactgatcacttcaggcttcttactagagagaaacataaagtgactgaggataacaaaaaatatacttgtttcttaaaataaagaacattaagtgcttcaacagaggaacactactattcctactgaggggccttctgcacaatattgtttattcatgcctagatctatttgactttttcaactaaagcatgtttataccaaatgaatggcaaattatgaatggcagagggagctgaaaatataaaaccgagtgaccctatcttaatatgttatgataatgaacaaagtgaaaagctaatctaagaagtctttgggattaaaatgtggttgcagtgttgtcccacaaattgtagacaagtttctttgtgccatatggatgttctgattcacagtatgatacactgcagatatattacagtacacattttacagtgaattattttgaacatggtttattatgttcagcatattttctcttttacatgtagatgtaacatagtaactagtaactcttcaattgaaagaaatgtttagcattttcagtgtggctatacaagcatcataatgtcggtatttaaaaaaaattctaactcatatgaggttagactttaaaaaaaattatttcatcatgcaccgggaacgtgtacatgatgattgaacaaacttgtgtcatcttccaggataggtcgtagccctctggatgcatcttgttgagtcacctactcagtactttattaaggcaacttgatatgaattaagttactgtagtaaatttcattgggtcagcgctttttgaaataggtggatactaactacttcagcctataggcaacttctttttgtttttggttgtttgtttgattgatgggttttttgagacagagtctcactcgattgtccaggctggagtgcagtagcacaatgacggctcactgcagcctcaacctcccgggatcaggtgatccccctacctcagcttcccaagtagctgggactactggggcacgccaccacatccagacaatttttttttttatttttgtggaggtggagtttggccgtgttgcacaagctgggctccaactcctgggctccagcaactcacctgcctcagcctcccaaagggctgggattacaggcattagccaccactcctggcctacaggcaacttcttaataatggacccaggaatttatattcctttcaatttagcaaactcaatgtatagaggacccaaaagctgaagaaatgatctgctacatgattccttgcatttcttacctcatcaccctgtaaaagagcaacatgttgtggaaatagaaaaacggatcagatttctcagtaccttgctgctagctctccactgcccctccttcctctgtttttcacataaatgtcatttgtgctggaaccaaccttggtcttccaccggaggcagaaacacagtataaggttgagcagaaaggcaagggtacccccaaaagaagggagccagtgagagtgctgctacacctcacctcctctcgcaccaacagaaaatgtttccgggaataaacacaaagcaagaatgggaactgtgtagagagaatgattaagaggtgctggtgactgcaggtaagagaataggaatgtcttcaaccaggagacttctgtctgcaagtacttctcactttcagatgtaattttgcaaatatggccaaactcaagaattctattagcaatttaattttcccaatgtatttgggaatattatatccatttatagagagaatctgttaaattttaggtaagataccagaaagaagaatgaatgttacaattgtaacatctcttgtatcaccaatgactttacaaaattaaaatggggacctgagtataaaggaaggtgtcatttaactaaagttagacttatcacctcaaatgaataagggaataaagtagacaaaatgagataagagaggagctgtagtagacaaaatgagataagagaggagctgtagtagaggaggagactagaaaaggagaaattgtcctaaggtcctagcacatctgttcactcaggaagcagtacattatgccctttagctcaggtaagcaattcacttaagcttgatttgctgaaattgtttatttgccatccaagctctatgttgtggcctgctgtctggaacatttttaccattttacaaaggaaatagactccgctgttaatatgaaattcatagagatgtgaccatttgcttcagcctgcatagattttagccagcggctgttaattaccataattacttgccaataggatgagagcagaatgtggggttgttaacccagtaacccttttgtggttgttcttctcctctttttcacgaagaatcaagggttttcttggataatgaaataaaataatccttcattaggtgttgcatgacaggtgctatgacgctaatttttaggtttttaaattatttacatttcactctctgaaatgtggctttttaatatatctactatgaatgtataattgcttatccccaaacattataacgcttgagaatatttattaataatatacataagtagagaattagtaatccacaccttctgttcaaaaaatgtctttcaatgaaataagatgcctgtgatttatataaccagtacctagtacagaatttgttcccaaaggcaaattgatttctgcttctgatgggtctgttatgaatgataaaatagcaaacaaacattacgatttgaaattcagtaggcctttcagaaggtaaagaaagcacattgcttagttcagtgattctataaattctactttctcaaaaaagtcatcttgtgaatgaaagattgatttacattctaagttatttattcttttggagaatcgagatttaagaagtcagatcttttttccttaattctgcccgatattccccatttcatataaatatagcattccaacaatctaagtacgtcaaagaactgtacccttaaatgcagtaccacaaacatagttggatcagaaaaagttagatttccatccaccgttgctcagctaaggcacaaagaaaagacagagaaacctgcttttttgtcagtataaccatccttgtgaggttggagagtgtggagaggaacattgctttagcacattttcaaacttttagacaagaatcaagtcactctctgacactgctgagagccttccaaagaagtagcttggacttgaatctgtacagagcaccttaaggagttgctgtatcttctcattctgaagtcactgatggtgctggcagctagaggtacttcagggctgaagcccactagttcgttagtggcaacaaagttcttggtcttttttagcattaagatgagtgaaaaaagaatcaccaacccagccccttctgaaaaactattttatttttctcttattgagcataatgtaattgtgacttaaccgattgctgcatcagagacaatatggaattgttgaataaattttttttctccccctaaatggtagtttttctaggaataggactagattcaggataaacagtctgataggatcccaggatgctgcatagtgttaggaccaatctattacttaagtgatgtgttcacatggtaagtctggacaaatatacgggaacatttatcattttttgtgcttgtacactttcattattaaagtatactttaaaatgaaaaaaaatatcctgtcagtctgtgaaacactgtatgtaaacacctgaacaggtcggggaagcccatgctttcacaattgaaagcaggcacctcagcttgtaagtattttgcatgattgattgtaagtgtctgtcttattgtggttcagatggcagtgtatagccaagttatatttgagacaacatgagctacctaatcatttaagagaataatgatttaaacaataaatcattattagtgtacaaggtcagccagaattagtgtgaaaaaggcaatttaagtaacatcagttgtatcaccaataactaccaagttaaaatggggacttaagtatataggaaggtatcatttagctaagatttgacttattaattctaacagatagtggaataagatgggcaaaataagtaaaagagagaggtgacgtagtagaggagtttactggaattattaactgctgatcaagttttacaagtctttaagatctatggaagaagggaagaaaatattcacttataaaagatgcatttaaaggaaatgtccattaagctccatacatctctgtagacagcagtaactgggtgcgcactaggatgggtgaatagatatgttgcttgttaaacaaagatgaactgtgttagccccatttgcaaggaaagttttctctttctttcttttataaacaatttccaaattactttagtctctccgtcccagaacatctttttaatttcaaaagcaacatgtttattggggaaattttggaaaatagaaaataagcttgttaacaatcattgcatatagattgtgaccatttaggtgttcattatgttactctttaattttgtgtacgtttgaaaatttttataattatatggtgggaaacggtccaacaaaagcacttttagagaagaaaaattactcttcattccaccacttttttttcttttttatttgacatatttaaaattaaaattaaaatattttgtgtcattactccaattaagtctccagaaatatctgccatatagagtttcatatatacctttccagaattaatttgtgtatgtagttatttaaatgatataatatagagtaggtagggatgtctgtgtgtatgtcatgtatgtatacacacacaatttgctgttgtgacatttaactatataaaaatggacttttttcaagtgagtgtattatgtcttctttttaacagataatgacaatgatggtagtcagttctatagatatcaaaatgtattaactcattccctattaatggaggctaggttattactcatgttttgctattacagatactactgtaatgagcattactgagcccatatattttgacaccatcattgctatttctgcatgtcagacacctggaaatatgatagcagggtcctagggtaggcacatttaccattttgatagagagacccaattacagacttttcaaaatactgtaaaaatcctttactgaaggtttgacaccctctggcccatggcctttagaattgggcaaaatgatgaaaataaacataatattattaaaagatggtgatatataagaaaaccaaacaaattactaatatgtgttcatttttcttctttttcccagcaaagaaaatttagaggttgaggatcttagagaaattcactttcttttcagtacaaagaaagttgtaagagaagatgctactggtagcattggtggtgcaccaatcattaccttcccctctgcctgcatattcaatattaaagtgtctgctgtccctgttcatacctcctccctggcccaaaaatacctgcaaacaaaaccaaaactatagtgtttatgcttgcaccttttaggaaaagagatttaaaactcgatgatcagatgttacaacacaaagacctcattttcattcagtggatgaccttaatatgttttgccctaaagcatacatggatggtaggtgattgatgggctgtgaaaacagaaacaaactcataaaaagttaacggatcagaaatagtggtatcagcagcagaaatgtctgcacagcaactgaataagctttaaaaagctcttgagctgtctcttctgatctattaatactattaattggatcaatgctaacaagatccatttttatatatactttcttcatacattcatattttattttatacagtaaggaatttaggcatatgacctaggttaagaataccggatgtgtcctttctgttttattttctgaaatttctgatataaagaaacagcttgttcaaattctgtattttgagaaactctccattagaattgaattttacaaaaattttttaaaatgttttgaggcaggatcttgctctgttgtccaggctcgagtgcagtggcacaatcatagcttactgtagcctcaacattccacgcttaagtaatccacccacctcaacctcccaagtagctgggaccacaggcatgtgccacaatgcccggttcatttaaaaaaatttttgttgcagaaacggggtcttcctctgttgcccaggctggacagaaactcctggaatgaagtaaaaattttgaattttaattatgccattcattgcttacccagaaaagcactgttggtgactctttcatttaatgatgatccccagtcacaaattaaatctaattgtcattatggttgtatcaggaagcttacaaatcaatattctctttatctttaatttatcattagtttgtgatacaaataacaaatatagcagagtatttgtatttgattcagggaattctaaatagtgcatacattatgtcaaaaatatgacaaatatttaatgaatgaattttctctttctggctgttaactcatagaagtctacttttgttaagactgtggtaattgatttgatgaaaaaattagcttctctttggtccataagcacaaactgttctccagcctttatcacaatttatcagtaaggaaaatcatgaagagactgttactgagtcattacaaacacacgtatatagtgacagaaaaaaatcatgtaaaagatgtaccaccgttattaatgacttcaaaaactctacttagcagaatagttatatagtgcctattggcatttaatgcaaggtttaaaaatatgaaaatagagcaagtgtttgataaatatttttctatggataataaaatcatttgaagcattcagtagccttactgacttagtaaaacagagcaggacttttgaaaagcaaaaataccataaattagcttctaagaaatattctgccaaatagcattccagtttttaacattttaaattaatacctttagttcatgttttcttggaaacttaggatattttggcaagaaataactggaaaatacagacgtgtttttgcatccccttttcctcttccccaccactgaaacagatgacctaggttaaggccctgtattgacactttttcacaaactgaggatggtttatgatctctgtcttgctgcatagagagcccaaacagtcttaaagacccagctttatgtacatgtcaccacttgtccaggggtgttaaatggttggaaagacagcatggcgtcatgtgaaatgtgctaaatgagagtgtacggggtatgggatcagattcctcatgtagctacagttctgctgataatgatgactttgatcgagttctttaactcctctgggcttcatttttctaattggtagagataatgggggatcaggttagagagaaggggaggtagatgaacccataggggatgaaccatgcaagaagcatacttctttatatccccagcacaaagcagtatctagtccattgccttgtggatacaagcatgcagtctgtcactcccaacactccttgattctaattcacatacacacagattaaagaaggttttgttcttttaaaacaaaggccataatctagttagccgtatgtggtctgcaaaagagcttatcgtttgacatggactgagtttcaacaaaattttgagtcaacattgaaaactgaggaaatgccacacgatactctggattttgagtggctgttgaaaacctgaacagtctgaaccgattggccttgcattcccacttggcagagcaagtcctggagctgaataatttcacccttttcagaagccccccaatgtgtacactagccctaaagatgagtgacattgagactgagcgttagttgccatttatgtcacgcttatggctgtttttcacatagtaaagaattactgttctttctggagtctctgttcaaagtagagacacaaaagccagccctggaaacctgctcattgtgaggaaatgggaatgagcgtattttctgtgtgtgaaaatgttgactatatgatacttagccctcttcagtcatttatcttaccagcctagcccattccatctgtggagactttgccccccacttcatttagaagatcgcaaatgccgttctcggaatagtacagtagaaagatgcccaagctgcatgttgagatgttgttatttactgtctgggcttatgtagagaagtcatctaacttttctggatttgagtcctcttgtataaagtgaaagtgctggactaagtcatctctaaggtgcctctcaggttaaaatgccatgattttaaagtttacttcttataaggaagtcaccgtgacatcagtctcaccaatatgtaccctattaaagggagccatcttgttttttcctccaacctaaggcagatttcagtgaccgcatctgtcatttttcatgttgactctatattgtggagatcatagcttcaaaataaaaagtcttaacagatttgatgcgtgcctttaaaatgcatttatgggtcgggcgcagcggcccacgcctgtaatcccagcactttgggagcccgaggcaggcggatcatgaggtcaggagtttgagaccagcctgaccaacatggtgaaaccccatctctactaaaaatataaaaattagccgggtgtggtggcgcgtccctgtaatcccgctgctcaggaggctgaggcaggggaaccacttgaacccgggaggtagagcttacagtgagccgagattgcaccactgcactccagcctgggcaacagagtgagactacatctcaaaaaaaaaaaaaataatacatttctattgtacatttgtagcttctaactgatgaggtcatgacactggcaagccctccctgtttgttagctgtgcttcaagttctttgctgccaataatagctgagtactaaagcttgctaatggggtgttagagaggattcaagaatatcaccaagagaaagctcatctcattctcataaatcctgatatgatttctaaatgggaaaaaaaggaataaatggagttataggccccccatcatgaatcctataggactaagagccagtgctgaggaactttaaaaatatcaatatatagctcccacatccacagacctgaattaattggtctggtgtacagcctgcaaaaaaaaaaaaaaaaaaaaaaaaaaaaaaattaaagcacatcaagtaatttaaatgtgtaaaatctgatgtagtaaagactttggtttatagactgagcagtggtcaggttgccagacaaaacattgaaaaggtaccacagtgaggtcaaattcatagttttcttagtgtctaccttttcattcaaaatctaacatatttgtttatatcatataacattttttttcaatattgggcagcggagatgtttctgcagaattgtgtaacaatattttgaagtagatccttggtcattgttttctgatatgagctaaacagtttcaacttagaggagttttactcttgatgattatttttatgccgacattcggtcttttctgatatatgatataacatcataatagactgtgtatacattttggctaatgaaagaaaatagcaacaaacttaaatagttcaaaaaataaacaattcaactgcatactagttttccattttgtaaaaagtaagtactctctcccttcaaagaaaaggtacgataacttttagaacccttacatatgcaccaatagacccttctctgttcagaagttctgtctatatgtgggaagaatgaaagttatgaagaagagaatggctcttgaatttatctagttctatactcttattttaacagttaaagaaatcaaggcgcttcacaaaaggtgatttgtccctattagtagatgccaaaaccagaagtagaacccatgtccagtattctaagccagggttctttctcctgtaccattggattcacacagattctcctcccttttctgtgaaacatccatctgccatttttacttgtcttagaaatggagtgcaatatggtatccaatgataagttttatgtagcgattctttaatgctgtgatatcttgcatgtgatacatatatgtatatatattctgatgtggaatataatgactcaatgtaggtctgcttgaatttttctttaataaacttccaatataatacttccagaccatgtgccagtgcatgccacaagtaaatatgttgatcacatctttggttattattatggtcttctactgctgttatactaatacttttcccgtctccaactggctttactttttgcagctttgagcagtaattcagtcccctacgcctccctgattggctctgtgtcctccctctctagccaaaccaccactcagtccatatatgataataactctctcccacgatccgctcgaaaaggtctaaacatctttgtctctattattttctctgtgaaagcactgtaatgatgtccacatcagtccatttccatttccagataagcctaaagtcacctatgcctttgcatttccattcttttcgttgggggtgcctcatctggataagatcacgtaattatcagatcactgtcaccctcacacttcctccatagaatgtaaattatttcagttctatcattaatacagaaaagtttcagaaagggttccaaaattttgttccaaaggcattattatatcaccaacaaagagtttctacttgcaagcaattcagttttattggctctccactaaaattttagctgactggaagcagaccttcatagccataaaaactaaaccaccacaattcacaacacttgctaaagtggttgtcttcaaaaagcagggtagctttttacttaacttaccagaaccattaataatttggcatttgagataaaggaacttactgggtgacttttaacaatggtataattcctaaaatgctcttaaagtagtcacatgtcatgttgactcaatggccatcattctgtagccttcctccaaagagccacagtgacagcagaatgtcaacacatggcttccagtttgagctcctccctcattcttttcctgcttcagtggcttccctggggacatgctagttcaggtttttgtagccagctggaatttatatctgtaagataagagtcagcaatgctctttcatgatacttctgtaaaattaataggaaagaaataaaagacaaatcatatgaaaagtgagaaaacatcagaaagacacaggagtcaccaaaattaatagtggattatttttcatggaatctatgaaattactatatcttccgctggctgaatgaactagaatgtgtcaccccatctctgctttccttctttcttcaccctctttccctcctgtcttttcaccatttgctcacttccctgaatccatttctcattagtggacaaagatgtttacacctgaagtagattgtaggtttgctgggggttgaataatggggacctggggcaaaatatcacagagttgttagtgtggccatttataaatgtccaggagaaggctgcaaccccaacctctacaatctgctactagtggaaacatttttgaagctcagtttggtgtctgattgtgccgtcagtgattatcgtcagtgagtcgtggtgcatgtcattctttgtgtctgtgtttgcatgtgaatgtcagtcacctacaggtttgtgaaatattagcgatcttaatgtagtagtcacattgtactagccacaatgtatagtgaattctgtaaaaacttgcagcattttaattagtccttttaaaaaatatatcaggctttccatttcatttttttttgaagaatttgttctattttattttatttacaccatcatttcctttgcaggttcagatgattccggttaccctggtaaccttcattcttcaagttagttttccttgattatgcataagtcattttatgtttactatcaagctactactctttcccttttaggcctttctcagtgtctgttttcttatttcactttacaccatttaattccacacaatttccatttcacacagtgcaggagaaggagtttgaaatggcataaaagtcattactcaaagcagaagttgacatcaagcctgactgtcagttttttccactagctaaccttattgattcatagcacaataacgctttcttttacactaggagtgttagtttggagattatgcttggtgacttttcatttggctacaaaattcatcttcccagagcatgtcctgctttgagtaaccaaactatttgcctgcttcctcacctaaaacatctttactactcacatattttcaggccatttctaactatagtattctctatattttggaatagttagcatcattttcatttgttttcaaatgtgtttcttctttgcttttttcaataggtatggctagccatcctccaatacccatcttggaacttgcagaccacattgaaagattgaaagcaaatgacaacttgaagttttcccaggaatatgaggtaattcactgtgtttattctttacagtaatttcaagagttactcttctctttttttgaccatattcttgaaaattaacttcatcagtgcttttccctttaaatatgactcaaatatgatataaaaatgtataatgaaccgtcaacttaaaagtgtctgcacaagcaatatagtaattacagtttgaaaaagttaattttatgtttgttcaatattacttgctgagattatgaattttctgttttttatttttattttatttttaattggcaataattgtatatatttacatattatgcattattattaattatagtcaccattctgtgcaatagatcgctaaagcttattcctgccatctagctaaaactgatcaacatctccccttttgccagccctccattggtaatcaccactctattatctactgctatgagtttgacttctttggatttcacatataaatgagatcatgcagtatttgtcttctgatttttcagttcctagaatatactaaattgataagctttccagcataccaaataggtgccaaatacactgatttgtgataagaatcctcatctagaaagaaagattacgaagattaagtacatttctcaagactcttggttttataagccatgaaaactctgtaattattgagtatgtgtatattatcttatccttcaatctaaattaatgctagagctaatattaagatagaaatgtattttcagagagttgcttgtttttgaaggaatggtgcgctgaatgctatcttaaaattccagaatccttaaagattctttgtgaattcttgatggaggtaaattaaaagcctgtgtgtatgcacgtgcgtgcgtgtgtgtgtgtgtgtgtgtgtgtgtgtgtatttggatattgtggtatatatcaatcaaaaagttataaaactgggtatttctggtattctccagcaacaaggacccttaatgaagccaattaatgcattgttgataactggacgataattgttttttctagaccagttttaacataagattaaaatgtacaactaaaatcttgtagatataccaaataataaaaggttattgggtacctgggcagcccaaatttcaccatcggggtttctattgatttacttactgggagtcgttaacacatcctgttacctcttggtatctgttgtatcagccttaattggggcagttgcactggacctaccagcgctaacattctaccctgtcacattctgtagtaacctctaagaggacccccaacctcaagtggcttagaggggtcacaaaaataagaagaagctccatgtaagagaacatagagcagtgaggcctgtggcatggccttcccaaaatcttcaaatattcaaatgttcattattttaagttactgtgctggaaaaccaaaacatatctgtagtctcattcacctccaccctcaagagccagaccacgtttcattcagtttgcatactgcagcatctttgtcacatatttgataggatgcaaagattttgtttgtttccttgcctcttggtgaagttatatcttcctttattctgctccaagcattcaggagaacattttcaatgctaggaaaattcacaccggattgcacgttgtcttcttttctcaaatggtcgcagcttatttctttcctgctcttcctcttgatcagaatagctcctttaaaattatgcagtatcctttaaaacactttctatagtttctaatttagggcttagggctccatagtgagtttagagaaaataaggcaaatcataaatagcacctggggcaccataaaaaactcttagttatgtcaatttttatgaaccagaaatctttcatcactccaacctactttttattgttatatgattcttattattttgccatgtgatattttttcatagccctgctttaattatttatttttgattataagttatgtaatgggttacaaattacggaaatatgatagctcgacctgttagtaagccgttaattcactctccaccaatataactttaaaccatgggcaataatatagtcatgcaccacttgatgacagggatacctttggagaaatgtgttcttgggtgattttgtcactgtgtaaacatcgtggagtatagcaaacctagatagtatagtctattatacacttaagctatatggtatagcccattgcttctaggctacaatcctttacagcaagttactatacccaactatttgtgtgtttaaacaaagaaaaggtaaggtaaaaaatactgtaaaaaagatttttaggctgggcgcagtggctcacttgtgtaatcccagcattttggaggccaaagcaggtggatcacctgagttcaggagttcgggatcagcctggtcaacatggtgaaaccccgtctctactaaaaatacaaaattagccaggcgtggtggcgtgtgcctgtaatcccagccacttgggaggctgaggcaggaaaatcgcttgaacctgggaggcagaggttgcagtgagccaagggtcgcaccattgcactccagcctgggtgacaagagtgaaacaaacaaacaaacaaacaagcaaacaaacaaatggtgcccctatgtaggacacttagcatgaatggagcttgcaagacttttagttgctctgggtgtcagtgagagtagtgagtgaatgtggaggcctaggacgttactgtatactactgtagactttataaacactataaacttaagctataccaaatttattttaaaagtttatttcaatagtagattaaccttagcttactgtaactactttataaaatttttaaactttttgactctcttttgatatcacttagcttaaaacacaagcacactgtacagctatacaaaaacattttttctttatatccttattttataagcgtttttctatttaaattatattaactttttagaatttttgattaaaaactaagttgcaaagacatgcattaatctaggcctacacagagtcagaatcatcaatatcactgtcttctgccttcacgttttgtccactggaatgtcttcagggtgacagcctggagctgtcatctcctatgatgataatgccttcttctggataactcttgaaggacctacctaaggctgttttaaagttctttttattttaataaaaggagtgcattttaaaataacaataaaatgtatactgtagtaaacacataaactagtaacatattcacttattaaatattatgtactgtacctaattgtatgtgcctgacttttatgtgactggtagcagaataagtttaattacaccaacatctctgcaaccacaggagtaatgcactgtgctaggacgttacgacagctaccacatccctaggtgatgggaatttcttcagatctgttatagttttatggatcagtctcttatttgtggtttgttgtggactgaaatgtcattatgcagcacatggctataaaaccatcactcaagcaatctcagttgcatctattgaatgcaataactggcctcttttaaatgtggaattttcaagaaatgctacatgtaaagatactttaatgatcctcatttagccattagatcagaagtgcttcttgaaaatagttatgaactgcatgctggcaatgctgctatgcacagcttccccagtaggcttagctgtggacctgatagcccacatagactcttcactgatgttcatgatgatgatccatgattaaagctccctgggcatgaattgactctactgtgccttaaccggcatgaaggagatgtttaagtgttgtattcaactgtgataataggattaagacctcaacataaaaatttaggctcagagcaacattttgtggggaaaaattgtttattatcttctacataaatttgaatagatttttactggctttcagcaaagaaaatggaggaaagaaaactcacattgctttcaaacacctgattattttggcataatcactgtgagtaaatgtttactcagaacttgtaagatgcacgaagctaatttttttttactctgattctaagactaaaacaggttaaaggcgtgaaagctgtttgcactgatcctgaggtcagaatacgaggaagtaggttaaattgtagcacagtattattagatcctatgagacacttcctgtactgtaaaggccgttgaactccaacagtgaatttagtgaaagctggaagaatggacttgataaattagtgtaaccccatctctgcaggtctttataaacactttagatgtccattttctgagatgaaactgaaaagtcctgctggaatttaagtagtctcaatttgagaatggcatctggaatgcagggaagaaagtcctccttaaagttggtatggctgttaaagtccatatattaggctggtgaatctttaaatcagagtaatttgtgtagaccttgccaaacaaaatcttaggctggcgcctacagatcatttggttgcctatttaaaattgaaattccaaggaagaagtcaaatccctgaatagaccaataacacgttttgaaattgaggcagtaattaatagcgtaccaaccaaaaaaagcccaggaccagacagattcacagccaaattctaccagaggtgcaaagagaagctgataccattccttctgaaactattacaaacaatagaaaaagagggactcctccctaactcattttatgaggccagcatcatcctgataccaaaacctggcagagacacaataaaattgaaattcctggtcccagccccagaaatgctagtttaataggtcagctgtggtatccacaaatctgcattttaaaagagctcttcaggtgactttgatgcaggtgctccaaagacttcaatttgaggaatgtcattggtttagggtaatgtattacagaacatgacccccagtcttcatttcaccattttctgagatagcatatagactagtatatttaaaatttaatcagtaggcatcatcacagtcatatatatacaaatcttatttagactagatagatcgtaagcaactgcagcccctagaaattctcaaggaaatacagaagagcatttttgatgtattatagggccaaggctaacagtaaaggtacacattaagaactatcatctaaaactgaagggctgtggcaatttcctgatatcttctctggagctttcatctttgtgctttctctgtggtggctttattcttccccttatacaagccagcgtcttctttttttctcacccacgcacagaaaacatggtctgtaatcatattttcatttacgtacaggccccataaagagactaagttgtacttgccagtcatgttttaaatgccagagagcaaactctgaactctatctaattgactgtttgttgtggtgacacacattgggacgtaactgctaacagtccactcatacagatcttagatgggggagagcgaagtttctgtgtaaggaggcttgtgagctgggaggaggaactaataattatccactacagtactacagaaaagcattgtgctcagtgctgagaaaatatagaagttgtaagaaacctgtacttctggagtttgtagttgtcaaagacaagtatatacaatcaaacgagaattacaccaaggaggtaatcttaagtgctggaatgttattgggattcagtaaaggtcataatgatctggagaattgagaaaggtattgaagagaagatggcactcttagtggaactaggaagaggagtgaagtgcattttatcaagggaaaggcacatgagaaatgaacgttctggtagtctcatagtcagtgtggactacagaccagcagcattggcgtcacctgggaacttgttagaaatgtagaattataggtactaccccactgctactgattcagaatctacattttaaaagatattgatgatgtctttgtgtaataaattgtcatcccagctgggcacagtggctcacacctgtaatcccagcactttgggaggacgctgcgggcagatcgcttgagtccaggagtttgagaccagcctaggcaacatggtgaaactgtctctgcaaaactacaaaaaaaaaaaaaattagcctgtcgtggtggcatgcacctgtagtcccagctactcaggaggctgaggtgggaggatcacctgacccccaaggggttgagtctgcagtgagctgagatcatgtcactgcactgcagcctgggtgacagagggagaccctgtctgaaaaaaagtaaaaaaaaaataaaaaaaattaatgggcatcccagtggtcactatcaagaaaagctataaagttagagaaaatgtaaaactagttcccaatgtggtcctcaaggtacagttttctaatagaaatactgtcccaaatcacatactctacttcaggtacattctagatgttatacattttgtggtgtgggttgagataataacccctttttaagtagttacaacaacagcattttttctgagttcctgtcagctcacttacaagtcacattttggaccacagtccatcctgtcatggtagttacacagagatgaacagtcatcagacatctagtttcaagttagtcagcactagctctgttagtagtattaccttaaagctatgtattaactcggagcaatctttctgttgccattggagagggacaagaaactctgtggttcacagaagtgttccctgaagaaggcctctttgatctgttttgttctcatcacaaagcccagtcccaacacatttgctgccgtctctggatgtggactgtctccagtctcagtgctcacatgtctcccaccattcagcacccacatgtgctgagtttcttcctgttctcatggcagcactctcacatctcctgtctgtgatgatgataatgacccttttatatgaaatatttcagatatcagagccctgtccttctgtttttataacaatatgtattacacctttgtagagtaagttaaaatcttcccatcactcagtaagacagataaaggaaaaatatatttccttgatgaataatgaaatacatcaagacagtgttgagacgtatagagacattaaaaacattgcttaggtcatgttttttaatatttagagctgtctaaaccacagagatcatgtggtttcactctcccatcatagaggtaaggagcataagactgagaaagaagtgacttacccaaggtcacacacctactatgtgtggtaaaaccaggtcacaaattcatcttgttttgttcttcttcactgcaccttaacttacctgatataaacacttaaatgtttcacactttatttcttactatgccctgatgatagagttcagaaaccttagtatcaaactagatcaaaatattgatatttaaaatttctgtgaaaatgtcatagttaccaatttccattgcatgactattcctgggaaaacccagtggttctctatgacatgctaaggacgcattgcttttctccatagataatttgttcactcctgatagtaaacattgtatttctccgcagaggggacaaaaattgtctgtcatctaagcaatgaccacaaaagaaaacatttctattttcccttggaaaagactcttggtatatttgaccacatgtgccacagtgtattcacaggcgcagaaccatcattagtaaaacagtcatcattattaggttttgtaaacctctgagcacttataatgcaaaactactgtcatatctgctttctattagtttataatttatgtgtaagctcatgaggggggacatgtattcaagaatcatacaaacaaaaacaagaaaccaaacacacacacatacacacacacacaattttttttggccaacttcgaatgcactggattttttcttgaaggtggttcccccactttcttgaaggaaggaagtggtggacgacagagatctgttttcatcttttatgcaaagtggaagagtggaatagactcttccatttctaagggaaggcctccatttctaagtatttttgacatatgagtcacaagagataaaagattgtttttaaaaaagttgagaacaaattatggtggtttggtaatggaatgagaaaaatgagcgattttgtgaaataaaaagcagtaacaacatttttgtacctgggatggatgaaattgaggaagatgaatggctaaatttactattccagatcagaatctcctaatacactgggattggaggtgggtgtgggagagtctttgcccaattccttacgaacatggcagtttttctgcttctcagattgggtccaaacctctctgcctgccactccgggctttctacttgttgagccagcagtgggaataaatattatgacacagttgctaagtatacaggcccttggctcaggtcaccagtttggcccctagctcaaactgtgtgaccttaagcaaatgactgaacctctctgtattttagtttgttcatctctatataaagaagcagtcatagtacttacttcatacaatcattaaaaacaaacacatacatgcttatcaggtttcctgacaccagtactcagtagtcttagtaactattacttattttatctcatctaggtgccatcaattttaagatactccatcattgcatgtaccactaaggaataaaagatatcacccctataactgcacgatgccatcaattttaagatgcacatcaatttcagagatgttagaatgtggaaaggaaatgtatgtcttagaatcaatgaaaccctaccatttcctatcccaggccaaacccttagggctttgctgatgtcagtaaaaaaaaataataataataatcataacaataagaagaagaagaataaaagactgaaagaaatggaaacttgctagtttaaaccagtgcaattatcacttgttatgttgccctttcttactctccagtcatttgctgtgatcaagcctctctgggtcaggtgttttggtcaggtgtctggcctctcggtatgctgttggccacgtggtaacaagctcaccgctcggcacacagcaggtgattaaccaaagtgtgtgtctggatcaatttctaactaaatttacagttcatagaaactctttgttgtgatcaaaattgctagtatcaacaacaggagcaaacagaagaaagagtgtcctgctgtaaagagctgctttttccagtcgacatccccacctgatctatcagcagtgaagccttattttcaggctcttttctctcagaaaataggctattactatctctagacagtgcagaagtgattacattttaatgcagacctctcagatttaactcaaaagtacctactgaataaagtccctgagccgcttttatagcaaagattggcctaccagtcggccatctgagaacatgctgtctttgttctgcagttaaggaccagtctcaccaagtaaaatgaaaaagtacagagtcccctcccagtgggctgcttttggcatcttataaacaaatctagtagaacacaaagacacagcagctcaccttagaagaaacattgcatccaaaacagggcgtatgtctatgcgcttatagtctttttttcttactgatcttctatagttgtgaaaactcaaagtgcaagtaatttctcaagttccaaagcttagttctacttagacttttaaaatgtttgttctttcacccacattaaaaaaaaaaaaaaaacctcagacattttctttactaacattaaacttcgtatctttcatagtagagccttttgtttttttcttgtgggagtcctacccgtcttaagggactctcacataactcgttttctgtttcccagtccttattctcatacaatttcaactttcattttttctcagtcgttgttctcatacaagttctctataactaattggcccttgaccatcactggacattctccaaaatgtcttttcacctgctcccatgtggagcccaaggctctcaggaaacaactctgtctctgcttccaaagcaagctttcaacttccaagagaccatagcaaggactgaaaaaagacactctttattgagttgcatttttatttcaaagtaaaattgggattttagcaccggaatgctaagtgtgtacttagagggatgccatagtggatgctggggagggccttgaagtcagggaaaacaaggttcatattttgactgggccaattagtagctacgctgcttgatcctgagccagttgctttacctctcagaaccttggttctcttatttaagatgagaagattagtatctacccatgagactgttatgaagatgaatatatgttaggcacctggcccattgccctctgcgcttggtcaacagaagtggctcttgttattgtgaacttcaatatgcatgacctatctgtcagtcacttaacatgacttttttttctcaagtgatttttatcttctataacattctcttctcattcttccaaaaaggagctctatgaaagcaattaggggaaggtaaagggtgacaaggatggagggtaattatgaagaactacagagttcttttcatattttgtacataatatcatttctggaaattatatccacattaaaatatcaaaaaaaggtattttcactgacgaatggaaactgtcctgatgtctctgctagttttaatgcccctagacacattatttaactctcctgatctcagtttctttgtttataagaggagtagcttgaatgccttcatctgtttaacatttactggagaaccaaaaataatcaagaaataagctgtcctgaatgagtccatagtcttctaggagaaacagaaaaaaaacaaaaaaacaaaacaaaaaataattgttaagttaatcttgggagtgggacaatattgacgagagtcttcccagagtacccatgacttggagagtcactgaagtttgccagaaatgcaagcccccaggctgagggatctgtgcatgcaaaagcatggagatgagaagaagcgtggcttgctcaggggttcccaacatattctgtgactgtcattgcagctcagggtcatgctgctgagaggtgaggtgtgaaaggtgattacacccttgaaaggtcataacaatataggaaggagtctgcaaccaagtgatttcaaaaatgttcagaaaagtcatggaaatcacttcctacaattcctcctgaaactccaagtacctgagggaccaaatgagtacgtctatgtttatgtcactgctgggaacagctttcggggaaaattttaacaatgctgcaagaagagattggaacaaggctgcctagagcctgatgtaacccagcatcatagggatgactttacttatttatgtatttaattgtaaaattataaaatggtagtggcagtattatttgtcatggtttttctactgtggctaaacagtttgtcattctttttgaaaaaacaaatgttgggcacaccaccatgctttgggagtgtagatgaaagtgaaggatgtaagcattaagagattacatgaatttgcagttttggctaggccttgggaaacattagtctttccatcgtcacagatgcagcaatcagagtatttggctttagcttaaaagttcatgcatgaagcataatcagaactttattatatatcacttgctaaaaaaatttccttaacagcaggcactcatcagtcctctaaacttcaaccagtggctcacagacacccctgatttaatttgttctttctctcatgatccctcctcccttcactcattcttttattccccttctcttcctctttccttcccttttcttcccagtccccttctttattttctgccagtttaacagagtatttttatatcatttttttagtattaaactgcacattttaatatcataatagtctttccatagagtttcagagtctagatagtgctttacaaggatgatggtgatagcaaacatgtgtatagcacttaccatgtgccagacattcttcggaatgcattactgtaaacattaactcattcagtccttccaggtaggtactgttagtctccccatgttacagaaggtatgttgaaccacatgaaagttaagtaacttactcaaggtcacacagctagtaaatggcaaagctaggatatgaacccgtgtagtctgaggtctgggtaatgttctgaccactataaatagttgcctctgagagttgatttcctttcaccacagttttcaccatggaaaatttgttgtcattaacttatctgttaaggtgatcacatagtagtcaggtgaccccaaggaaggattattgtcccaaatttctttttgttataattatattttatttttgcttttcaacatcagagacagtctatcaacaacaacaaaacgacttagttttaaatgatttggataggaacctttatacccagccacccgcttcatgctcttgtttaatttttattaaaaattagcaagtttgaagatgatgaaaggattatagtttatatctgaaacaaatagcattccatcctaagcttgtcaaacagaaaaatatatttgattagttgggctagaaataattcatcagattgattctataactacctatattatagtgactgcctttgacttctgatcttgatctaggtaaataaaatcaaggaaaaaaaaagcagatggttgatgggatttaaaggtgtaaagactcagccttaactctcacaggggatagttggtattgacttgtttcttgttttgacattgtcagttatagaccagagtctacctacttgtctaaccctgaagattaaaaaaaagtgagacctatactggcaaggtgcccttctcactacatatcacgagtcagattccagtttcatttagataagaccaatgaagaaggggaaacttgctcaccacaataaattatgatttataagtcttttaatatgatacatagtaatattcacctttaagattctaaaaacaccttttcatatatgcaaaatcctttcatgtttctgcaacttaatttcatacaaaagctgctaaatgatttgaaaagataggagctgttactgtacaatcagaagatgcttgccgtatttcaagatggcaggaggatacaaaaccactgcctacctacatttatttccattagcttaagaatttattgttattattgttttgtttgcttttgctccagcttttagttctgttaaaatgaacagtatgtcaggtggcatataacttattgagccggattgacgaggcagaagctcaaacataatttaggtgattggactggacgatctttttagattctttctctcttgctgaaattctgtttctctggttattatgaaacatgatttaatgtaaatgtaataacgttcagattctgatgtcaggtttccctttttgttttctcaatgctgtgtttcccctactcccatccctgcaggcttaggtcgagtctcttctattgccgttctacaactcaggagtgcctatgtggctgcagtgattgagaagctataattagtatagttaatgaacaatgaaatgctgcctccctttttattaagagcagttagggtgctgcataagggaaggtagaagattttaccacccactaccagtaattaattgacctccttgtcatctgttgagacacaaggagaataaaaattttcagtctaagtgttagagttggtggatgttgccgtgcaactgggcattgatttccatttttgttctttttctattccttctgtattgatccttgttgtcacagctcaagaaatcatcctattatctttaaaaaatccttcataaaattttagaggtttaagtttaaattcagtgtcacaaagtttctactgtgaagttatatttgaggatttctagaatcttctaacctcgttcactgctgttattttactgtagagaagacattttcagggcagttaagtgacgtggctgaagtctctgcaagtttacatctaacattatgcaatagatgacattttctaagtagactccctagataaaaacaaacacataaaaatgttttctgaaaaataaacaaccatcatattacctcctaaagtcatgttaacttgaaacgttaaggatgtttgtttttctatgtgagaacccaaattataaacattacaaggattgtgataaagtaggaattttacttatgggaagaaataaggcagttttagggagaaataaacttgtgtgatatattttatatgtttttcttcatcattttattattgcaatatagttcacatataaaatttaccttttttttttttttttttttttttttttggagacagggtctctctctttcacccaggctgaagtgcagtggcaccatcagggttcacggcagcctctgcctccacaggctcagatgatcctcccatctcagcctcccaagtaactgagattacaaacacacaccaccccactggctaacttttcattttttgtagagatgaggtttcgccatgttgcacaggttggtctcgaactactgggctcaggctatccacctgccttggtctcccaaagtgctgggattacaggtgtgagccatcacgcccgggcaaattcaccatttaaaaaaaaaaagttcagtgaatgtactttatatttaaatattaagtgggtatattataaagaatcaagaagaccactgggcttttttttctacctttggtgaatatttgtgtttcttttgtttgtattgcttttaaacatttgatggagggaaactaagggcactgaggagttgtttgaaaatgccattgtcaatttgggccaaactccagcttgaggcttgagtacaaggccaagattagggtgatacaggtgcctgtcactgtgtatatggcagatttgattcgctgtttgctgtgttgaatccatggcattgcaagggattacagggtcttcagttttacttttgtgtcttctgctattatgaaagcttcttcatggtgtctcgtttatcaggatattcctgtgactagcatggtaaaattttctggaattaatacatgcataagttgagagaaagaaagaaagagagagagagagagaagagaagagaagagagaagaagaaagaaaagaaaaagaaaaggaaagaaagaaggaagagaaaagccagaaagaagagagagggagagaaggaaggaatgagagaaagagggaggaggttggttttctctgcatctcctgcaaaagagagaaagaaggaggagtctagtttgctctttgcatctcccactttccaagcatagtcacatgatatatagagagatatcatttatcaagtcatgaataagcatgcttcattaggttataactcttaactactactgtgctgcagcagaagtcttttggagacggaggaacagcaactttatgggcatggtcctctttctaggtggagaattcacctttggctttccttggtggacctcccttgggcaacatattgccaggacagtgcaggacatcaagctccctgacagtgatcctgtacacagatgaggaagacattcttctgcctgaaataaaacaacaggggaatactgatcacagaactcacttttcctacgctctcagtgtctttatattttctttttttaaaaaaaaaaaaaaagaaaaatgatctgtagtattcatgtctcaaagctaactctgagggcaaagggagctgtctttccccaaagctaaaaatctgcctataaatttcataaagactaccagcttcagtatttatctctccacagttgtattgtaaaaatatttgcatgaaaagaacatctttgtttccttaagtcttcatctgctcttggtactcatttgctcttgaaaagggatataatcgttttgtttttgatctataatcattcccacagcaaccaattgtgatgccacagaccaaggattataattttcgctggagaataaacagatgaactttgaaacaaagctgctcatttctcccaaatggccttgagaacaagaagaccaattctaaaaattttagctacaaaaaatttaaaaataaataaaaataaaaattttagctacctaagaaacaattttcaagatcatgaatgctccttctttaaaagtctatataattttccagctttatattcagctcatctcataaaacagatatttactaagctcttacaatgtgccaggtactttgctagactctgcagtacaaaaataaatgatgcataaattttgcccttgaattctgagtccaagggttcctttagtgtttttatccaaacttaaccaaagccacaataactagaatttgtcaggattttggtatgcagctatgagttttactccatggttaatgggactggcatttttgtctacgtttgttacatgtaccatgtgaggggtgatgggatttcttctttttctgacactcaatacatacaaagatgtggaaattcagtaggtcagggcagttagtgtcttagcaactgtctaaaatgtgtgtttcaaagtatttcctaattttttaaacagaaaaatcaatccttcagactctcagatttttggacccgctgtagggaaaactcatgtttctctttctcatattctgttacttgaatgtatgtgaaataagattagggaacagcatttgttctctattatgcttccctggcagaacttcttagggtttctctaagctgtgggagcagttaacaggcatagtattttgttttataatttcatccaaaattcccctagctggatgaaatatatgcccccccgagaaagaaatatgagatgccaaagaatcatatagatatttttcttttcttcccttattgtaaatcattggttaagatgacctgcttatattttaatatttatattggtaaaagaggctctatcttgtagagcgtgccatttatgtttgttactttacccatattgttatttatgaaattgtttaggctttttgttttttgttcgctatattgtttggttttcaaagcatacccttgaaatggagtaaataagactcactctgtgtaaagactgaatctatcacttaataagttttcttaataaacaataggtgttttaaatgacctcaaacatattgtctttttcagaataaaattctgtttacttttattgaatagcttgattaataatattgtttttcttttcttttttttttttttttaattttttggagagtgggtcatgctttgtctcccagactggagtgcagtgagatgatctcatctcagctcactgcgacattgaactcctgggctcaaactattctcctgcctcaggctcccaagtagctgggactacaggtgtgcattaccatcttttgtgatgagtttttaaaattttttagaaacgatgtctcactatgttgctgaggccagtctcgaactcctgcctcaagtgataatgcttttgattttgaatgaaggagccatttttacaaggacattatcaccagacagacatatataaatctcctagcatgggtatatttactcaaatttgcctactattggatctgagaaggtatttttattcttccagtatactctaggccttgttcaagttgtacaacttgaatggttcatagcttagccaatgggttattttcagtaattttgataatcagtataattgctgtaaagtctatgaatttacagctatcagcattgatagaacatactcgaagaatgcatcagtctgttatcctcaggtttgtgatcctggtatatataagactacgtgtaattccgaaagaaataagtttcccaaccttgaaagactttcacagaaattgagacaagaaatgattaaaattacaaaaaaaaaaaaatgtattttacatacattttacatgcactgggctagccattttctagactacacagatatataccagacagtatttccattgagaaacttactatagagttggggaaataaagaattgtcaaatgaaaagataagttatggtaatgaattcaaacaactttacaagaagaaatgctacaaggctaaacgtagctagttgccaaatggatgctccagtctgtaacacatgatagtggcacacatggaagcatgtaagagaaagctccaggcagtaatgaattgggagagtgggatttaagctgaaccttgttgaaaggaaggtagaatttagaagcaaaaaaaaaagaaaaggataagaaagtgctctccaagcaagaaatattccagtgcaaaaaagtcagaaatgagaacctcagacatggacagaggaaaacagagccaaaggctggaatttaaaattattcactaggactgattatagccaatccaatatttatattgagttggtatgtaccctgagcaccacaacatggcaattcctgactttaaagaacattaaatcagtacaggaagcaacataatacaaaataagtcaaatgtagacacagagtgcaataggcattcaaaaacaaatcaccccaaaacatttaatactctttcaaagagaactaaagctagtttttgaaatttcattgttagtatatctgtgtatttggattacagttactgtttcagctttttctttggacacaagctataattgtgagctttctgttgtattttatttaatgtctactgcatccccttagtataaatatgcctctttcactggcagcctacattttgatcttgtagctgtctctctcacagtagttaatagaatacttgaaaaggtgatggtaatacaggatgacaactgctatactttttctgtgttcagactcagtaaactatggttatgtagttaagcaatgcagttctttgttaatgacagatttattgaagacaagctttcagaagctttcagattctactagaaatcctattaaagtgctatccattaaaccattagaatagtcattaaaactgttagtgtagacttgtttttcatgagttattggtctctcaccattcttagtagtttctgccaatacagctctaccctttgctgcattatggctattcagttctaaggaatgaatgtgcatcagctttctctcttttcccgcagaatttatggtgtgtgagggttttggggcagcactgttgggtgtgtagaaaccagggagaacttgagatgtgtctttttgttcccaattattaaagtaaagattatacttaacttcccactcttttggatttgataggagtcatgttagaatctaacgatatattatagaaagctgtggcttgtctttcattatcaaaaaattttggcaataacaactgtgggatgaatgcatcattaagccaaaattggcagaggtatctggtgtttaatctattttccttactgtccacagtttttaaataaggaattatgctccatgataataaatttataatttacgtatctattagagtgtagtagttaagagctctgtcttcaaagtcaggaatctctgcatttacatcccagttctcctaatttatggaccaccaagagtgactcatggaaagtatcttaacccttctatgcctcaatttctttatctgtaatatggagataacaatatctaagatacctctaaatttgttttaagaattacatgagattctgtaagtagtgataatccacccctcattgtcatcataatcctcaaaatcagaagtaatttaacctgattatttctcactaccatcctttggtgagtttagagtaagacagtctagtcttgtgttggcccttcagtattctttcctggtcataaatctacactgaagttaccttcatggaccccaaaagccagctgaaaaattttctatggatttcacaaaatcccctccagagtgttgagtcctacagtctgctccttctgcctctgacatgacaagaggaagtcacatgtgcagttgtgaaaagtattctgcaactctcttttttccctcttcctggaaagtagttcaatgttcataaatggaaaaattaaagaacatggatagtaaacataaggaaataaaataattgtcatttatcacagctcagagataactgctgatagcattggtgtataacattctaggtttttatatgtgtgtgtattcatgtatgtatgcagtgcatgtgtatacatatgtatatattttaacaaaagtactgtttcatgttttttctttaacagtaaaagtttatctttccacgtcactagatgcataacaattttaatagcttcacactttttcatataatctactattatattaaggctatttccaagcttttcaaagttattttaaatgattgtatacatgtgttcaggggaaatattttttttcacttttaaggctttctgacagagtttagtatctgaagtctaacaccaggaaatggatgaatcaaagactgacttcacagtggggtgaattgagccaggtagagaaggcaaagtgatcccaagacaggcttccagaccttgagaataccttgatatggtcactttacaacttgcttcttagttctaaaacttgagagagatctgttttctggaaacctcacttgcattagttgtgtggtcttggtggccatgtaatgaagctgtgacgtctaaatgctaccgtcattctgagaggaccagattttcatggtcatcgtcctccctggccctccattgtctgcatgtctgtggcttgctttctctcctactaactgacacagcatttttttagatatgttaatacacagatttttaaaggacatgttaatttatgttttactgtttagattatattacatttggagacacgtatcatggttgaattgtgtaatactcaaacaataggtctatggttttacttccaaagcattaaaaattaaaaaagaaattatgacataattacatttaatattccaatcacagccttaaatattataaaatattataggtgatatacaagattaaaaatcatgtctatagaatgaattatcagtttgtaaaattagttcgtttactttgatcataattgaatacatatccaatcacaattgaatacatatccagccagcttatgtactgcacattccttccatctccaatgctgtcttagaaggaggaaaaagcaattatcagaaagggctaaattgttggtttgttagagagcacagtaaatgtgtgctgagaaacacattctctgctttcttcctttttctctcttgtgtgcagcaccatagttaaggtgaacaagggtgaatcatggtaaggtcagctaccttctctcattctggattcagtatctcattgctgcatcaatagtgttagataattggagataggtattgcactgcagaaatttctctttactttttcccacccacctatccatgtgatagtttgtaagtgtacttactttttagcagagactgccccctgtctgtctgtctctctctctctctctctctctctctctctctctctctctctccccctccctctctctccccctccctccccatccctctctccctccctccctccctctctcctgctcccctgcacgccttccctccccgtacatgtacatgcctgactgatggttatgacactgtcatgaagcttgcctagatatagatgtgaatatgaggaagttaggtagaaccagctctaccttggggtggccatgtaatttcttgcctaaactgggatactttgagagtgagaaagggtcctattaataactacgctgggacagtaggtgtaaactgggatgtagggactacctaactcaaactcagcctattgtagagctccattctggaatatttatccttccatctgatcacattccttccattctccctataactcccaacataagtggccttgagatctttggggagcacaactgttcaaacaaaccaaaaaaatgaaaaaaactattgtattaaaatagccaactaattgtataaacccatactgctgtgcagaaaattgggtaatacagtttatacagaactgtcattggcaagtagccattatgtgttacttccaaatattaagtacatatgtaaaaattggaaaacacagtacaaaaggctgtcacaggtgatagcttagaatgaatttcagatgcacaaaaagtcaaagatggcttttatgaattgggttgtagccacttgtgagctgggagccattctgtttatttaaatttttttttttatatctctggtctattccaatatatatttgtttcatcatcacacctttggctgagaaatttatttaactagttctaaggtactagggtaaaagtaattgttgctgtgtatcctacctgtaatgtatcttagctattcattccacaaatacattttaaaattcactgtatgctaaatacaaaatatacaacatcagataaatcacaaccccatagcagtgttctcaagtgattccattttttccagaggtctaatacataagatcatcaatgtactgattttttttctaatatttaacttagaagagtccctaattttacaatgtaaaactaatatacatttaaaaatactaatctttgagagtaatcttttagtttagaaagatactaaactctaaaattctagattgtgttaatttgttctagcctttctagttttatcacatgtaagagacaaatatactgacactttagattgtaaatactttctaagacacctgagcaccatggatataagtattaatgatcatcctgtgtgacttctttgattagaagcctatatttagtatggtgtattgctaccttacctgcaagcactaatggtattaatggcaaggggttgttggtatatatactgtgcccaaaaggcacatgtggatagtcatgttttttagtgagatagttgtactaaatacatttggtatgaaatggggtacaagagttttttaagtgattatttgggattttctgagttccgacaaagactgggagaaaacattactctttcttatttcattttggatgtagaatttttatctctttctgaatcagaaaatgagatttgaaatgcattgactgaacattaacaaaagttaatttatgtttcaatttagaaattcatctgttccctccacctgcatctgaaactaaatatggaaaaagaaacaaagacttaataaagaaactttctgttaaatgacaagcaaagcaatgatgaaagcctaaaatacatctatgtttaggatgcaaagtaaaaataataggaagaaaaatcgtatgtttaaaattaggctagacattttcatatttgattaaaagaattactgttatcacttaagctcaactaatccgacttttaaaaatgaagatgatttatcttaacaattttccttatagtgtttcttaaatgatgttgtaatatcagtcgcacaacaattgtgaaaccaagctattcattcataatttgttttttcttttgaatctacttatgtactgagttttctgagtggtcaagtttctattatatgaaatgcaaaaagtgagaaccatatgcagctgtgctcttttttgttgtctctgccggaaaagtaaatcagtttgcaaattacatagatgggcatgttatatagtaagtaggagagcagaaatagatttatttgttaaattgagcagttgcctcagttttatacttcagtatcaaaaaaggcaccgttagcatcaaggagaatgcagatattccttggaggctaagatagtcttctatcagggatgttcttatacaagtcacagggtagaggcaagagaaggcaaaacatctagcattcttttagtaataactgtgcatcaggtacttttcgcttaatactttgggatctatacagatgtgtcagcattttcaaagagcagtgaggaattaatgcattcatctagttaatttggtggcaaaaactgggaccttgttatccatggaaaagaaaggatgcagctgtgaattaattcttcctaatttactaaaacactaatttactaacaccgtaaattagtgtttaatgctgcacattgattgtatttgctagataattttgtctgttacctatactcaataatattctctttaatgttgccatactctttaatgtttctaggtgtgcataacctattttaatattttgtttaatgagattgggtcttgctgtgttgcccaggctggactcaaactccagggctcaagaagtcttcctgcctcagcatcctgagtagagtaggtgggattacaggcacatgccacctcaccaggatcctctttaattattaaatatcatactttataagtgatttgcagatcaagtgacttcttcttataagtcatcgtaattacattttaccaattcagtcaacattgtctatttaaacaaagcagtttaataactttctaatacatttgcttgccccaaactgcctggaaattctttaatactctttgctttttcaaataacatcagaaattctaatctgtgaattgtatttgtaaagtgatttccaatgacacattctattcttaagaacatcaactatatagaattcaaagatgtgaagaaataaaaaaagaacatcacctataaatctgtccatctctttcttattattcaccttatctgatgtaggagataaatagctaaaaatgaaaacattaggattaacacatatcgctgatcttattcctctagcacattgtctttggaaactagaaatgtctttcttctgcatttagtaatattcaggaaaatgtttggcatattaaaaagccatgtatagtgttgggtgtagtgactcacgcctgtaacctcaacactttgggaagccaaggcaggtggatcacttaaggtcatgagttcgagactagcctggccaacatggcgaaaccctgcctctactaaaaatacaaaagttagccaggcatggtgacacatgcctgtaatcccagctacttgggaggctgaggcaggagaattgcttgaacccgggaggcagaggttgcagtgagccaagatcacgccattgcacttcagcctggacaggcatgaccctgccacaaaaaaaataaaaataaaaataaaagataaataaaaaattttaaaaaagtatatagtaaaaaatctagttatttaaatctttaatcttaaagttgtatgttcttttttggattcttatttggaacgatctctcaaaaataatcttttctacagtcacacactaaaatagtaaaacactttatctgaattctagagagtacctcatgttggcctactgagttaaaaaaaagaattaagtatttttggttttgttgttgtttttcatcatttttaatccacgttagattaagataattctaatatacttctgggaatcaatggtttcctcagtgaaataaactaattcatctttagtactatgatataatttagaataaattgtttatcaaaagtttacctcagatatttactcacttgccatggatgaatgatttactatgagcatagtttatcctttttgttccctgcatgtcagttctaataatatatattattactttaagtaattttctatacgtatttgttatatagtatgttagagtcaaaatttcaaatgcaaccattagacaacaggtaaagctgatgcattttatcacttatctgaagccagaattttaactgtgtacaaaaatatgtgactgaaacactttttgatgacttcaatgagtgtggtatatttatacattttctatgccttttctactactaaaggtggggcactcccacatccattcatttgttaatactgagagtcttgaaaaatctttatttcaatccttcacactctaatgttggcctggatcagaggtgctcttacagagagagactcagtaagatttgataactaattggacaaagagagataagagaaaatgaggacacacacctgacactaggttgacattaagaggaaaagggaacacagagcaaacagacccaagttacctgaccggccagagctaaccaggggcagccagaaagctaacaccctgttctctgacttccagattttgttcaccactggactttccactccttcctcacatttcagtttctaaaacatcataggattcaactgaactcatgctcttctctttgaagaaagtattcattatgccaattgcaggcttttactaattgtgcaaaatatagcccttcccatctatgcaaacgtggtcttttccaaatgggcatatattaatttaccattttcaaacagagaagagagagacaatgaatgagaattttaaaaggcataattgcagaatacacagtgaatggtagattgctcttctaaacctcagaaaggacttgagaatatctcagagccaaccacactaagaaccaaatgagcctactgaaggggagatatgtgaaaagatactgtttctttggaagttaaggtcattgaaagttcaattccctgtaaaaagaatggttagtctgacccatggtttgacgagtgaagtaactggtctattccttctatataattaaatttttgttagttgttttaaaaacacacaaaaacaggatgatctttttttgtggtttctctttgatgagtttctaaagggaatattttgaggtttttctcttggcgggatgagggaaagtgaaacacagagcaactagtattgtatggtgttttgcacatttgaattatatttttcttctgggtaaaaaggttgaattttgcagaatgattaaaggactttgctttaagataatgacttcagcattattgaaaaaggttactcccatatcaggatataattttacttggtgactgtaatctgatgtgcaaattgatgatcactctcttgtttggagtttagaattacaaatagagttcagcagtactacacagattgttcccaaccttctgtgcgttgtgtttcaagagaatagttgaaaggcaagtgtgaaaccttcaaggaatcttctccagcttaactagagagaaagcatcttatggtggctgggccctcagcctccagggccagaatatgtggacccccagcctggcctctctccctgctagctgtttgaccctgagaaagttatttgtcttatctatacctcagtttcctcatctacataactgtaatcataatggcaactacttctagggtctttgtgaagataaatgagttagtatgtacaaagcacaaagaaaacatagtaaatgttatctaagtattagttacaactattggatatatttatattttaattctgagtttttgtcgagaatacaatgcaaacctctaatccatctgctatagcttattttttcagttacctagtttgagataaacttctagttgatcaaataaaaaggattagaactttcagaccatcaagttaaagactaaataaatgcaaagtgttttatattagcaagtatctgcttgagactttcccgttgttctttaaatcactcacaataggattttttcttctattgggtcattttttctgagtaagcaaagcctttgagttgaagatctgttgttagcgttagaaaggtttagtcaaaagctgcggtggggaggaggagtcaagtgcccagtgtgcaggcagggaagcaatgtaaaatggtgcggcatcttggtaaaactttagacgctatatggggttcatccaatatctgtctttcaagaggctttttgattggctggagacacaaaaaatacgacgaagtagcatttttgtgaattctgtgataatttatgtatttcgtatcatgtataaaagtgtattaatcaacttttacttaaataaatctagcttgctttatttctaacttgcaaaattctccacaacggagactgaagaaagcctggccaggatttcagcttgggaaggtaaaacttcagattgagtgctgggaaggcaagggtatcccatggaagattatttgggtggacagagttgagtagacatatctaggagtcaagctcaggaaaaccaaacactaacagcagcagacccaaaagaaggaattgagtccattaagaacaaaggtgcttatttcaaattgttttgaataattaatatttgggtaacctcagcttagctttatagtaaaaaagatgcatggtcagggtggactgaccgaaaatacagggttgaagtgaaagtcaacttttacattcctcagggtctacattgctctttcttcattttggccatctcactcttccttaagaggacagcagcaagagaagcctgagaacagagaggcaaagcaactgtgtctgtcaccagcaattagggtcttactcattcatgatctctttgtcttagtaatatggataactgaaatttgattttcctcaaccagttttatgtattttttgaaatatgaaagatcttagtatacctcaccaactttcagttgttattctttactgagtttactgctgtcagcattctgacaagctccaaaaataatgacccgtgttgtgttttgttaaacgttcagtcagacagatagatacagatggatgagtgctgtgttgcacaaagacaagtcagcattatttaatcaatgtttgtttgatccgtgtaaaacgagtataaacgtaagctgcatcccatctgttttatcatccatgtgaagccaacctcatttttaaaacttgatttcttatgtaattgccccagaatgacacaggctgataagttgggaagaaatatcatttggattggtgaaataaaggatagtgatgtgtaggtgtgtttcttaagttgggcttcttccttttgcagtggcattctggatagttaagtagtatcatggcttagtcgttaccagctgttaattatcagttgagctttggaatcacacagacctggtttgagggtaactgtatgaatctagctgtgtgagcttagccaaattacttaagtaccaagtagcacagagcctgtcacgaagtaggccctcagtaagaataattaaattaatctttctttacttcagttttctcacctgccaaatggaaaaaaacaatacctaccttgtaacaattgtgaaaatcaagcataattcttcatataaagcataatgacctagcacgtatttttataattatcctgttatttgttggtcttcatctcatgggccacactttgaacctaagcgtattatctaacataggtggcacacaactcatgtttctgttactcgtttttaaagtcttcaatgtaggtatcaagtaagtcctacagaaggctgaaaacatgtggcaagagtggaaatggacatgagttaacagtttgtttcagttaatagatgcaatttcattgctataagtaaatgcatgccatcttatacatctgtgggtgatcttagtctaagtaaaacaaggatatcagagggagcactgtacgtataccagtgagcttagtagcttcttgggatgtttaaatgatgtgtaagaagcttatgtatccaataatgttcatcagtataaagtggaatagcagtggtagttataattccatgatcacatacttaatcactaagccatatgataatgggtgttaagtatgataattgtggtatactgtacaatgaagtttccataatttgttctctaactctcatgttatatagaggaattactctatgatttctctttatgaacttttctcaaaaacatttattcatcaattctgttcatttgcttaaataacatctgttggaccatttactgagccaggtgtagtgtagatgcaaagatgacgaaagctgcataggtaggaatttagaatttaggctgtaggtcacacagagccagtggaagttattaaacaggcagccaacctgtccagagctatgctttagaaagacaactttggcagcagtatgaagagtggattggaataagagattagagaagggatttcaatcagacaacagataccaatgttccggatgtaggaagtagcaatgagattgcaaatttgagagatttttaaggcaggccctcatcactgagtggagctgttctgtgtggacatggttcaaggttgacttgaaggcttccaccaggacatctgaatgcttcaataccttcggctcatagcatgcttggagataattaatttctgcaagggagatgaaaaatttccctggaagagcaaactagaaagtcccttaattatattagttttcagactctaaggtatggataattattaatattttcctgaatactgctcattgattgactattttgtatatagattaacacaggctaagaaaggaaaacagtttaataatccttagtaaattagaggctggaatctgtactgctgagaattttagaatgcttggaggctattcaagactactaacagacttgacttttgacacttgtgagttttactgttgtgataaattctgtgccttttgacagaaagtgtgcacatctttagtattttgatgctgttgggggtatgttttactcccaacttctacatatacacataaaggcatgaaaaatacccggcatcaaaaataactgctaaaaattatgttaacataatagagtatattttaaaaaaattacctgggtataaacctgttttatcattcttgaaaacttgattttgatcgtttaaaatcatgtttgtgtcattaatgaacttgtgtttccatataacaatgaaattataaatcttaaatgttatcagtagcctatgatgaaagaaaaagtattttgatttccataacgtttcaggaaatgaagtcccctagagttttatgatcaaacctgaatttggtcttgaaatgatgattctacttaaatatttttaaattacatactttatatacctgtttgatgtttattttagattgttgaataatttggttgaaatgtaccatcaaagaaagggataaaatcagaaaaaaaaactaatgttaaaatcaagaataaaaagcaaactataaacataataacacataataataaatagaaaatatataatgataaatagaaaaacaatttatatgcattgggttgtatcttattcatctgagtattaaattaactgacctcccttctttactgttcgtgttaactatttaaattgtacaatttgccttgtaatattggtcttagtgtgttacagagaaacagacaaaaccttaagttgccattaagttgtgaacatgtagataaagaatgaacagtaaagcctgtgtccattgaagccagtgaaagaccagttaacttaaagactcagcttaggtccagataggaaagaatagggaagaataatcaatataaaataaggtttacagaaccggaaggaatattgaaccaagatgacttgtaaactacagcagcagagagggaaatggaaaagtaaaattaagaacctgcctttccaatattaacagaacatctgtattgatttcttttttcatttgaatcaatgttggtgactatcactgtttctgcagtgattaaccattttttgttatgctggttacattagtgttcagcttcacagttaggatcatcttgatgaagtatggcttcagaattttccttttaaatcatgtttattacatgtgataaatgcctataatctggtggttttcagtattgattttgtgtatatgtgttgttttccttttaaagtcaattgaccctggccagcagttcacttgggaacattcaaacttggaagtaaacaaaccaaagaatagatacgcgaatgtaatcgcatatgatcattcccgggttctcctatcagctatagaaggtaaggaaatgcagacatcactgatacctttattttcatggatttgagtatgtgcatgagaatattgttttagtgaggttattaaccatctctgaaagtaattaagatggctgtgcatggtggctcacgcctgtaatcccagcactttgggaggctgaggcgggtggatcgcctgaggtcaggagttcgagaccagcctggccaacatgctgaaaacccatctctactgagaatacaaaaactagccgggcatggtggtgggcgcctgtaatcccagctactcaggacgctgaggcaggagaatcacttgaacccaggaggcgggagttgcagtgagccgagatcgtgtcactgtactccagccccagcctgggcaacagagtgagactccatctcaaagaaaaaaagaaagtaattaagattcaaacatagctttttcctactttttctttctcacacaaataaattatacataggccacaatatccctgacaccatatgacagaagtgcatctctcattaccttcttgcctttaccctaaagatttgataatgtagttgatgttttatatgggaagcgaattgaggttgcccattttagtgatgggttttggttgttatgaatgaacaggtgattgtcagaagaggcccataaactaaatggttattttaaaaggggagaggggattgtttgcttgtaaataaatctggatatccactggggactgtctaaaatttcaaagttgataatgtggtggttaatataaattaagtatgttggaaatgtctaatttatctaatttgtggactgcttggtaatctgcctcttagaattgcagtaaggagtgtgttccagagggcatgattgttcctaaaagatgagggttgctcctcaactctatccagcttcattaaggattcatgacggatcatttttccaatgataaatcccttttgtgtggcatattaaaacaactagaagttcatcttcaacacacagtatttcattagttactctggctacaggagcacattggattggaaagtccttagaaaatagtttaggaggccacttaaatctgtgcctctaacagtcaacctgggtcacccttggcacatgccatgttcaccctcattagtgcccagaagagttttatggcctcttcatacttgaaggttcactgtttacattcttgaagatattttagaaaacaaataaattatagtagcttcagacccagttattttaaggactttatagttgaaagatgttcatctgtagttgttcgagtacctgtccctgttttctgcttccaaaatctctgctgaccaccgctttattttataactctgaccacatctcctacctgcttcctcaacgtccaaaatttatttgaaagtgaaactgtttaaaagctttctcagtaggcaccataggccattaatacatttgtttccagtttttttgggaagaaaaactatctttcagcatttgaacaatcctatacctgtggccctccttacctcaacatggcattgttttgcatagatatattttgtaaaattctcataataaatttactttggatggtggaaaatactataatcccttttctaggcacccacagatactaagtgttcaagagttagcctttttccacactgaaaacaattatttaaatttattaaaattttaccaatactagatcaggcataataatgtcaaatgggtaatcgcttcttttcaaattctgtttaaaaactgtaattaacatatgtggatgattaccttacatttatctctatgttttccattttaaagtgtgaaaaaatacaggtttttttgtggggggtctcaagtctcttaaatcatctccataataaatgaaaaactaaactgagtcacaaatagcagagagaaatcttttttccattagcaaaagcaaggtaaattattgaaataaaataaatgaatgtaagttgagaatctatttggcatggtctcgcctggggaacttgtcagtctgcctctgctctattgtagcattgtttccactaagaattaggtcattcaataactaccacttcgctgtacttttgctcactttgtcattatttttcttaacctgttattttccacatctttaaagtatgttgagggataaaaactatacctccttgtatctttattctgatggttgaaaactatgcacatttcgttcctatgctggttttatattataaaagcaaaagcacttgaatcacacgaaaacctgtctttttatagtgctgtgttcacaaatacaccctaaatctagagctgacctaacatgttaagtgttatgcaaaaggttagaagcatttaattgaagttcatgagctatagagagctttcatctaaattacaaccgtgaacagcattttatcttaaactaagcgctaaccagcaggtattcttgagggcagtcaatcatcctgtatcttaaacacagaagagaaaatactggcaactggaaccacagaaccactaactgaggcttctcctctaaagacagctttgataatacagggccagcttttagtatactgaaatattaagtgacttcatgcacaatttataaaacttaatgtgcttgttttgtgttccaaccaatgttactaacttaagtgactttggttgagagttttaatttgggtgtttttgttctattctctcagtggtgctagttactccttacattattttgcaaagtgatctgacagacattagaacaacaaaaactggaagtggccgcagtgattgatgttgtctttatatttgtttagtagagcaagtgtatatcctacttccactgagagaataacagggaaaaattaaaagaatcaggaattgtgtgtgggcagtaatgtgcttattgaactttttgaaaatagtgacacttggtgacatctttccaaatcacagtcattttatttaggctaggaaaaatgcagaataaattcaaaagagtcctaattacaaaatggtttcaattgtttaattatagggtaagcagtatggaaacagaattgaatttttgacaaatccaattaccattggcatcccctctatgtttaagcagttcttaagagaaaatagtaattcctgaagaagagggcaataggatttattgtaatgagttaagataaatattttctacaaaaaactcgctagtatgatggtacgtgcctgtagtcccagctactcaggaggctgaggtgggagggttgcttgagcctgggaggtggagtttgcagtgagctgagattgtcccactgcactccagcttgggcaacagaaccagaccccatctggaaaaaaaaaaaaagaaaaggtaaatattttcaaataaagaccaaatggaagctaatacttggatattggaagctaatacttggatgtgcataaacagaatatataatattatgcctaaacttgtagaatccaaagttgttcagaaagtatgtttttatgaggaaaagaaaatggacaaaccaaaagatgaagaacaaggaaatctgaggttgggtcactaactagctaggtgaccttgacttctctgaatatcagttttcttagtggtaatctctttcatttctgacttctaagagttatctctatgtagtttccttatccgttgttttattggctgtacacaacagtctagtgaagcggcagtgtgagtattttactagatatataggtattcacatttatagatgagaaaactgaagctcagacaggattggcccagagtcacacagtcacacagaatataaataatataacttgctagaatccagctcttctgattcctggtctgggtcttccactttcccacatcactcataacactttcctaccggtgcaggatgtgacagtgtctgaagtcacttagcatgggtggaaaagctcagtcttatctttttgcctaaaaatctattttatcttttggcattagccttatggataacataaatattaggttttagaacttcatttcctatttcctatctcatttcctattttatggcatgactaacctgaggcaaggacacaatatgggaatcatcaaatgcatcattcaggtggaccagagtcataagattgcagaacaaatgtcaagtacatgtaaacctaatgataatacaggtgatctgcttaccttaaatattgttgtatgtatctttaatttcttgttgaccaaggggtatcaattagtggcaggttatttattataatgccttctaattagcaaaaattaattattgcagttgtggataaaaaagaggttgttgttctaaagtataattaatcttcactgctgccagtactgtttccattagtaggattataattaacattttgttttaaaagccctattgacatggatttttagaaaagtgttagccaagtctaaatataaagcaaaattaaaattctgcttttcaattcaacaacaaagacaagacattataatagatatgattatctggttatctattacatgccgagcaccatgttatggaggcccaaccccaaaagctagttgtcatgatctgaatttacagatgaggaaatggaagcatttaaaaagtcagcaaacttaagtatgatcaatagctaataagtgacaaattcaaaatactaatatatgtcagtctcaaggcagctgttcttcccattagtctacgcaggcccagagcggcttttgaaatcataatagccctgcctgtgtacatcaaacctaattcaaaactgatgcctttttggctgggaagattgtgtaagaattttcaaatacacattttgaaacacttaggatagaaatcttagaactagagatcttcagttgtgttcttagactccaagtcaaaatgaatttttccaaagaataaatgacacagaaatgattttcaggtgtgtttttttgtttgtttaatctcacgttttaaggtatattgggaaatatactgaataaagagacagaaaactgaaaactaaatttcagtttaaacaacaatgtgaccttgagcatttcacttaatgcagttaacattcactctttggggaagctggatccttttgataatttcacgaacatttaaaccccacttgaaaacatagagcacttacatactttatttgtacactaatttcagaaagttcatgcatatacaatctctttgcaagcccattctccagtttaggaagaacctatgacttagagtctttcgttgttttcttataaaacaaggatgtgtaagaccatctctaccatctccagaattctgaacattgattctaaatcctgagatcaaaagataagtaggcaaataaatattaaatcttagacagtatgagatgattagcttcttcaaggaaaaaaaaaaaaaaaaagcttagtgggcttattctaaataggattattggctactatgtgactctcaccaaaacagatttaaatggttttatccatgagagggttagaagtgatgaagaataaacctagtatgtaatatgcattctttaacactagtgcttattaatctgattttttttaaaaagcttagtaaaatagggatccatgtcttagtccatttgtgctgctataacaaaataccacagactgggtaatttataaaccatacaaatttattcctcgtagttctagagtctgggaagtctaagatcaaggtgccagcagccttgctttctggtgagggcccagtctgtccacttccaagatggtgctctgttttgctgcatcccctgagggaaagaatgctgtgtccttacatggccaaaacgatagaaaaagggcaaacttaatctttcaagcttttttataaggatcctaatcccacccatgagggctctgccctgatgacttaagcatttcctaagacctcacctctcagtactatcacagtggtgattaggtttaacatatgaatttacgggaacacattctgatcagagcagtgtgttatttttttcttacagaaagggtcatatatttaaagttccaaaacataaatatatttattcacttcatctctttaataagtaaaagtaagtaccttcttaggagggcctatatgctgctcaggaacctctttcctgataacgcatccgaagctctgcttgcttctgcagagcttgctcggacaagttgctgagccttgctttcctcatctgtataatgggattattaatagtacctacttcctacaattactaggaggattaaataaactaacatatgtaaagcacctagaagagtgcctggcaccaagaaaatacataataaatattgggaattgttaagattatctttagtgttatgcattttattactactacagataggcccttttaagtgcagacaaaatttctttgatatgtgatctatggaaaaactaatatccaaatgagaaagctgcatatatttgaagtactctgtaatgcaaaagaaaacactggtgcttgataaatggaaaccagacccataagagcattacagatttcaacaggggcaagaatctattcttttaaatggaaattcaaatatatatcatctgctgtttgatttgcaaaacaggagcaattcaaaaaaatccaagcataaataatatagatgatgttacaataacttgattatttgtgagatgggcaatttagcacctttaagatgagaaagctgctcacatggaatcaccacctctaagataaatccagttaaaaataaataaataaagacaagaaactactgctattccttctgtaatgttatccaccatttgccaccacactagtgctctaggtttcagttgtgtcttagcctctcttctgcagagtgttctgtgggtaagtctatagcaattcatttgaaacagctgtgagcacatgctaacgtattctccaatttcacattgtacccatgctgtaaaatatctttttcttttctttttttgggcaaggggcatatctggtaactggatgtattttcaataagtaaaacaaaaccaaaaaaacctaggaaaatatgttaatacagtctatccaacattttctaatggaatgttagttatagtgaatataaatgttccatgtgaagttctaacatcaaaacaattacaattatttcacccaataaagaagtcctttgatagttgctgtgtgctccttcccatattacctcaataaatatgatccctttttctccctccggatttctctccctctctttcccagtcactagtgaatagtttgttggcacctcatgtttgttttaccttgctcttgaaattctatttaaggtactaaaggaaatttgttagaatgtatatcccatcccttaaaaaactcatttaaaaacaataaatcctgtccaattatttgttgagttcatttttctcacactcttcagagcataaatcattgatttaggctgataacatggtttctgcagcattttcagtttttctattttcaagttaatcgtttgcaactgtgatgaagtttaatcattttatttcgtggtactttttaaaaaaatacataaaagcacttcctttttttgagtagcagtgaatagacaaatttttatagcttaatttcttttaaatagaaaggtagatagcacttagcctgggaaacctggagcagtttcacaggttgcttgcagtctttctaagagctgtctaattagagctgtgtaaatggcatctttctcttacatgtagccaagcaagtgctgttatatctgttattccctagctcctaccttagactatacctgctgatgtttcttacccggaaaagagaaaaagcatttttaagggctggctggctgtgttgttttttgctttactcttgttctcagaaagctaatcgaagagtaaaatcagaaagctctgggagtgagtttatttttatctctattgtcttcagttcattggagcttttttgttttttttaattgtacatctatgcagcttactctaatgaatctacacttcattactctgaggccgtagataaacctacatcatctatggttctgtttttagaatatagatacaggtagcagattgctgggaaattgtaaaagaattatttttatcctgtctgatagtttttcttaaagtagaagctagaaaggggccttccagatttggaattactttttatcaggagggcattaagaataagcagactttttccatttttacgtcaatcataatagtaactaaaatccatatgacattttggaaatttcagatgtattgattcatttaattctcacagaggtgttggttccaggactttttgattatgatattcatattagtgatgaggagactgagcatctgagtgtttcctacacatagagcttctgtagtcatgtctcatgcttgattgttgactacttcattgcttgatgaacctctataataattgcctccttattagtataaagctaattggaccacaactccatgatgtggctgaaagttaagcttcagtggcctaaggtctactgtattttaaggcaagttgctgtctaaccaaaaagcacgcccctctatcacaggtgctggtaattccccaactcatgttgctgatcttgcaatgtattcaaagatagttcaatcagccgtctactttcctgtgtccattctcaaaactcagcctcctcagcagtgtgggggtatggaaaatcaagtagaggaagacatacattaatgaggagttgcaggttgggttcaaatactctgaatatcatctgtttctccattagctcactgtggggttgagctacgatgcccacagaacaggcatgcttttaaaaaaaaaaattctatgtgttttgtagaaacttggaaagactgcagctataccaggggataccctggcaaacaatagactgtgtctttgcaataaatgtttgctttatttggtatgttgcagaaagaatccttcatgtcaccaggtctgatgcagccacgtgtggctgtcattgaacaggtgaagggtcgggggaaaggcctgtgtcctttagaatttaatcaatttgcttgtaaatgtttattagattttgctttcctatttcctgttttctagtttttctggagactgcaaagtaaacatttttgccacattgttgtaaaattgcaatctaggtcttaacctatattaacagcaatatagtgttatgctttttcgtttgtgcgttggagtagaggaggggacattaacaaatgaaaggtagcttttgtgctctgtcgggtcttgagtacttctgtcttacaacaaagaacaaacttgtttgccaaaaagcaatttctttttgacacagtccttacttcattagggatttatagaacttaaagaaaataaaagtacctgggatttgaagccaaattgtgagttggagcagggtaagacgctcagctgaacatccatctccatctctgtagtgcagccgcatccactggagccacggtgggattctgccttccctccaagactgcctcttagttattatcacccgctaaagtccaaggagagcttctttccatggacagaccacctagtaccactacttcctcttgctttttgtttattttttgccccatcaggttccaatcaagatgtgaagtagcagcctcagtgaaaaatctcatctcagcacatcaaaggtagaagcaataggaatcagcttgaaagagcatcagagtgcgttcctacctaatctgagagacacaaagcctctatttatcttaaaataacttcacagagatgtctgagtccaagaaggttaagaatagcacagacagacaccttattttagaactcaaaagaactggagggcatcagtttgtccaacacatcttgtttagcaaataaacaattacagttctgggcaagttgagtaactggccaaagatcacagagtaaactaccagcagccctagacaggagtccaggtttcctggtcagtttctctaaattcttagcaagtgcttgctattgtcccaagactttaaaatgcacacgtgactttacctacagtgtaatgtgatgcaaaattatgatccttccccttaggattacttgatttcacaaaataattcatgtattattttgcatcctgctttttcacttaatatcaggacttaaggctttattataaacccctcatcattgtaaacaccccttcaacaagagacatcttttcaaatcgaattatcttctggccccaaaaatcaaatccatagcaagttgggtgtttgtttgcttttttttttcttcttggtggttttaaaaaatccacatgaccccattattcaaagtctgtatccaggctcatttttccactgaaaactgtaactagcaatcaacagcaaataaaatgagagcctaaaacgtgcctaattctgttcaaatagctgtttgctatggcttgttgtgcatgaaaaacaacagaagcacagctctaccaatcattcacctcatcacaatctctgtcggctttacaggcttgcattaacagccaggtttagttagcccagaacacaaagacccagtataaagcatgtaagtaatatttttaaatgccacaagaaagaacagttcattaactgaggaaatacactttaacccaggaatggagcatattggtataatatgaagttagagggtctagccttaggtttctcatgtgtaagattagaaggctaaacaattatttatggggttacaactattgacatcactgttattaattagagaatgcacatgaaacaatgcatgagaaatcatgaaaacccactcagttttataaatgcagtagagccatggactcctaggaaagaaccagtcttagaggtaagctgttcttgaacaaagacactaagaccaactgactccaagagagttcctgcagcagggccaatgtgttctaaaattttgcttatgaggagcagaaggcaaacatctttgtcatgttcctcctgttttaatagctccttcgccaaccaaaaaacaaacaaacaggaaacccaaaaaacaaatcaagcactgttattctagtattggaggaaggtctccttgactccaagaatgaaaagcaatcacctaatttatagtaattctatactctttcagtactacatttcaagttacatttccatccttcataaccccaaaggaattaagttaattctcacacacttctcttggattagaagtgcactctgattaatgttgcattagcagaagcaaatcattttttggaaaaggcagggaattgaaaattaaataaatatgcactacttagagaaagtcaccccccaaaaagtggaagaatgttagatccagcctcccagcagaaacatcctaatcaagaactactgaagaagcatttcatggcaccaaaacatttggaaagcagcatattgtttattttcacagtgttggttgaaaagtctttctaaatatgtcacattaaaaaccagagtctcatctacttgaaatggactgctgattaactttagcttccaatctggggttaatatttttaggacacaccaccatcctttctaaaattttttctccttcatctttctgcacagtgtgttatattgggttttatgaatacaggactcattagatcttagagcttctggagaacatagccatctctcttatctccacatttgcagaggatctgtgagagagaacttacctgaaatgtcttttcaccagagcgcgtaaagagatttgccagaaggaggctttcattccatgtactaccttcttacaaataggtatcaaactataagaggaatcttagcattattttcaggacataaagcattggcttaataatttgctctaccaggtattccattttgttttcaattacgtatttttcagaatattaattatttatcttttattgagacagagtcttgctctgtcgcccaggaatgaagtgtggtggtgcaattatggctcactgcagccttgacttcctggactcaaatgatcctcctacctcaggctcccaggtagctgggactacaggcgtgcatgaccatatccagccaagtttttagtgttttgtagagacagggtctctttgccatgttgcccagacttgtcatgtgctattctcaataaatcttcctgcctcagcctccccaaagtgtcggaattacaggcatgagccaccatgccagcctaattttttatttttatttttttgtagagacagggtctcaccatgttgctcagactggctcagactcctgggctcaagtgatcctcctgcctcagcctctcaaaatgttgggattataggcatgaattactacactttgcccaattcctaaattcttaaagcatttagtgatagtattgattcctggtgcctagtagtcttcaggcaacatttttgtattcttatcctgggaagtgcaatcattattcagtagcagcctaccccctccttgttaaacaaaaagaatttattattcaaacttgggcagtatgcaaaaaaccccaattcattacataataactgattaacatttttacccaaagagggttggatgggtctgattccctgtctttaggaatgattctcctgtgcatctcctccatcctcagatgcattgttcagacacatttgctttccttgataaggggggaggtggcacagggcccaggtgatgaatcttctgagtcatttagcccagatttctccattctgagttttcttagaaaaaagttttctgtatattggcagctgagtgaggcccttagccagaatcctttttatcaattctttaatgttgctaactgctaaattaaagttttgaaagtaggtttttcctgttagatggattcattcttgactcagaaccaaatcctatggatatgtaagatgtgtgcacgtcccagtgtttgtaacctgagaattttatttaaaccgtcatttgaatctacagtaatctggtgttggggaggaataggatctttatcaacaaagagctgccaaaaccccaactgcttcttgagtagctgtaatagatgaataatgttacagccaaccatgcatttcaagttttgctcaaaaggcttttcaactaatgctggtggtattccatatccgtgtgttcatctcagagtgcagtagtttccatctgattttcattacctttcttgagaggatcaactttacaaccggaatcagaaaagcagtcaaagtcattgcaagtggcaatcagtgaaatataacaatttgagcttgggaacatatgtttcattataaagaaaaaaaaaatggttaccccgtaattccaagattcatatttcccagggtagaagggatcatgcacaagttctagtgtaccttcccatatcatgctgacattcctataaagtgcttgttctcccctacagatagccaactcatgaccttccaaggaaacttaactccctttttgattctgaccatttgaaaatgctttattgtatttgagatgaaattcatgtttctgtagttaaatctttcagaatttaaaacttggaactcaacagagtaaatctaaacctctcttcttctcacaggcagctcttatcccaattcctaccatttcctttgctaggctataatatgcattctttctcttatggagtagctttcattcccttaatcactgtggctcctcttcttggaagaagctcaaatttgcctctgtctctcttaaaggcatgtgctgatggaaaactaggctttaaatcacaatatctacattaaattacatctctgctactgattacatgttggaactggggaaaattatttactcttttgtcattagggtagcaaaggtgaataaaagagacatggtcaaaataggcaataaagcaacttaacagacaagtaaatatataattacaaccttaatcagtagtataaagggctgtcaagggagttctgatgtctcagggtactccagggcaggccttctgggatggcggctgggtgttttatgatgggaaggagacagagtatattctaggatgtggattgagctaaggagggaaataaatgttttctaataattgaagcagaccagtgtctagagttttaaaggcaaggaggtgagtggaatgagatgagtttgggaagttgcagagctttgtaagcgatgttcagagtttggattttatttgaagtataaggggaagccattgttgggtttgaagaagttacagtgtctgaaataaatttcttaaaactgctctcatgttagatggagaacaaactggagaggacaaaagtagaagatggacatccaattagggggcagctgtcctaatccaggaggttcatgtgctgcttacaacaaatcacgagttttaaatgagaagcaatactttacagaggtcaagacacatacgagtagcctaggattaaacctgattccaccaacttgagcaacttgctcaagtttctttaacttctttgcacctcagttttctcctgacaggactcataacaggacttactgcagagttgttgtaaatattaaatgagtttatatatgagtttcctgttaactaaatctacaaagaatttttcattattatggtgtgttccactctattttgtattttcagactcaggcattcttttatctagtttttgcctgggaagcacatgggtgaggaatgttaccagattgtttattgttctttggaaactattttttttgccagtgcaacagagaaaaccaacaaccagtgaaggaaaaggcattctatggaccatctattgtattttttctttgtcgtattataaagacctgacacttttttgcatacttttttttaacatgacggttctaataggacctgtttttaatcttgcttgaaacccgaccttcaatatattgtgacttctctagtgtgaggtggaacagtaagatagcactgccattaggtcatgtcccaggctgtttcctcttgtgatgtgctcacctggttgaataacactccttgttttccagggatcccaggaagtgactatgtgaatgccaactacatagatgggtataggaagcaaaatgcctatattgcaacacagggatctctccccgaaacatttggggacttttggagaatgatatgggaacaacggagtgccacagttgtcatgatgacaaaactagaagaaagatcaagggtaagaataagtatccacctctttccttttaaaaattttccctcagagtccctatgttgcatattttattctgttcagaatctaacctttccctaaggcttatctttctaacagatactaattatgaatgggcatcaacaactctaattaaaccattctttaaaactcctctgggtgttttcacaaaagaaattctcccatgttatgatgtgtgtggttgctaaaaagtaaaaaaaaaaaaaaaaaaaaggaatattcacaggaatagacaacttgattagagaaaataaatatttgcttgaacctctttcaaaaacaccattgaacaagaacctacgggctttggggagaatcccaccaatatgtacttccactattttcaactttttctttcttaaaatctgcagcataagacttaagttctgtgaaagaggcttttgcttaaattattcacattagtataaattaagtcagggcagctggaaaaatgatgtggctgaatacacggctgagaaaacataaatgcatagagggcgttttgctagtttaaacttctccaaaatgagtagattttaataatggagtcatagcttggtaaggtccaagaaaagagttttattcatcgtatgggtccaatattatggtgcatggcacattagttaaatgctgttggtttgaaggactaaaaaataatgggtaagcagtataccatattcctgagtacatgtgtacattttgtagcatctgaagaaaatcaacctttaaccttgagaaattaatgatgggatctctgaaacttcattgaagacagcagatactttcattgaagaatagggacattcaagacagaatttgaaaccacaagtgagaggcctcttttactgtggttatagtagtctcaaaaaggatatttagaaggaagaaagcctgattccccatttactgtgtgaaagttgaggttctgtaaatgttcttctaagctcaacacatggaagtttctctaagcctgggcgtgtatatgagggacaatttaaaagctgcccaagagatttataagggaaaagctcagacagaaacatattaaaaagccacaactgtaacctcaaaggtgggaaatcaaaagcagtgataaatggttggtttagcaaaactaaaaagcaattagatcttttcaaaacatctgaattgtatagagatgttgaaatattgtctaaaatgggaattaagataaaaatgacactgaagacaaatatctgccatactttacatgcaaacccaattcaaaagatgtaaatggatttgttactgatttgtacttaaggtaactcctatatatcaagcagtttctttaaaaacaactcccctcccaagtgatcttggatataatagttcataactataataatgtctaacatattaggtgcattgatatttcataacagccctttacaagaaacactactgtgacctccagtttacatatgagtatactggggcccagaacattacagaagctttgcccaaggtcattcagctaccaaggtcagggataggaattgaagacagacagtctggctccagaacacacgtgcttcaccatcaagccatactgcctgttgacacttctgtgaaactgagacagctgaactattatattacggcatgcatgtaaatccaacctacccagtctgttctgcctggagataactgctggtaacaagcagtcatttgcaaaagctgttttcagtaaaacacacattttatcttgacactgcaggccttcattaaactgtgcacagaaacttgttttgaaataaccaaatgaaattctgccccttttctccctaattgcttctaataataaagttagttctaactggccccactgccactgcaacatctgatggtaatgagcagttcttggcggaaggcattgtgacttaaatacctacagtttatctttctgttgcaggctaccttctcccccaactcccctcagccagaggaacttatttggaagttactaaatgaacctctgtttgctcccttcattaattactctttgctcttgcaagttagctttctcctttgttaaatggcctaaggaagccaattaaaatgctgtcttgtgatttttattctgtggtggttcagcctgtacccagatttgtgatgacctgcataagccaataggcatttggggagtctcagccaccaccaatctgacaatacacatgagccctggaccccaaggcccaaaagtcctttgttctccagtccagaacacttgggactaaatgaccacatgtcctggagagatttaacaaagcactggagcctcatattatttcatctgctcttccgtcttcctccctcccatcattcccatctcaccctttccctatccagttgctcttttacctaaagtagcgggaagaaaggagaaggcattcctggattcccaaacaagagctggaattggctttcactataaaaacaatgttataactaggggtgagttgttagtgaaatctatagctccagacttcaggaacgtggtgggttctgtgggctgaccttgggactcagtgaattttcaattcccagcagccaacttcaaagcagacattggaactagcctggccctatgaagggaagtggcaccagtcttcctcataaagggaggtagtccaggtaacgtaaacaaattacctctccaagagctgaagcttgaaatgtcattatttagattaaggctcaggttcttaaaataatattcattcctatggtacatgaagaaaatatgtgtgcgtcttgtaaatgctgctgtgaattagaagtatgctagactgccactgaccatagatttgcagcagggaagaggggagaaaaggaaagagaagagaagatagcttgatattacgcaggactgcatggggataccaccatgagagaggacagctatgggacagttccaagtagggcactttgcagtcagatgtctgagttcaaataccaactctagcctctactagctgtgtgacaatgagcaagtttacttgactcctcaaattctcatttttccttttttggattatgcggaagggttattgtgggtattgactgagataaaggatgtggcaaggtggctcagtgagtctcaaatggtattgtttggtaaagaagttgggggctttacagtgacaacttcagtttccccaaaagatagcctccaaataattcactctgtgttcccaaatgaaaagagtttatttctctatggttgacgatgaatcctgaccaacctctccatgtccctgaacatggttaattatgcccacgtttcccagtgtggcacacccatgcattttattcaagaggagagaggagctcagaccatgggattctttcctacttgctctcccccaggacaggatctccagaatagagatcagccggggaacagaccaaaatagaacattccggctgctacattgactataatacaacatgaaaatcataagtgatatagacatgggttacatgtagtgataagtgccactgaagatacgtttccttattgttcagttttacatcccctctccccttttttggttattttatggtgctacgaaattgtcctgccttagagcccatctctcttttcaagcgttctgttttgccacagcctggttcactcgtttttgtttttcttttagagacagagtcttactctgttgtccaggctgcagtgcagtggtgtggtcatagttcactgtaatctaacatttctgggctcaagcaatcctgcctgaacagcagggactacaggtgcacagcacccacccccagctaatttttagattttgtagagacagagtctcacttttttgcccaggctggtctcaaactcctggcctgaagcagtccttccaccttggccccccaaagtgtttggactgcaggcttgagccagcccgtgcctggctggctcactcttaagctgtcgctcaggtctgaggtttatcaacagcgcttgtattaatacctttggtgagttagaacagctcactgagacaaaaggcttctggattccttagcaggtattagaagtttcactagcatctgttttgagaactgatcattcttagtgtttgcatggctaaagaaacccttataagtgtgaactatgacttaggacttaagttgattatttgaaaacatgagttctttgattttcaaatgctattacttcccttcaaatgtggcctttaaagaattccaatcttaactgagaagactctttgcctggtgtatacattcagctatcaaccctgaaggaaaagtataagttgaatatttcatatgagtttcattagggtatataaagaaatacaaagacaacgggccaggtgcggtggctcacgcctgtaatctcagcgttttgagaggccaaggcgggcagatcacctgaggtcaggagttcgagaccagcgtgaccaacaaggaaaaaccccatctctactaaaaatacaaaattggccaggtataatggcacacgcctgtaatcccagctactcaggaggcggaggcaggagaatcgcttgacccgggagacagaggttgtggtgggccaagattgcaccattgtactccagcctgggcaacaagagtgaaactccatctcaaaacaaaaacaaaaaaacaatgatagaagctggagattttgaagggaaagcatgagttctgctgaaacacacagatcagtttaaagctgttgtagaatgtactgtgtaatatgaaatactgttagtggttttttttccctagtttccatctttattgccaaatcctctcaagttttgcgtagttcattgattctgtagcaagtcattctagttccctagaatgtggtttctaattgtttccatgtttcataacatgccaataagcacacgaattggtctgggcaaccacatggaaggaggaaactgtttggaaaaaatgaagcattttgtagggaaagtaaaatgtatacagctgggatttccactccaaggatattatttttgatgactggggcacatgattggcagccttgcttgcagaattggcatctccgaggtaggattcatctgcttttttaagtaagtgtatattaaattattatttagtgtgtgagtgttcacctttttcccttcatctatcttctcttgactgtttctctcctactctgtctcccatcttgaaatacagaacacagagagaatgcatcaacctcatgcttagaaaattcttgagtaaccctgattagtattagcagttgaaaggcttagtcagggttagaatatatctgacttttacttcacctcaccagcttgccttcattccttgcccatagtagagactcaatgtttatcttgtcttgcaagctttatagtgggggttgattcacttaaagagctgtttgtaaatgtacttagcgttataaatgttggagatggggagtgaaattttgacacttaacaaatcagtcatgatttttattgtaatccaatgtgggctgtgccaattagtagtgaaaatatagggctagaaatgaagaatcctaattcttggtttccaagctatcttaagtcccattttctgtttccaaatagggaatcatacaaaccagatgatgccatatattagtaaagcagatcaaatgttttgtgcatcgtgacttgagttctatcttaggccaaagaatgggaaaattcctgccctactaaattttgtggtttgtgctaatgaatgcaggttagatgctgtcagggccaaagagactgggctggtgttaacttcactttgttaacagtttagggaacttgacatttggctggtggaacacttctgacctaatgaccactcactcctcctcctatgtcttccccagtccttgaatgtcaccttagtaaacttaccctagcacaaagtgaaggtgaggtggagacattcacattttgttctatggctaaaagggcaattctgagcatgaagcagtagaaaaagagattgtgctcaaacattttcttcttttcctataaaacaaagcttgagattcttttcagattgtgagatccttttgggttaaaatttgacagaatcccattgaagattataaatggcagtgctattgttttcattgctgttatcagttttggaaagtccagccttggccagtggcagactaattcttggcccttctggtttgtcaaggttcggtaagtttaatggagagcaaatgctttccaaatgccaggtttgtgtccttttccaaatggaactggaagcgccaaaggccgtgaacatttaatttctcaaactgcagcctaaagtgctgcctatctagggcaacagaaactgcttttttccttaagcaactttaggaccagcagcacaaacattgcctttggagtctgcatgatgtatgggattgtttttgaaagtggtggatacttaatgtaaataggacgctggcaacaaaaagaatgatgctcatgttggcaatctaaaggatgttggggtccttatctagaaagttctacacttttggttttctcttgtcagcagacacagcgtcagataaaagagaaagaatcccaccaatttcttgctgtttgttagctttctggattatctaccttctttccccaccccacctgctctacttagaaaggcagctgacagattctggctcaaagcattcctcttaaagccagttagagtcctgatgacctgagtaaagagctggaatgggaggaggagatgcaactttgctcctgatgactttgtacaaagcctctctcattctctgcattcatgtctgtggttctcctgtgctggattaggtctcatttctaaagttttcagaagtatgtgttaatctctgtttactagtgtttagggtccaatgtttggtttttctctgttctttatcagcagaatgtctggaaaggctgatgttcaactggtaaatacccaacatagttgtactggttgttaaaatattgaactgcattgatgctggctggtacctataaattatatttttattgaaacattgagtcatctaatgatactgtttggaagaggtgacactggagtcaaaggcaactgctgggcagaccaaggcagaagcagaggtggctgtagggctatgtggggcacccaggtgatcctcaggagtgattaggtctgaggtggatactctgaggacccacctcatgtgggaagagctgatatcaaagtgctacttggccacgagaaagaggcacctcacacagttctgctctggttaggacaaagtgccagaaacttgagacttaatgactttcagtttaatgggggaagtcattggaaaagtttacggcagctccctatgtcaacttctggcagacacatcaaacaaaagggaataacttttttaaagttaataagcagtttagaaagtgtgcgaatggttcaatgaactggtaggcaattttatgacatgtaatttggtttattttgagaataatatttttcaactttatggctgtatatatgaaaagctgcactggtggtcaaatgctttaatatcactctcatttcaaatattgtagtgcctctttgtcctccactaaatagtgattagtaaagatataataaaatgggggaatacacaaaccagactgactgccagttgggaatagatatagccaaatattgattgagtgcagagaactacactgttgttaaaagagaatcactgagatgctctctgtccttatcgtggaaaatcaagtattcaatctggtcttaaaaatttccagaatagttactataacctgtagaaataaatagttcagcatttattttttctgcccactaaaattaatgaaatttatctaaaactttcctttattatagtctccctcattaaatgggtattgacaaaagggtaccaacatttccttactcccaaaaataactgtgacttgtgttatctaatgttagcctgtttgtccattccttacaggatactaatgcttgaacaaccactctgcccaaacttactaggtacgaatttagagtcacttttagcaatagttatggtatcccacgtatcatttattgcctcttctaagtccttctttggctaaataatctcgtggcaaatacgttttggattagcaatgctagaaccctttcaaggtatcagtttgttacagttggaattctgatgccttgccatgttgccatgctcagtaagtctttattaaattgagatgaggaggttttgttttcagaaagtggtagacaatttaaaaataagccaatctagttaattgattataaagttggctaccgctcattaagtgcctacaatatgctgagcactcccaaggtaagccatatgggagtaaaaatagcctagaacgagagcccttctcccaaagcatgttcagcagacctaatggatcagctcctaccagatatttgcaatgacaagagttttaaaaataaatttaaatatgttttattattccatcaacttgattttgatagtttgtcatgaaaaaggtaaaataaattaattccattgcataaatttagcaatggtcaccctgttctttccgtaattatagaaaaatgaaagctccacttaagggtaataactttgtgataatgaaaagaaatgcctcccgcaaatttagccaaaaatctgaactgtctcagtttaagcttcaagtaaagttactgggtgatgtttctaaaccacagcctgagtgacaagttctgctgttcttcttttccacctctgagttgaacacatactcttttcagaagacattggggcccacatagatgaagagaattgtttggaatctcagaaccacctatttgaagaacaaggaggtttagaaacaccccacttagtcagtaaggctaatggattgagggcagggactgggtcttatgtcaccttgatgccccacaactgctaacaccttgctttgcacctagaaaatcctaaatcagtatctgctgaaattaataacatgttcttttttttcacatttagactgatttaggtaatttataacaacaaccccccacacacaaaaatccagaatgtcatcaaactgataaccaatgatagctagtgtttgttgaatgcctgtttgtgccagccatttgggttaagtgttttaggggcatcacttcaatccccacaatagctctgtaatgctggagacactgttcccatttcacagatgaggcggccagactttggtcctggaaacagagaaacaattttccaggcatccagggagactctgcctgaccttccatgaatcagtcctagaggccgcttgtatccattctaaatcaaatagaaaaaggcaaaaaaccgtattcgtattcagtagctcctgccttctagttcttatgtactcaaagggagctgccttcatttctcatctcacaatcagctttatgtgtgaagcctaacaaatagtaactctctctagaaataccttatgatattttctcttaagaagaccgagtaggggaaggaaagttgtcaaaggaaaacattttaagagaggaaaatggagatagttcatttatactggctaatgaggaaagaaaaaatatctctattgttctcctttttctttctcactacatttcatacttgctccctaatgctgaaatcagaaatcatatgtttagcatatggcaaaaaaggagacttaaaataatatttgtcagtaactctaagcccttaaattcagccctccaaaatcagatgaaggtgtgcaggctactcagagaatgagatcgagaaaggaagtactgaggtgcttaccagcaaagggaaaaatgtattgctgtcactattcagataagctcaggaaaagcttctaatcccactgctgaggccatgtgtgtgcatttccacatacgttaggatatttatttttcataaggtccttttgagaaatatttcctgagagaaaatggtaatatttagacatatccgctttaaaaaattgcctctgatttttgcagttgagtttgaaatgtttatttttcttttggtaaatactaaaaatgcattgttcaaaagcaacttttttcttcttttagctagaaattttcacagcgtttactccttacagtaatgcttcctggtattttttttctaaaggggtcagagtctaagccaataatagttgcagtttgaaacttattactagaaatgtaaggattagtataattttagttcttcctgcatcttaggaatggagaagatttgtagatggagagtcatttttccaaaagttgtatgaaggttgccttctcattctttccttcatctccttttcttacctcactagaaggtctaaatgtaatcgagtcccagttttaaaatataattatattgaatttggttcagtgcattgaactggctgtatagatcattttgttgcattaatgtgctgtttttgtgcatatcatagtgatatttgtccttagggatttcattagtttattttaaaccgaaagggttgctctccagctgagactgttaaatgatgaatttgagtttctctcttgaatcttcaactcaacccattgttggcatcttcttgaatattacaatatgaggcctccagagttcctcttgtcctctgctgggagacatccacctgacatctatttcatggtttaaaacaaagcctttggcataatttttgttaattttttttttctcatctatatcatgactgctgaagtagtgttggttctattcagatggtagcttttgctaaatatgtcatctgtgacctgggttttagcttatggtgaaagaacatatagagatgcccatgcctggtcactctacgtcagtattctccttcaagaattatcatttccctatgttgttatctctttgagtcagggcaaatgatagaaataaaaaacacagaaggctattttgtacaactaggaaacacacaaaatattctttacatcttattaaggcaaaatttttgtcttactgtggacaatttttgtttgttttcatcaaaaagatgatgtttgtgtggtctcaaagttgaaatcaaggcataggaatcaaaccttgtgaatttaatatctagcttactgtatagctataaagtgcttttcttttttgtcttgtctgggaaattctgtacaggataaaacttctccctttcttagaagggccaatagtttcatggaaagagcctgaattctcagaggagcaaatgctatctctgtgaaagagaaaattacagtattattcacagaatgttacaaatactcatattaaacataaaagcaaatcattatgtaataattctatttgctggacccaaaaaattctagtgtctctaataataatgctttattgcctttgtttaaatccaaagattgtgattttctgttctttttcaaatagaaaggtgtattccctattgtaaaatactgctaggagctttctttacctagagaaatgtatttcagttgggttctcttaagaattagtcccattaaaaaaaagtctgagatagaaagggtaaatatagtcagatctatggccttactccaaaaatattgtgctgtgtttgttacttttcattatactttttaatgcccaacagactcattcagtgaatttgaggtttactgcagacttggaattattctttgttgtgtgttaaactaattaggctgaaaactttttatgtgcttttgttccacttcacatagaaattgtagattattcatcttggatgaattttaaattatttaaactttgcactgttagtgtgtgaccctctgagactctttttaaggaacagacaactctttttcctgcagacattataggtttaatttgctttggatacaaataacatttatcttgtgttcaaaaaaaaagcacatgcttatgttgtttattatactttgatagattttccaattatttctacttttctttaaacaagcatatttggaagttgtgctttttaaatcttgatgaagtaacactatcttaccatgtagtttaaatgacaaagtgtcatcctcccgatgtgattcataacgtctatcccaggacaaatttgttttctcttcaagctcactgaagtttcaaatccctctctctgtattttacccagcaacaatctgcaacttatttttctccaggaaaattgaatctgttactgtttagtattcctaccagtttgaaaaatgtggtttatattggcatcagagcagtaatttacatatattgggataacaaaaatgcatgccagaaaaagatcaacataaaatgaagtgcagaaaagctgttttccttcaacagcaactcaaagcaaagttaatagagaaattgatgagcatttgccctgaatgtgtcacttgtttcttgtaggtgaagtgtgaccagtattggcctagcagaggcacagaaacccacggactcgttcaagtaacgctgcttgatactgtggagctggccacatattgtgttcgaacatttgcactttacaaggtttgcttttcatctttttctcctccctttcccttctctattgtttaaagaaagcttcttttgagaaatgaaatctcttaaggctttacttaaatcttgatctcaatggcaacagtgaagaatgaaatagatcttccattatcactcagccatttttcttcttgtctggcgatttatcagtaaatataaaactcttgctccaaatgaaagtttcagccaatgaagagtagatgaagaagaactagctcttcctgtaaaatgtgataggagctctcctggtagttaaacctgaaaaatataatgcttctcacctaagaattttgtcttcctgcgcaaatatttgtcatttacaaatagcttggggtttctatttccaaagagtgtgtcttcccaaaggctacagggtggtagaaaggaattaaaatagcacattttagcattacctcttccctgttattcatcattaccacctgaggcttggaaaacagaatttcagctgatattcctatttcacagaatggttcaagtgagaagagagaagtgagacaattccagttcaccgcctggcctgatcatggtgttccagaacaccctacaccttttctagctttcttacgtagagtcaaaacctgtaaccctcccgatgctggtccgatggttgtgcactgcaggtaagaagcgtttgttcacttgcagtcaggaaacagaaagctaaattgactctcattggatgtttctgcaacttcttgacattctggaatagtaaatgtcttcataaataatacagctctcttttggtcaaatgaggcctatgctaacatcaataggatggatttgacatagatgcatatttcccctggagatagtaggtagctatggtccactgctattgtcttttcccagtgaagagaaataaataaacacaaaattaagtgggcacatggctataaatatgtaaaacaaaaaataatatgtgggggaatattcttaaaaacaaatttgtattgtttgacaagttcttgtgggctggactgatacaacctttttactatttataggggaaaaaaattactgaacaaaataataatatatcatacaagctttagggagactatcttattgcttaaagatgccttctgtacattagtaatatcaagtctcatgacaaatcactaatttgatttttaaaaatgtatttaatagaatatatacaagttctataatttggaagaagtcgttttatgtactcaaaggtaataagttgtatttctctcgaaatgtatagtttgtattttttgcttaactctaacagctacatcaccactcagattgcgatatatataaatgtttatagatttttaaatattaagctgatttcttccagttgtttgagtgcctcttaagtatcattattagcagactactcaagctatctggtcagagtctatttattactatataaatgtatagtgcatataatttcatgatagttctttataacctgagaaattcaaatatgagaaaatattgcttcttccacagataagtaaaatagaagtctgggagtataggaaaaacccaagaaagcatctatcgtaaatcacttctatcgtgacttaataccatcactctctttcataccccatattatactataatataaatataatacagtagaccctagaaaaggagctagttttttagaaatggggtcaacgggctgatcagaataaaagcagtgaaattcacctagccaaaccatgctacaatgctcattgttaaacaatgagctggcaagttccaaacaggataaagtttctcttttccagcaaatgttttcctagataaaaactagtaataacattaccttgtatttatggagagtattttactaatttcaaagcactcccctatgctttattttgtttgatgttcataacaacagtatgttgggttaagagaattatgtcgtgtcaagagaagtgagaggctacaaagtttgcttcaagtactgataactaagaaggtgatggcgtaatcggcctcaagtcttatctagattcttgtttccctacatccaagacagggtcctttgaggactggccactccagttgcagttttctgcatgattgtaaaacattaaaaattatttttaatttgagcaagtggttttacatcatgaaagtagacttctggttctcctgccttttggttttaattcaggtgctagtttgatcagtctgtatgctcacagttctttgcaggcctcaaagagccaatgtacctgattatatggtgcctctgcttggtcagatctgaccttgattataaaaatcacacatgaaacacatgaattgttttcagatagagtttggccaaaggatagagaaacagaaaatttggtctagcagaagaaatgttgcccttatatgcctaatggcaaaaatacggtacacacacacacacacacacacacacacacacacacacagacacgtgtgtaattatatgtttaaaataatgggaacaaaaattagagacacataatttgggagttttcactgaaaaacagcatgatgatttttttcacattgcatttcaaaatacagaatctgtgctttctccaaatgttcttcccatttccgtaaattaaagtggaggcactagaaaactgagataggtaggtaggtagatagatagatagatagatagatagatagatagatagatagatagatagacagacagacacatacacatacatacatacatacatacatacatacatacatacatacataatttttaaaatgcatttcaccctctgtagattataagcaaggtatgggtttcatgctaggcaccgtgacagatacaaaaatgtttgcaagcaaatagcaaatatgagagataagattaaatagctgtaatgccttattttgagaaaatacacacacacacacacacacacacacacacacacacacacacacccgcatccatgttatgttaagccacctggactcacctctgagagagacaggctactcaggagaaataaggaaacaaagatgaatgtgctgagctaatagctgctgacatttggaagtgctgtgcctgaggctctggagaagctgcttattgaaacaaacaacagaagagtaggtatattggtggaagaaatttgttagcaacttcgaaacaatgagggaaaggaactgcataaactgagctctgtgaaataattacccataggtaattttacatgtctggtaagaagttttggcctctttatttaggagggtcatgtcaacatcgtcaacatccatgttatcttgaatccttgagttgaatacaagccaagttaaaacttgacagtataatgttttgtgacaaagcagcagattaaagtcattcttaaatgacagttatccgtgtagcatcccagaaatgctagtttagaaaccatttctgagcagaaagaaactatgcaaaaagccacaatagccatgttacaaagggatactgatcacggttaatcatgatcatgttacacataatcacaaaaaatagtctggaaggtgaatactgtattttgtgttgtgatttcttttattatgtactaaactttttttctatattaaagaagtagtgacaaagtagatccaagccttctgcccaatatatcctgtgagaatggaggaggtttcaaagaagtcaggtagtagcccaaaaaaggtcaggctggcggtgcagtacagaaaaaggaaattatggtcctccaatgattctgtgctgtaattggactaagacaaaaatgagccattaagtaaaagaaattctaacaatcaacaacaaaaaagaattttagggatagcctagtgcaacaagcgcagacaaggccttggaaggtcaaggaggacagagtctaccagatttctaaaagaaagaaggtctagttcaaacaggcaagcaaggaaaggccaactctagttatctatcagttcatacagagcatagaatctcaacattgagagtacacactctggagagatagactgcctaagtaaaatgtcagcttgtttacttactggctgtatgcctttggacaaattatttaatctctgtttcttcacctgtaaaatgggataacgctatagcaatgagaattttataaaaattaagtaagatgacataaaatagatacatataaagcacttgagacagtgcatggcatatagaagtatgcagtaattttaaattattaataattattcattactgagtaccttttaaaagctgtgtgtatatttagaactctgagaagaaaaattcaacatgaatttggatatcatctacgtaacctgagccatccattttattaaataacagatgtttataaacatccaaatcattaaatgaatggattttttcaaatgtacatattttctactatggcaatcccatgagacttttctcagtgagagagaacatgttgatgctatgtgttagagaggatcatttataataatacatctgtttgtataaagacctgagaaacctttcaactcttaaaatgatgctgttaaaggaacttaatgccattgtccttgatgccttcaagatgaggtgtgaactgcttatcattgcattcatgcccctttgtaatttaggctgatctcacccttcgcacctcattgttgactccttgggccatcttctgatagctacacattccaaatatcttcatctctggatctcagccaaagatatttatctggtctagaatttcaacaattccccttctctacctgatggtgttcaaccttgatgcataatccaacttaaatagcattttctatttgtattgcagaggttgcaaactggcttcagatagttttgttgatatacacgataatttttttaaaatttgagcatgaatttctttaagctggaatgcactatccagttttgcaaacccttcccactccctattgttttacacacatttatgacattgctttatcttgtagacatttgagttgtaactctggagaaacattttaagcttattccccatttatcttcccacaggaagaattaaatattctgtaaattctcatagaataggttcacactgtgcaagtttagctatatgtgtgcagatcatacgtaccttgagatctcagaaggcatgagtcatggcttatgtacatttttacccccagctcttacaccttagtaagcactcaataattgcttgtccaagtttgttgaattacatatggcattttagtaatttttacaaaaatagtaagagtttcaaggctggactgatttttttggtttgtgttttcaccttagagactatatttttttccctttatattggggtatttctttatgagagcttactttttaaattgcctttgccttacttataactatttctgagttcctttttctaccactctacatttcatgttctttcccacataccatctattccatgattaaatttagacatagctccccattttgtagcaatactaatagttcaggatagttgagcacttattcaacatcaaataatctttcttgccaactgaagaggccctgtcataagtgctttatatgtgttactgcttttcgcttcccgtggtaatttacaaggagtaattttagtctcccatttcacagaagaaaaaacagcagaggccaggtaagatcagcttgcttgcctgagctcatactactagtggtggcaaggccattatgttccccatgttgcatggccctataaatcaggcagattctccagactttaggtcccatgatggtttttagctcccctttctgctgtccctttgggggcatttctctgatttctctgtcaagccttccctggtgacctggtcagaatgagccactccttcctttctgattccataccacattgctatattctggcctttctttcactctttctaaatcaaaggcaattgctagcatgtgagtcttttccattctttaatcactggaacataaataatcacaatagctaccaatcatggagccattactgttttccaagtattactgagcagtcatttaatccagaaaatagtatattttgcttgcaaagagcattccgcacagggaggtaataagtgatttgttcaaggtcatacagcatatacatttcatcctgatttcaaagtccatggcctgtttacccatcattatatccagttcttactcttcgtattgcagagaccacctagtcccttatacttagctctttactgcacatgtgtaaaggttgtcagatatttgccattatctcttcacagcacatatatatatatgtgtgtgtgtgtgtgtgtgtgtgtgtgtgtatatatatatgtgcagtgcatgaatagagacatatagtattgtttttatcttatttataaaatgtgattttggggcagaactttctatttattaaactgagattttcttaagaggtcatggattacattttcctatatcgtcttagtcttccacttagaaactaaggccgttttgttccacttttgagccttgttccttatgttgttttatagaataatttgtggctttattctaaaccacatattctataaagactatattctagtaccagagggacatgacaactgatttgctctaagtatttgcatttgttaggaatgaatacattgggaaaaagctgtaatttcagtgaatcagttataaaaccttgacccatgatactagaatgaatacattgggaaaaagctgtaatttcagtgaatcagttataaaaccttgacccatgatactaaatcttatgtcacattaactctttttaagacaaaaggaagactttctattcataagagaaacatttatttatgaaaaaaattgaaaaggggatagatcacaactcctgaattgatcttctaagtgaaacagtctcaaggaaaataaaataagcttcctgagtatcacttaaatctatcacaatcatagaatcaaaccactcttcagaactggaaggaatagggactgcataccacatagagagcaataaggtcctagaagcaccaacaggccactaaaatggcccagtaaaaaatcagatgccagtttggggttgtaaaaactcctaagttccaatcttcataatactttttgactttgcatatggaagcacaaccaggaaactatgtaggccatattcatagcataaccatgtacccctaagcccaacccaatagtgatgaaaatggccttttcaaagtcaaaagaaagattttggaaagcattgcataagagcataaaaacaaaagaccttgtgatccaaagaagctaagagtgctgtggaaaattgtttaatacatttttaaccattcattctaaattccatttttatttcttctaatgttccattcaaatgtctcttcagatcaaagaccacaagtattgccaaagcatgtgatagttttgagatgctgacaaacgtgaaccatagacccatgttttccttaaacctggggtttatctttatgtgtaaattacggaataggagatgctagccttctgtagatgaaaggtaggattgttaaaaatgccaacatctcgataagaatgggtggagtgtacaaattatgtccttatttatggaaacattttaaggtaaggaaaaataattatgccatgtggaacccattatgccagattctgttttcatacaccaataattctgtataagaagcaaatgcgtagtttatgaaacaacatagtgttaaaaacaggaggctgggtcttcagtctgttgatggcacagtcctatgatagaaaaatatcttccttctgccaaaatagtttaaaagtaatggaaccaaaaaaaaaaaaaaaaaagcattaaaaggaattgcatagtgtccccagtaggtataaagtgtaaaactcaaaatggagaagttgaggtgctaggaagagcattctggctgcctgatgaaatgcagaatttatttgaaaagaagcataatagatataaatgcagtggaagagaggtgaggccaatagtaatacaatactatctaacttcaaaatcatatatcaggtctatttgatgaaggttccttcaagggcaactgagaacctatcaccaatcctgttcccatttcgtgcctaagaatagcaaccaactcacttttgtgttgtaagtgactgtttacagagcatctccccatcacttattttatttgatgtttatgataagagtggcagatgtgcattattactttcctcactcgccagctaaggaaattgagaccctgagaagttaagtgatttgctgaagaaaacgtacttaactagtaagcggaatcagaaggagaaccccctttctgatctatgtgtatattatactgccattttccattttgctcaatgtgtatcctacaaatgggggtagaactgtccctaacctacaaatgagatggctcctagcacatagagctgctcttaggggccagcattgtatggtagtgaaaactctgcaattgaaattgttctaacaaacagagttcaaatcttagctgtactatttactgcatctgtgacctcgagcacattaaacaatctttctaagactcaatttcctgatcagtaacgtggggataatagtggtatttctttcatagtattggttttaaagattaaataagagccgtgtaaagtgattcattagcctgttacatagaaagaagtcaacaaatgtttacagttactgacttttaaaaattattgttttacctcacagttatttaaattgactctgttaatgtccacaaagaatactattatattttctggactgtgagtttgagttctacgtaattgttgattcagaagagtagaaaacatgtgcatgtatacattaacatagaagatgggtggcaactggaatatttaacacggaaaaatgtgttaagtactgttataattatatcattgcactaaaataaatgctttgcttattagaaccaattgtttctataagcagggtttcttaacctcagcagtttggacattttagatcgtagaattttggctatgagagccgtcctatacattataggatgcttagcagcgtccttgggctttgctcaccaccctcacctcccttcccccacattgttacaataaaaacatgtcctaggcatagccaaatgtccccttggatataaaatcgcccctacatgaaaaccactgcttatggtaataaaactaatttttaattttggcagaattattgggtccaaacgataacccacctcaaagcttctaacttaaaaaaaaaatgcttatttgaatgcaactcttattttaaatatttggagaacttctttgtgagacttactttaattataaccttttaaagcatacagagaactaggctcattacttgaaaagaaatctaatagtgtttcttaccttggtcaccaaccatacaaaccatacgcttggctccaggtatctcttggcactagaaaaataaataaataaatccactttcaaggacaaagatgtgccaccattactggattcaaaagaacaggccgtaggcgtttaactctactgccaagaaggagttccaaaaatatttttgcaccatggcagcgttgcattaaatctttgtcctctcaaagtggctagttttaagggccatgctctttggagttgataaatgctagtcttttgtgctatgatattagtcacattgcttcgtattcacacttggtatgacgtccagcattttggcagttccaaacaataagccccaggagtgccctcaagtggcatatgacttagtgactgtccctttctcattgtttaatggaggccaaagataacagatgagatgaatggaaagaaagtgagtcataatgtcagactgcctcctcaagcttgcaggttcctgaaattctttgccctttgatttttgagggttcagatttctgggacagcacacttatttttaaatcacagaaatttaccaaagatgagttgcttatgaaaaacttaaatatttttcattttttgtttttgtctactttcttccaagggacatgagcagtcttgctttttctgtctcttcccatctcacctccctcaatacctcttccacttccccccaaaattcttctctacattgcagttcatcaagggagaggcagcagttaagtgtttcaccagtgcacagtggtgcttgctgagtgtatggtttgtcatatctctagtatattaaaaaaagaactagataaaatgagtcaggattaactgtggctcttccattccaatggtaaacagccacttgctcttgctcaaatttcatttaatgtctgaaagggagaggatgatgagaattatgattattttgagaatatttcttttctctctgtttttgttcatttgttttggtgttgagcattgaatcatattttaaaatactataaccgtatttctgtttctggtacacctgtgtgccacaggagttggcagaacggagggtatgtctgtcagttagcattgctacctacaaataccaacccaaaacactgtggcttaaaaccacagtaatttgttttttctcgcaagtctgtgggttgacttggggcaggacatggatcttctgcctatctctcctgagctctttttctcagtcagcttgaagggctgggaaagccaaatggggtctctctttctccccaaggcttttcatcctggtccagtgggctcagggttctgaggacatcaaaggggaagctacaaggccttttgagacaattgcttttgctgcattccttggtttaaaacaagtcaggggccattccagattcaaggaatggggaagcatactccacctttggatgggaaaacaacaactcatttatgacctcatttattctacctctgagtgccacattgctgaaccttatttactggattggtggaactctgctctccatgctcatcagcctggctaaatacaatgtgaatttccctccccaggctcgatgagaggagccaagccccctaagctgaccccaaaatacagggtttatgaatagtatgtgaaataggtaagaaagtaggaaaaaagtccattctcaaaaatgcatttcataactgctacctgattacttctggtaaaatattagcttgtgggtaggagaaacttgtgctcttaactctccttacatcctaactcaaaaatattttctttacatcttcctgtaattcaagatttactggggctagtgggcctctttttgaactcagaaacaggactatgattcattcacagtgaatcatagccgtggaagggacatttccagactctcagaccacttcccctcctgcagccttctctttttttaattttttttttaaatttcagagttgagttgagaaaacaaaattaggccaatgaggttgacagctttcccataggcttctgctggactcaagtcttcagactgcgggtctagtatgttttccactgcagtatggtccttaaaattttgttcaaatcaatttgattaaagggtcccttaacattttctagatgcattaggaaaataaccagaaagcacctgtatattgagaggaagtgttatgtttgacaccaagatgattggagtaggtaattttgacacattagacccaattaagcatcccagatcttcaagcccatgaataatgggaagaaaggctgatgggtagccagggagcaccctgaatgcactgggtaccaatttggtcagtgaggctaccgcagcagaaaatcgtagagcgatgccaaagggagatggagaagatgtcagagatagataaacttgtcctgccttgcggcagtgcctggagctgtgatggtggaaaccacttcaggccactaaaaattacttgacatgctgtcttggcaggccctgctctggttcacagtggctgccttgtgtatctgccgctcccgttggagtgctagcctggctgtgccgtggctgtagcatgagctttttagtgtcgatatgcttgggaggcccatcagctacaatttcctcatctcaggctccagccagctgcagcagatgctattgttacctcttctattcgataaagtaggaagcaaagagagaaagaaatttgtcaatattgtttttctgctggaaccgaaataaaaactgtgtgtggtacactgtccaatgataacccatgtgccaaatctccattttgtgtaacacgcttatataagactctgcttctgtatttcttaacgtaatgtaaatgaccttcttgattccattgtagatgtgttacaattacagccattcagatttctcaatttggatttgtgctatttcttgcacttgcaaaccctttgcttctgaccatgccatctgctggaatcatttatatttctttcacacactcacagtgtttgttatatgccagtatttagctgtgtaaaactctgaaatattgtatataaataaacaaatgtttagcaagtattttcaaaccctttgccttgataactggcattaataaggtacatttgtgtttctaacataagtacagctgccgagagaatttcttgttacagaaatgtataaagtgacaccaaaatcagaagagaatcccttttgaaataaaagcttgcatatgcaagcagtctctgtgctgaggacaaagtaaatgatgatgaattcagctagcaaaaatttctttttggatacaaaacatagctgggggtgggggctgtctgtcttcaaactctcctaagttgctggaccttccaagttatcccatcaaacttttgagccccaataggacattggtcagcctgcaaaggcttattaatttctttctcactgctctattctgatcacccagttaagtgcaatgtgaatttccttcacaggactggatgagaagagcaaaacccccaagtacaacccaaactgagggttttttggtcaatctataaaataggtaagagaggaggaaaaagggccttttaatttttttcagaacagccacctgatcttttttgttgttgttgccattttcacctggttgatttgctttttcctcttgaatccctaactacccctagatgtgtatagaagagttgtgaattggagtgcctttttctgtgatttttcccttcactgcggtaaggctcctccttgtcactgaagcagagcttatattgagatttgacctatgtgttgtctaaatacagattatttgaagatgctgggttttttaaattatactgtcctccaagctaagagtgaatactgtaaatgaatgcagaagataaatgtatataagatgcaacctcaaatggtcacaatggtaagcctccaaattttatcaagagctagggttgttggatttttgtatggacaaacagagaccacgaatggtctccagatataatctatgttttacacatgctcaaaaaccctagtaaaaatcaaatacttcctaaagcagtaggcaattgcatatatagtaggcaattttaaaatgttaaactgataaatcaagctcctggatctttaaatcttcattttaagtgtgtcttaataaaaacaactctgaattccatgactttcactacatacttagctttcaggatcaaaaaaatgataattgtagaaatgtagaaaaataagagatattggataaaactgtatgatcttgtgcaagtcactcacttgactgaagttatagctctgtagaaaggtagagaacagtctggtcatttgccaatggcatcttctcagaggaaaactggataaaatcagatagattaaatgcttgtttactctgatgatgattatgatgatggtgattggttttctagaaatctgtttctttgaagaaacaacttcagtccaaattttggtttataggtggtcagtcattcttcacatcctaaactctcactttgtcaacctgaaccaactccaattctaatcaattgggcagaggctttctcagtctggactcatgcttgctacttagatttgaaaaaccataaccaatcatgttacaaaccacaaaaatcctcctctacaatctatggttaatatttcatccctctttcgtgtgtctgaaaatgattgacctggtttcagactattttctctgaggtactatagtctgaaatccatttgctatcttggttcaattaaactcaaacttattggtttgtagggtacaatagtaaagctacaagcttagcaaaacctcttccagaatttagtaaggagctctgtgaatgtagtccagttacaagagataggtatgtatgcctttgttgttgtgtttatattttctaaaggcttaggaataaacacatctttaaaatctgagataataattctacatgtaagtcatttttagagtgaagctttgtggcctgcatactgtacaaaggtacaaattcccaaggtggtctacatacctcttgctgaattctttgcctgcatttctgcatgggcaatctcatcaagtcacatggttttctgctaaagcttcaccatatcacagtttggctatggcttaagaaaccaatagtccagtcctagctattggaagaaggtgagtgggtctgaacacgatcctctttgttatttctgccctgtgggggacttctgtacacttagaaagtgctttaccttaagcgggaacaaaggaggctgttttttcagaattttttttagtttggtcattttcaaacataccccaaagtggagagaatgtataatgaacccccaagcacgcatcacacagcttcaattatcaacattccaggcagtgtttgttaaatggcaattcattttctgtttttcaaagaaactcattacataactgccattcaacatctgagattttaatagcctgggcaaccttatctcaggtaaatattcaatttccatggacagaggtagtgtaaagggcatttattactgctttctcgactccaggttgagtgctcctagactaggtgtcctatgctgttataatctgatacctagactgcttttctacatctgaagtcttttatagcatgaagtttcaaaatgattacagagtattaaaaccacctccctctttggaaagcttgtaccccaaattgtccttagcaacatttggcttgcagtcttttaaaattttcactcagcacctttacttttaattaggctcagttcatcaaagcctccaccactgcctgttatttgacattctaagtttcacattcccctgctaaaatttttcttttaatctgtgaaagcagagctagatttaaaatgttctgctacttcattgagaagaaagaagaaaatagaaaaaaatagcagttttaccaatctaagttttacaaatccgtatgttgaccatttaatctgacgcattcataattggcatacataattcacacctattctgggttataagaagtatgagaaaatctacagaaacagaaaaaaaggtttgaacataagaatgaaaatcacttagaaaatttgggatacctcatcaatatatgtgcacattgaatcatggattattaattgatgcaggggggtgaatttctgtagtcaaataagtatgggtaaaagtaagtttaactggtttctttacagcagggtttctcagcctaatgcattgtgagccttcaagaggaaatttatagaactatttgtccccccttggaatttctctaaggactccaggaagtgctatcataaaagaaatgtttcatagcctggataatttggctcacagtaataaaacgagatgatgaactactaagtgtaattggctaatcaattagcaacattcaataaaatgtatatataaatataaccagtaaatatttattacaacttcactgtgcaaaactgtgggttatagagtatggtatctccttcaaaaagcttaatcatcatatatgaagagatctaaagcaatcaagaccattcagaaggaaccttgatctatatgttcagtttagacttgatcatttagacaaaacctcaagtgaagcaaagaaccctaaaatgtatgtatacagttgacattaacctcaaatgcataactgtatattagattcaccagtttttaaaatttgggactaagaactcttatttgagtatgaccaatgattagcagatttagtgtttttaatatcaacagcaaacagtagtttgtttctaaagttaagcaactttagaatccatctagatgtttataaatatttttccatttacctgcagttgtgtcacccttacctaattcaatggtactttattggctatgacgggacacaaattacttttacgtctatctttccaaagtaattaacttggtttttacagaaacaactcatttattttgtaactatatctcgtcattttatctaagaattacattacttaaatgaaatgactgattatttttggaataaacatgatgacaccacaaacattctagagccacagacaacctggagagtagcctcctaacaaacattgagctgacctagtgcagtaagcaatgggaggagctttttggaggaaaaggaaagcttgagttaaattggttaaatggaagtcagataagaccatgcatattgatagccatatgcctaaggaaaggaagaaatgatggaacaaacactaagtggtacttgagataaggggaggaaaacagaactttgacacaaacaaagcaatgcaactgaaatacagagattttattttagtctctgttcctgagtctctccacctgtaaaatgcaagagaatggcttgatgggtggctcagaaactttagcaagcaccagaatcacctaggggcttttaaaaattcaaatagctggccgggtggggtggctcacgcctataatcctggcactttgggaggctgaggcaggtggagtacttgagaccaggaattccagaccagcctgggcaatacagtgaaaccctgtctctactaaaactataaaatttataattattttataaatttgctggcatatgtctgtaattccagctactcgggagcctgaagcaagagaattgcttgaacctgggaggtggaagttgcagtgagctgagattgtaccactgcactccagcctgggcaacagagcgaggctcagtctcaaaaataatgaaataataaaattcaaactgcttgaccccaccccttgagtttctgattctctaggttggggtggggcctgaaaaattgcatttctaacagtttcctacatgctgctgatgctgctggtcatggggccgcactttgagaaccaccagatctctaagatccctgccgaatctaaaatctgattcaatttttttttgtttttttttttttttgtttttttttttttttgagacggagtctcgctctgtggcccaggtgggagtgcagtggtgcaatctcggctcactgcaagctccgcctcccaggttcacgccattctcctgcctcagcctcccgagtagctgggactacaggcgcccgccaccacgcccggctaatttttttgtatttttagtagagacggggtttcaccgtgttagccaggatggtctcgatctcctgacctcgtgatccgcccgcctcggcctcccaaagtgctgggattacaagaaatctgattcaattttatattacatttttttttcctgagaggatttaaaccagaaaataaagttaaatattggtttcataaaatttattagtagaagtctaataaactatgcaagaataggaaggttgcatatctactctgtggttaggctaactgaattaaaatattcaattctaggtcctcaattcatagaaaaaagagtactgaaattaacattgatcaagaagctattatttaaaatgtattttgctgacagtatcatagaaaacttaggaaataggtttacattttacaggtgagaaaacagaggctctggaagaataaataaatgatgtatttaagatacaagctgcaggtggaagagccagagttagtatctctaaattccataaaatttttgtttgccagcctggttctttcataaaatgagtacatcacatcaaagaccatttgctctgttatgcttaattgaaaacaaaatagtcagtatcatcaactcagtcaggactttaaattatgtttaaactattttaaccagtaagaagtgaaccttcaagaaaaaaaaaaatgatggggggaattttaaagtgtagtaagtctttaattccatgagccaaaactgaatttcttccccaggctgtaactttcaaccgttagagatacgtggttggagatggtgtctatgaggtcacattgcatcctcccttagaactatgccatgtgtgaaacagacactaaataaagtgagcattagagtagaagtgtcacaatccaaaacgatgccaggagtcataccatgcaagaatctgaagggtataatgatctgtatgtatagactaaaaaatacgggacttagtagaattactctcaaagaccaagaagtattggtttcctttgttacttaggggaaagggagggactgggagtaggctattgaccagattttgtggataccaaaccctgtaggatacttacattcattttgtcagggtttgtaaatgttgagtgtggggcttgcattgtaattagcattatgcctagtattaatggaaatgtatgctgcatccctgagaattatcagggtaataagcatcctattcccaatatcttcctccctatatgaggtagattaagtctgcaaagagaagcatttattggccccgaaaagggatgcaccatatagcgtccctagtattaagaaaaaaacttcattttccttgagtgggttccttactaaggagcagtttgttcttccctgctcaccacattctctccatttccaaaacagacagagccaataaaaggaactattgcttgtctcaaatgcagtatatttgctgcttatatgttctttgatgaattcagccctcggtttatccctcttcaggggttccagtccagtaaggaaggcagcttggggtctccaaataggcctagactccatgagtgaggctgccaaggcatttgatagaatgaaaattgccaagctattcctgcatctcttggtgagctgctaaaatgaggcattgtcttcaaacagagggaatagctttaacttcaaagaatttgtattcattttctggtaaagttaggaaaagcagctcatccacagcagtgactggagaatgaggaaaagagttggtgtgtccccagaaactctgcccttcgaagaagaattgttggcattgcagtgtgatcccacagcatgctgggttcctcatgactttgtcagttatggaaggcatctcaggttctttgtagcgtatagcttatgtaaaatagatatccatgagttaatccgtcagcagaataaatacccttccagttactcaaatatagtaattttataaatttctttgataaaagtagattttcagatgctgccactcatcatctatatattttagtgcttttgagtatttctatataattatatttaatactgtaaactataagtgctgtaatttcctttgacctatgttgcagttggatacattacttgatcagagctctcaatgaatcattttatgcacacgtatttagttaattggttatttttttcctgcctgtgtttatatgtaatatactctataaggaaaggaaatcagcctgcctgcagctgagtctggtagaagagcaattaagttctatcagaacaaacagctgtcaataatgaggtctgaattaaaattactaccaaagaaaggaatctagacatctgcaggaaatgtgaaaatatttttataacctaatagctgagatctggacaggggtatcactgagttttcccagctgtacctgcaatgtattttgaaatgttcccagactgaaagaacactgaaacttattgcatgaactagactgcatttaaaaaataataatgttggctgcctttgaacagtgtgtattttgatttcatgtaatcagcatgaaaactttctatttcaaactattttgctgtgccccttggtcataaaatgaggcttaaaaatagttctgttatctttgtttggtgtctttccaatctgggttctattgcttagatatttttctttctgtctttggaaaaatacttttaggtcttattacatggtatctgatttgctcgcatttggggttgtttcttgcaaagaaaactcaaaaggtgggctttgggcatctgagttttattacaagataattccatatattttcaggtatctggagatagtaaagtatttggtcttaaaaaaaatgaaaagcaaactttgcgtttttgaaagcagccctttgcggtctctcctttccattgaactttacattgctaaggacaaaaaatccttatgaatgagagattttgatttttttaaatttatgtgtatgtatgtaaacacacacatatgtacattattatgagtgtattctgtgcacctttttgtctgtatttacatataaaaatgttagcaatgtgcctgtatcctcattacccaaagtgtggcccagcgaccagccatatcagcatggctttagaacttgttggaaatgcacaatctttggtcccaccccagacttactgaataagaacctctgggacagagcccaggtctccgtgctctcacagtccctagcagcatgttcagactacttgaacatataatgtatatatgcctggggtacactgcatggcgattgatacatagaagaggaatctcccattttgcatccattgagttgaattattgaatattaaccttcagctctttggtgtcacagtctcttaactgtttcccatcttctagtattattctgcatgagaggcaaaccctgtcctctctactgtcatccttaaacatgaccagtaggttattctaaatacacttaatactagctcttatttattcgtcagtatgtatgcataccactcgaactaaaaggtcaaccatagaccaaaatattctaaaagagatagagctgacataaatgtaactagctgatacataaccaggtatgttagtctgaagaaaagaggtttatttggcctacaacctgttctggcaggcagtacagcaagcgtgatactggcatttgcttctgttgagggccccaggaagtttggtggaaggcaaaaggggagccagtgtatcagatggcaaaagggagcaagagagagacaggagaggtgccgcactattttaaacaatcagttctcatgtaaactcaatatccctcattaccaccgtgagggcaccaagccttcatgaacgatccacctcccatgctccaaacacttcccaccaggctccacttccaccattgaggatcatatctcaacatgagatttggagggtacacatatccaaactatatcaccaggttcacaaagacctattttggcagtgctttaaaaaccacttaattcatttatttttcagtagtgcagtagagtgggagagctaatgtttcatgaataaaagacaattacaggaacagcatttctctcttggaccaacattcttacagcctaaattgattgatagaatcgtggaccttgggtccatctggggagctccaaggaaaactgtcatctgttcatagtaaaactcccattggtggaagtgagagtctggtggaaggggagacgtggacccaagtcttagctccctagtgacagccacgtgatcttcatcaaattcttaagcctgtaaatatatgcaactacttgagtcaaaccaaccaacaaacaggaaaaccttagtattttaacagtacctttattcaaggagttcaaaggcccagatgctccaaaatttattagaaactgaggttcaatgattagtacaggaaagaaaaagaaaattctttaagtcttgaagcagattagaagaaaattcagttatgtggatagccatttataattgaaaagtagaaacattactattatttaaatttttcgtattggtgttatttcatgaaattttcgtccatcttgtaggacaaccattaccagtcatggtagatagttatttcattggatgaatgtgttacataaagtttttctgtttattttgctgttacttcttgtgtttgactttgtggaagtgaatcccattttacattttgcattgatgaactatggattctagcaccttataattacaatagaaaagttatgaaaaagtgaaaaaaagaataaggagtacttagcaatgatcttaaacttctaagttttggataaatataaataaggtattaaaaatttcaatttattatgtaataaataaaagacatatttaaaaaatatgattgcttgaacctgggaggtggaggttgcagtgagctgagatcgcaccactgcactccagcctggcaacagagtgagactccttctcaaaaaaaaaaaaacatatatatatatatatatatatatatgtacacacacatatatatacatatatacacatatatacatatatacatatatacacatatatacatatatacatatatacacatatatacatatatacatatatacatatatacatatatttttttttgagaaggagtctcaaatttgtatatgtatacgaatgtgagtaggcaaaagggttagaagaggcaatgggcagtactggctgggtgcagtggctcatgcctgtaatcccaccactttggggggctgaggcgggcagatcacctgaagtcaggagttcgagaccagcctggccaacatagtgaaaccccatctctactaaatataaggaaaatgagccgggtgtagtggcgtgtgccagtaatcccagctactcaggaggctgaggcaggagaatcacttgaacccaggaaacggagtttacgatgagccgagatcacaccagcacactccagcctcctgggcagcagagtgagactccatctcattcattcattcattcattcatacattcataaataaataaataaataggcatactgattcataattcagaaacccatgagtttaagaagccggatcagaagccataacaggcctctacaaaaccaacacaaaggcctgctggaggttgctagggtgttgcaaacaatcataaactgattgtattgagagtgagattctcactgccttataaaagcttgcaggagtcaaacaaaaggacaaaatgaaacaaggaaccacagatttagagccttccaaactattggacaataccatttaaataacgataatagcctttttcttttatttatttattttttgagacggagtcttgttctgtcgccaggctggagtgcagtggtgtgatctcggctcactgcagcctccaccttctgggttcaagcgattctcctgtctcagcctccctagtagctgggactgcaggcatgtgccaccacgcccagctaatttttgtagttttagtagagacggggtttcaccatgttggccaggatggtctcaatctcttaacttcgtgatccgtccgcctcagcctcccaaagcgctgggattacaggcatgagccaccatgcctgggcaataatagcattttttaaaaagaaaaaccaaaaaactcctggcatttgtgtacatagtaaaatcttgtctgtgtgggaaaatgatatgccttacaaactaatcaaagttgctaaagttcaaatgccctccaagtaccttccagtggctcctctctttgaatcttgcttaacctgaatcaggagtaatagcatttatatttctaatgacaagcctgctgtgtggactgagcaggttgcacacgttgtacgtagtccatgtgattgtaacttcctttgggttgagcagtatacaacccacgcagctttacttggcaggcctggtaaatggttgtctcctctttcaaaaagtgggcaattttgtatcactctaaacagaatttagaatacggagtgagctggtatggtttacaaggaaaatctctgtgtgaatgatatagttctctaaacttccgtagcatcatttgattgacctctattcagattcaagtcaactaccaattatcagagccagctgagtctgctctatccatgcctaatggcctgttctatccatctgtaaaatgagacctgctgcggcatattcaggtgttctttacgcgaacacattagccttctaatttatcatgagaatcacattttaagaataatagggagtgtgttcagcagataatattgggacaaagccaagatcatgcagaagtctttggaagattttagtttgagtctacatatttgaaaaaaaaaaaatcagattaggcccatgtggattttttttttctttctcgagacggagttttggttttttaggaaattaccttttcacccagcatggaaaaataaaacacccaaagggatataacctggtagctcatccctgatctttcagtattctatacaaggatccttatcaggcagtttgggaactttgtgcttagtttctgccccttctctgttgatgaaatgtgaacttcctttatcctcagaagacaccactcaagtgtactacattttacctttctggagtgatcatggctctgggtcatctccctaactctagattttttttttttttttttttttttttttttactctttgccaagcagtctcctctctacaatgactcctatatccccttactttctgatatccactctttaaaagccagcaccagatggcaggactaagtctgggctacacaggagctgccaacatcacccagacttctgacagtccatcactgagcaaggcagtattcctgagctagagttaattaggttccatcttttctctctgtgtctttggagcctcaactctttattgaactgtaattatgatatttattatagtaactttttacccattgctttatatttcttcttaattccattattagattattatgttatccttgttaaaaaaaaaagctacaaaaaaatacttcaactaaagtgaaagtttatctgtactgccaccattaccgatccttctcagaactattctgatttgtgtatcttttcagaccatgttttgtgcattaacatgtgtacaaatagagatatgtaatcctgaatggacttttaaaacaatgtaagtggtgttatgttatatatattgttctgcaatatatttaagtgggcttgacaatgtcttagatgctattttggagagggtcaatacatggattcgcttcattctttttaactgctacatcacatccatggtattgatataccatagtttattcaactagttccctagccatgattgttttactaagttaacttgctacatcaacaatgctacaataaaatctctttctactctctttgtgcatatgtgtagatagacctccgtgctagatttctagagttggaggtgctgggtcaaagagtatgtgcatttgaaattttaatgaagattgcaaaactaccccttaaaactgctataactactatatattaattagtatagggatatagtgtatgttgaatagcatggacaaatttgactgcgtatcaatgacaatttgttcaattttttttcattttaattttgtaatatataaaagttagacagctgaatattttgtcaaagaaattaatataatttctctagttatcctaggtaaaagagatgctagaagaaactaacctatctgtgggtctgttttttgtagtgaaccccaaatatcgtagagatgcccagtatctgcttataaagttaaatgttgatttttatcaaagaatgaaagaaggttttcacaatggcagcctcatcagagtcacatcacagttttattaaaagagtcacctaattaatcttataaacctgagtcgtaaaactcaatcttttctcatagatgtcaaatacttgtagttcatataccattatgataggtgaactatatccaatcaaattataagctgacatatgtacaaaatgctcacaatgatttttttagtccatattttactgtcttggcacccaactaaatgatgtgtgaaatatcctaattctattgtctttctttgccagatcagtgaagtaccaggaaagggtcagcattaaaactccaccacattaatcagaaaagccaacttttaaacacatctccagaatgactttagcataaaacagtccctgtatgcctcttaattttttctttttgcacattactactgtatcacatcacgggacattaagcccgtttcaactcgtgggactaactcaatcatgtttttagaaattgaaaacaaatgttgtaactggatgaatgataatattgaagtaataacaatttcctagtaggcatacttgtttaatggattgcatagtctttcagcttgtaaacactggaacgtctatcacttactgaaatttaaaaaaaaaaaaaaaaccactaaagtttagcaataatttggtttgctgctgaagtcaaacaaatatagagtttgtgttctgattctcattagtggaatagttgtcctcaccggaaaataaaaagttgattttactttagggataacagagaccaacataatgctagactccatttaaacttgccgttctctttttgctggaattttctgtaacataacataataaatgtactaaattgtgctggcctcagcctgaagcacagggttatgcactccttttttaaaaagatatttagaaaaatctgtctcagtgcttggcaactactctgacagaaaacagataaaaataagggtggtttatcagttttgctgttcttatcatgtttcaagttgaaggctgttgaaatgatgaaaaacaaacagcactaaatagggttccgtcattatcactgcaatggagagctgagtttttcaggatcaaagaaaaatgcatttgcttttagaagtacaatccttcattttgagaggtgcactgcactcagatactgatgggtgaacaaaaaaagagtaaattggagaaggaaacaaaataaatatatgctgctgtgggaacttggaaattcaaacaaaagtaggctgggatacttttaaaagctctgaattttcaacattcaatttcttaaggaaaaataagtgccggaggtttgttatttctcagcaattggagtgaagcataagcacaggttgtttgcatctcatcaaattataagcattactttatctttgtaaacatgtatcaaaggaattttcccatgctgggggcttcggggaaatgttcccctatgtgttattgatctgggagagggcttcctatttttaaagttttttaaattttttttttttataaattttgtcactcgagttgagcaccttcaatttccctggcatggaaattgccaaacagtagagacaacgaagctgttgtcttttccctggaggagagcgccaactggcataaggataataaccagaaaacaaaactaaagtaaggcagttgctgaaaaaatagttataaattgtcaaaagagtccaaggaggaataaatcaaaaggaaatgttgattcagggtgcagcagttgaggtgaatcttgaaggaaagtacatgtcaacagatgagaaggaggtagaaggtccagcgtcacaaacgcccagaggtgggaaagcataaaacatgtttaatttgaactagtgctgaggaacagccaagaatcttgtaatgaaaatattacctgagggccctgcggttttaacagtgagatcaatgcctaaagcatatctagatgaaatttttgaacctccaagttaaagaaacaacccccaattacttggggcaaaaattactattaaaagaccagaaaccagactggcctatgactttgtcaaaggacaacaaagaccgtgaagcaatgtatttagagtttgaagagataatattggagcccagtaatcctgcacaaaaccaagttgttggtcatatgtaaagaaaaaaagaaacccacaaagggtttctcagatatataaggcatcagaaaaagtggcatccatgcatatcttatataaagcattattcaaagacatattccagccaaccaatagatgcatcaaaataaactcaagaatagatgagccatgtcagaaagataaactgtgaaacatgtgaggcagaattattctaaataaatgctgctgatgtggttataagtttaataaaaatgttatagccagtccctaaaatggaaaataactatgtggaacatgccctctttttccctcactgcctttcagccgatggctttctgttagttattcaaatgtgctatgttgtctattctagcacttttttttaggatatcttttcaaaagcttttccaccctctttatttagcaaacagttacttgacctttaggtattgcgttagtctgctggggcttccataacaaaatactccgaactgagtggctcaaacaacagaaacttactttctcaccattcaggatgctggaagtccaagatgaaggtgctggcagagttggtttcaggagaggcctctcttcctggcttttagatgactactttctcactgtgccgtcacacggcctttcctctgtgtatgcatagagaaaaagatctctggtgtctcttcctcttacaaggacatccatcctatctgattaaagctcccaccttgtgacttcatgtaaccttaattacctccctaaaggccctgtgtccaatacagtcacactgggggttagcgtttcaacatatgaattttgagaagaaaaacacaattcagcccataacagatttcagtttcaatggcacttcctcaaaggtgctctaccagcatccttcacatttgcctcacagcgccgcttgagatttgtaattagatgtttattcatgtgattatttaatgtcagattcccccactaaactgtaagctccgacaggaaagatcacgtttgttctgctcattccttcttcgatgtctcagcacatggtaggcactcagtaaatgtttgtggaatagtaggcgacagagtcatgaaaatacaacaaatatggatggaagaacaaagttaggaactcttcctctttgtccctggatggtgggaatggatgctttagcatagtcatatgtgctggtaaatatgtaaaaacctgctctctggggagaaaaaaagtagtatttcctgatttctttggtgtaaatattcccatggatgatttcaagctacaaacatgaggtcactagagagagacgatcaccagcacattattagtgtagtccccctctatccgcaggggatatgatccaacatccccagtggatgcctgagtccccagagagtaccaagctcacttgccatcagtcatggcatgtttctgttcatgtatttcacccaaaatttaatgcctttttcatcttaactaagtgcttatcacatactgtggccgtagcttttgcagtttgaggtgcaacagcagaacaatcatgaatttctttttccttcttcacaattgtacatatagaggattgattcttaccatagatcttagcaacctcagcatacgatttctctttctttccttattgaaaactttcaccttttcacttaaaggaagcactttgcagctgctttttggcatatccaaattgcccagatcactactcttgcactttggggccatcaagtaaaataagggttagttgaagacaaacactacaataccagggcagtccatcggataaccgagatggctactaagtgactaacaggcaggcagcctgtatagcatggatacactggacaaagggattgattcacaccctgggctggatggaaagggagggcttgagatttcaccacacttttcagaaaagtatgtcattgaaaacttatttctggaattttccatttaatattttcagaccgtggttaaccgcaaataactgagattgcagaaagtcaaaaccacagataaaaggggactactctatatgatgttttcacctcaagagcataaaataatttgaaacaattaagaaacaatgagttttatatattacctttatttttaatatatttatttcagcaaataatccctgaaaatgtaaggattggcttttgctagctctagcacaccactgatggggagttgaagataatcgtggagtttgaatacataacaatttataatttattattttgcagggtaagaggcaaaaagagtctaagatgatttttcagttttaaacctgagtgtcaaggagagcctgagagtgggaggagcagatttgaaaggagaagatactgattaagcttagaatctttatttttgataaacttgaagacagtttgaaatatagatctccacttgtgctgaaaaagaaaggcatcactttaggaatcctttggagactactactgagagaaagaaggacagaacttttggagcattatctacattttggggactggcagagatatgtaatccgtgaaattgatacagatggaagaatccagagaggcaggtagagaattagcactggagtcaaataaaaaaaacaaaacgaaacatactgaggcacagtctgaacggatgccagtagatttctgaagatgacatttagagttcatctttgatttcgatttcaaacgtggtaggaattctaccctgttacagaatcaatggaaccgtgatacaggatcatgatacaattattttgggctgatttcgtgtactacctgttttggattattttgtgtctggagtaatgacacaatctccacccttgctaccattaaccccaagggagtatctgatgtttcccatactcccttgactagtgtccttaaaaccaaggatagaaagcttttctaggaacctgcattagggatagtcaaatgctgccaatgaaatatcacagacgagcgctctacaggaaagtcaccatatttggcaatgactgctgacctaaatggtggaaagcattgtgaagcactgggggtgctgggaacagggtgctaaattttaacacctcagaacctgcatttgagtcttctctgctatccaggtatggcgtgcatgactgtaggacttcagggcagttcccaagtgttgtcagagaaggggaaaggaaaccaacatttactgaatgcttcttaggtgtcaagcactgtggtaggaaggcccttgcctgccatctcatttgccacgatgataaatgtgaacgcagaaagctcctcaggtataaggcacatttattggaaagaaggcagaggaaaggaagagcagcttgagagagtagacgaaagcaagattttaaaagccaaatctcaaatgtttctaaagtaattctgtcataattttcccagcattacattgcttgtttctcattgtcagctttagagactgaatgttaaaatggagtttgtacctagaaagtaactgccttttccattatgtttgcaaaacacttggtatttttaatttagccttaagacttactggataattagactcactagaaaattaacgttaataagagttaactgtcactatcatttaagaaatatgggaatataaggaaggggttaaaatgtctttctcaaggacacacagccattgatgtctgaagaggtaccttaagcctcaaggtcttgcttcaagcgaaaacacttatttaatgtttaaatccctcaagaattcttcatcctagaagaaggtaacacattaagttccaaacgtcagctccttccctatcttccatatgaatagcaggattgggcagttaacaatattttgaattgtgggggaaaaaataggttttgttcaagtcatagcctctgttatttcttttcatcccacaattcatgatttggactcacacgtatttgatttttttcccttattttttggaaaaaaaaaatcaccattatgaaaaggttgatactgtttagagttggagttattcctaccaattttgcaagattctgtagtatctttctgccagaatatagaaccatgcatcatccagacatttgaatggtccctgatgcatattttgagaaaatagtcctgccattatctagaattgacttgatgtatagggctcagttctaaggtttacagtgtggtttccactgggaagaactgcataaaactgtgtccatgagaaacgattcacagctgcaatgaagacaatttagaaagacaacacagaaagaacgaaagatgttacttggagtctcaggacctgccaaacatggagtttgaaagaaacccagaaagacaaatcttttccaggttgagtctgacttaggttcctttaactgcaatctgatggcatatcaggagaccagcaaagagactacttaaagtgattttcctgtctctttattcctgatcaaacactatgcagaggagtcctcgggtactccttacataattccaaacccttgtcaaatgtaggattttgcatggtctgaagagtcctgcttcctaagtaggcttaccttaccgggacgggctgctcattactgcaggcatctcaagccagtcactaatttgtttacttatttcacaaacactgttgagcacttactgcatgctttgtgtagggcacacaaatattttttttaatgcagttcctgctctcaagatgtatgctgttgtttatggatggctgccctaaattaataatataatttggttagaattgtagtaaaggggtatttgagggcaaccagggatctgaggcagaggatgattaaaaccacctgggagggtaggaatggggaatgtcagggaaaactcgccatctaacaggtttctttagaaccaactaaataaaatgagacttcatggatctcaaggaactggaaccaccaggccgactttgctctatattaatgtttgcatcaggttgccaattggtctgtgctaaggtatgtgctatcatttgtaggactctctgtctcagaaggcttttgcatgatatatcaatgtcatgtcaatttgtgggtttatacttgggattggattcttggcatcagtattcaggagccctctggcataggacataaaaaagtaacctattttaaagtagtggttatatcaaattcccagctagttagcccagtctgtaaaccacagagctcctgtatgcaagctagctttgatatacactgttcagcagttaaataaaggtattattttgtttaaaaaaaaaatgatctcttactgccttgcagccactatgataccaaacagaaactgccatttcagttgagacaggcaccctggtgagcattaactcatttgttttggagttctggtatcttcgttgcaaaggtgccttgccagacctatgaaaatttcacatgtagctcccagagccagcagtgtgattaccaaagccatccgtcctttgttcatactacaacatctttaattcctcatccttcctgtccttcaagtcctacttcaaatgccacatcatatacaaaactaatacatcctttttctttcttgtttagaaatagctgtgtataaagtattatgtcccttcgatacactctgagctctttagagatagcatctaagtcatctttatgtcgtatcccctatttcacttagcagagtacttcattgtttattgaatgaagaaatggacagatcaatgagggatggacaataaatgaacacatagatacacagatgacaggaaacatagcatgtagcaaatgaaggaggctgtctgttgcctgttacctaagatggtaatatacacctattatatacctattcctgttgatgacatgtttaccagcctgataaacccgcatgatcaggaagagaaagtattttggattgaaccatacttgacacataaatgtcctcagcctgaagggtttgataaataggaagcatgcgaggtttagcttgagactgtaaaaacaatctttatgttttgtacatgggacgaaaacagattgagagagtttgcaagaactatagcctagccagatctggaccaatatataaaactatcttctaaatatggacagactaaatgtttgtatttttttcataatgacttcaaaagttttcgaaataatgttcactttgtattgcatgatcaaggaacatagtgattatggatttaatattttttacattttaaaactaaactaattttactcagtcttttgttccctgtcctctgattatggtgcctagataatacttttgactttagagtattacaaagtcatcccaatagctatttgagtagaagtaatggatgtaaggtctagttaataagaataataaaaatacttttattatgtattgattttctgataggtttatttgggcttttcttctctattttcctcatagtgcgggagttggccggactggttgcttcatcgtcatagatgccatgttagaaagaataaagcatgaaaaaactgtagatatttatggccatgtaactttaatgagagcccagaggaactatatggttcaaacagaagaccaatacatctttatccatgatgcactgttagaagcagtgacttgtggaaataccgaagtgccagctagaaacttgtatgcctacattcagaagctgacacaaatagaaacgggagagaatgtcacaggaatggagctcgaatttaaggtatggtattggatgtgatgtggttattcaggagcaagtcattctgggtttgtctttgagtcgtggctttactttaacctttcaaatttgtgaagtacaagattcatttgacctttccctcaggtgtatgattataaaatgtattcctccccttttcctcttctattctttgcttcctaacaatatcttgagcccttatgtctcctaacttgagagactatactttcagaaaatatatagaaatccaataggctatagagagtgattaggtagatgtgaaaagcagtacaatttgaatagtcatttactttaagtaaacaaaagatttatatctaaaagggaaatctggggtacactgcattcaaactgtaggtgaaaatgatctttgttgggtttttccttttttttttttcctattcaacagcgtctagccagctcaaaagctcacacctcaaggtttatcagtgccaatcttccatgtaataaattcaaaaatcgccttgttaatattatgccatatgaatccacaagggtatgcctgcagcctatccgtggagtagaaggatctgattacatcaatgccagttttattgatggatacaggtatctacttttgctcccctgactatccaaagccttgatatttacatgtgccctagtttaataaccagaataaatttcatctccattcaaagacattttctttctgcataggtcatcatttagtcccttggtatttgtttttttgttattttggataggagttaggagtagtagttatgaagtgtttaatctggccttctgcactcttctttcataagccaattggatatgtaagtagttaataaagaatctgttttgtaccatatttcataaatttaatagattgtgtgagaataatttctagaaaatgaagctgcacatctaagtgtttcttaagtaatttgtatgacaatgaaattgagctattagcattgcgctaaaattcaaataataatgataaagacatacatcataatattaacaagcaatttagtttgcgaagtccccaaaatgtattaaatgctcttatttgattatttaatcttagcaggaatttacctcaattgcattaataatatgttttcgttttttattagcaggttgatgtttatgtatccagtgtgagcttttgcatgttctctaaatactttaacacattcttttcattctctgtaattcagacaacagaaagcctacatcgctacccaggggcccttggcagagaccactgaagacttctggcggatgctctgggaacacaattccaccatagttgtgatgctcaccaagctgcgtgaaatgggcagagtaagtgtgtggcccttgtgtgtctcctcataagacatttactctgtggagaaatgaagactttgtttcaataactcttgtgctagatcattttttttgaaatgcagtgcactctggacataatccggaccatcattccttgttagtttctaaatttgtaaagccacatcaagtgtttaaatttatgtgttttaaagaaagatctagtgatttgtttccagtgaagcacaagcatggagacaaatgagtagcaggtgtccccgtttgacttatgtcggacttcttttagcatattcttactgccttttgttctggacaggctagagtttgatgtgccatcatttctacttatgaaggaacttgactttcttttcttcctgaggcaaattcttacttgcctacctttcactcccattgaataaagtgttggaaagcaacatagtttttctaaggatataacctggtaatcccagatccacttttgaaaaaagtggtttgtttttttttgaaatacacataaaatagtattagaaatacttaaggtttctactattaatactgctctaccactatgacctaatattatttagagatacctcttagattgacttgatgtaagcattatttcgtatttgcttcagatattttctttctgtcttctttgtgtaaattaaatagaagtgcagctaaagcccaacttgtagagcccccggagagaacaaaaagaatatcagacgaggaaagtaactgacttactctgatttggccaatgactctgcagggtttagccaagtcattaaaatggactgggcccctcgtttccttgacaagtaagattggaacaaatcaattcggaggtttctttctatgtccatactgatggttctcttcattccaaaccatagtggtgcaagtatgctgtggtggtgcaatgtgttattgtcatggccagcattgtccaaggactgatgtaattatttggataacttgtaggtatgaagatgcttaccctatgaaagtattcaattctcaattcaactcgtgtatattaagcagctactatctgccagagaccgtgctggatgccataggcaaatactgaaccaaagggtttccctatgaagggagctcatggtttctaagaggaaatgagtcatatgcaattggaattgccttgaattttgaaattttattaatgggataaggaaattagatagattagatagatagatagataatatacagaatgttctttatactttgcatagtttaacattaatcttctctccttttaggagaaatgtcaccaatactggccagcagaacggtctgcaagataccagtactttgttgtagatcccatggctgagtacaacatgccacagtatatcctaagggaattcaaggtcacagatgccagggtaagttggcacagtcttcaactcttaaccattagctgaaaagtagtctaagatacctctctctctctctctctgggagaagcacttgccacttgactgttgtcccaaagagaaatcattcattctggagaacgtttttttttatgtttaatatgtaagagtaacttttcctctgtctggcaagctttctcacaaaccttagtttggctttcattcaaacataacatctggcagctcaaccttggggatgcacttggtgagtgttcgtgctgggaagtgtttactgattggttggctgtgcttacattcaccttctcagctcatgctctttggagcttttttgacttcttcattacttgaggctctaaatatgttgttgttttgcaaagccctttaggtcatatggacccagaggttaatttggtatgattttaaaaccgcagagcaaatggcattctttagaaaaatctgacaagctttgcacattctaatttgattcctggcatggcttattcctcagtgtgctaatgtgtctgtccatgagagctgtgctcccatgacccttgttggctaattttcatcctgcatttcttatctggattgttgagtccaaggttcagccctgatgtaagatgttctatgcataaactctgatatcttcgcctttggccactttcaacccatgattacaaacacatcttaagggagaccaggtcagttcaaagacctgccttgtgtttggaactgtcacagtgggtgggttgaataaaactccagggtaaagctatttagttgatccattgttttttctggaaagcagctttctccaaacttaggtttggagattgtctgctaatccccaaagcctggccctggctgttgaccttaagtgaaagagaaattggttagcaggagggttggcctaggtgacagacctgttaatcccagaaagttatattaactattctgaaggtgacagtattcaaggcagcagttaaatctctaggtcttgagtgtaacctgccccaccgtttaaaaaaaaaaaaaatagtgctctttcagaatttgaagctaggtatgtgagtgaaaatagaaagtgcattttgagtaaactcaccaactattcctggtgataaagaaaaggcaccaggccccaccaatggcagagacacctttcctattccacacatgcacaacttaaatctgatcacaataaacaaaagaagattgaaaccggaagttgctcacctttttttttttaaagtctccctgtgattgtataattttcttagctactacatttgctgtttgtctgtgctcctggagtgtaagtcctgaatacatgtgcagaacatgcaggtttgttacataatttaattatacatgtgccacggtggtttggtgcaacatcaacccatcatctacattaggtatttctcctaatgctatcgttcccctagactccaaacccgcaacaggccccagtgtgtgatgttcccctccgtgtgtccgtgtgttctcattgttcaactcccacttttgagtgcagtgtttggttttctgttcctgtgttagtttgctgagaatgatggtttccagcttcatccatgtccctgcaaaggacatgaactcatccttttttatggaatactcactcaccataatattccatagtgtatatgtgccacattttctttatccaatctatcattgatggacatttgggttggttacaagtctttgctattgtgaatagtgccacaataaacatacgtgtgcatgtgtctttatagtagaatgatttataatcctttgggtatacactcagtaatgggattgctgggtcaaatggtatttctggttctagatccttgaggaatcaccaaactgtcttccacagtggtttaactaatttacacacccaccaacagtgtaaaagcattcctatttctccacatcctccccagcatctgttgtttcctgactttttaatgatcgccattctaactggtgtaagatggtatctcattgtggttttgatttgcatttctctaatgaccagtgatagcattttttcatatgtttgtctgccgcatcggtgtcttcttctgagaagtgtctgttcatatcctttgcccactttttgatgaggttgttgttttcctgtaaattcgtttaagttctttgtagattctggatattagccctttgtcaggtggatagatagcaaaaatttcctcccattctgtaggttgcctgttcactctgatggtagttttttttttttttttttgctctgcagaagctctttagtttaattagatcccatttgtcacttttggctttagttgccattgcttttggtgttttagtcctgaagtctttgtgtatacctatgtcctgaatggtattgcctaggttttcttctaggggttttcatcattttacatcttaggtttaagtctttaatccatcttgagttaatttttgtataaggaagggatccagtctcagttttctgcatatggccagccagttttcccaacaccatttattaaatagaggagcctttccccattcttgttttccctcaggtttgtcaaagataagatgtttgcagatgtgtggcgttacttctgaggcctctgttctgttccattggtctatatctctgttttggtaccagtaccatgctgttttggttactgtagccttgtttgaagtcaggtagcatgatctctcaagccttgttctttttgcttaggattgtcttggctttgtgggctcttttttggttccatgtcaaatttaaagtagttttttcccattctgtgaagaaagtcattggtagcttgatggggatggcattgaatctataaattaccttgggcagtatggccattttcacgatattgattcttcctatccgtgagcatggaatgttcttccatttgtgtcctctcttatttccttgagcagtggtttgcagttctccttgaagaggtccttcacatgcctaggtattttattctctttgaagcaattgtgaatgggagttcactcatgatttggctgttattggtatataggagtgcttgtgacttttgcacattaattctttatcctgagattttgctgaagtttcttatcagcttgagatttggggctgagacaatggggtcttctaaatatacaatcatgtcatctgcaaacagagacaatttcacttcctcttttcctaattgaatacccgttacttctttctcttgcctgattgccctggccagaacttccaatactgtgttgaataggagtggtgagagagggcatccctgtcttgtgccagttttcaaagggaatgcttccagtttttgcccattcgttatgacagtggctgtgcgtttatcataaatagctcttcttattttgagatacgttccatcagtacctagtttattgagagttgttagcacaaagtggtgttgaattttgccaaaggccttttctgcatctattgagataatcatgtggtttttgtcattggttctgtgtatgtgatggattatgtttattgatttgtgtatgttgaacaagccttgcatcccagggatgaagccgacttgatcgtggtggataagctttttgatgtgctgctggattcggtttgccagtactgaggattttggcatcgatgttcatcagggatattggcctggaattttcttttttgttgtgtctctgccaggttttggtatcaggatgatgctggcctcataaaatgagttaggaaggagtccctctttttgtattgtttggaatagtttcagaaggaatggtaccaactcctctttgtacctctggtagaattcatctggtcctggacttttttggttgctaggctattaattactgcctcaatttcagaacttgttattggtctatgcagagattcaacttcttcctggtttagtcttgggagggtgtacgtctccaggaatttatccatttcttctagattttctagtttatttgcatagaggtgttgatagtattctctgatggtagtttgtatttgtgtgggatcagtggtgatttcccctttgtccttttttattgtgtctgtttgagtcttctgtcttttctatctattttgttgatcttttccaaaagccagctcctggattcattgattttttgaagggtttttcgtgtgtctatctccttcagttctgtagtgttcttagttatttcttgtcttctgttagcttttgaatttgtttgctcttgttactctagttcaattgtgatgttagggtgtcgattttagatctttcctgctttctcttgtgggcatttagtgctataaatttctctctacacactgctttaaatgtgtcccagagattctggtacattgtgtctttgttctcattggcttcaaagaacatctttatttctgccttcattctgttatttacccagtagtcattcaggagcaggtggttcagcttccatgtagttgtgtggttttgagtggttttttttttaatcttgagttctaatttgattgcactgtggtctgagagaccgtttgttatgatttccattctttcttttgcatttgctgaggagtgttttacttccaattatgtggtcaatgttagaataagtgcaatgtggtgttgagaatatatattctcttgatttggggtggagagttctgtagatgtctattaggtctgcttagtccagagctgacttcaagtcctgaatgtccttgctaatattctgtgtcattgatctaatattgacagtggggtgttaaagtctcctattattattgtgtgggagtctaagtctctttgtaggtatctaagaacttgctttattttatgaatctgggtgctcctgtattggggtcacatatatttaggatagttaactcttcttcgttcattgatccctttgccattatgtaatggccttctttgtctcttttgatctttgttggtttaaagtcatcagttttatcagagactaggattgcaacccctgctctttttttttgccttccatttgcttggtagatcttcctccatccctttatgttgagcctatgtgtatctctgcgtgtgagatgggtctttactctttatccaattggccagtccgtgtcttttaattggggcatttagtccatgtacatttaaggttaatattgttatatgcaaatttgattctgtcattatgatgctggctggttattttgcccattaattatgcagcttcttcatagcgttgatggtctttacaatttggtatgtttttgcagtggctggtaccagttgttcctttccatgtttagtgcttccttcaggagctcttgtaaggcaggcctggtggtgacataatctctcagcatttgcttttctgtaaaggattttatttctcctttgcttatgaagcttaatttggctggatatgcaattctgggttgaaaattacagtattgttaaacaggtaacctttaaatgaagtcaggcagtctctcctccaaatagaaggtatttgcacacatgacctcttcttgctattgaaagcaactgtggtcagaaatgaaatccccaggacattcagaggagaataaatctgtattacctagcttctgggtctccttcctgtgctttccaaatcttttccagaaacagagggaagtaaatcatgcttccatggtaaccatccataaagtacttatggggccaaatagttttctctatttctcagtattcccacacacttggtgtcatcttcctgtttatctccatccccaaataacatcagtcaggaatctggcatgtccctgtgaaaaccaccaggcgaggtgatgagtgctcatctcacactgagatcctctctcttctcaatatgagtgaatgataaaggattgagtccctgttcacttacccagaaccttgggaacatgcacacgtgtatctaaaaaaagtttgatgaggaaataatgtgttaacagaaacaatggaggaacaagttgaaggctctttaatgagaagagaccatttaggagtaggacctcttcaaatgagaaatgagatcggtctctctaagcttggattatttctctctgctgatgagtcaggggagaaggttgatgggcaatgtattatttctgcttctataaacagaggctcccttccacttttcttgtacttctagaaacaccttaaatttccacaagggatcagaagatcagaaatgccttagtgtcttcttttcaacccagatatacttcgtgagtcagagcagttttacctaatcactctaaaaaagaaagactgctcttcaatctggcttttttttctaccttttggtttatctatgttaaagctctccacagactgttaattcctgtggtcagccagggagagctctttttcagaaaagggcatttgtttgctaatagtcgttggtatccttgagggatgctttacttcccacttaacagcacagtcatatggttcatgctatgtcccctgccatggctagaaatggtattcctctgagacatggggggcatccaggttaacagcaactaccgggtttgtgtcagatactttaaatttcaccatttgtcatttgacaacggtagaaatacgcaagcacagcagatgtgaagttattgcgacaactgcaaaagctctggtctggatgacatgcctaggtgcttgtttcaatatttattacaaagtaattagtttctgaaatttttgaaatggaatatatatgttccattttatatgttccattttggaaggaatgcagacatgatgaatggttacgaacccccactttgggtctcagaaacatttgttaatgggggaactatgtggatggctactaacgagaaccaggtttttaactgggcactgcaagagtaaataaatttaggatttcaagagtaaataaatttaggatttaaaggtatgtgagtgtggacaatatttatagcagataaaccataactaagtttctatttaaacatgttcctaactttttctaccctttttgttttcgggaaatgaaaatgattgttcttgtggtccgtatgcttgctgaatcctcctggcgtcttcctttgcggccgggtatgtggctttccttctaaaggacggccagtcccgaacagtaaggcagttccagttcactgactggccagagcaaggagtgccaaagtccggagaaggatttattgacttcatcggccaagtccataaaacaaaagaacagtttggccaagatggacccatttcagtccattgcaggtaagtttccatttgtgaataaagcagtgataagtggtggtgtttcttcattgtctgtatacactttttgtagtaagtttgcttatttgaaattttattcttggcaatgtattacaaaacttaaagcaggattgatttctctttcttttcataaagtgaaaataagtgaaaataatcagaggaaaatgtttagccccaaaaaaatgtttatcccccaaaaaatttgcttcctattagacaaaccaaattaccaattttaccttaatgggaattgttggtacctcccctagtaataattcgttgttaatcatttcatatttgcttttgctttcatagcaatgcactgataactgtctttcttctgtttgtgaaaacctcatgaatagctatcaaataaatcctaatgacaatattaagttctgccagtcaataagtgcttagtatggtacctcagttaaaaaatgcaatttgcttgaaaattgttgctatatcagaaaatgaagcaccttcaagttaattattttcaatagtttctagagcattttataactcaagtcattgaagttaatagaaataaatagcaagtaaatagttcagacattcaccataaatttagtgtttttggaagttgctatgcaaaaaccttctaacaaaagcaattcatctaattttatttaaactaatatattttagggttctggcaacttgacatctaatctttttatggtgaaactcttgagagagtttattaaaaaatatattttgcttcagcacatcaaagaaaactatagttctttacgacatagaaggcaggatctcaaaataggacaaatattagacttgggctaagatagctgtgttctaatctcaattctattatttggctctatgataatgaagtttctctggacttcagttatcttagctgaggtttaaagtcccttctagcatcctttgtttctcaggcatgttataagaagcaaacctttatctatgtacatttgctttctactttctattgagttattaaacatcctttgcaaaccaaccaaagagcttgtaggaaatgacacatggaatcaaatacaggcatacctcagagacgttatgggagtttagttccagattaccacaataaagggagtcacacatactttttggtttcccagtgcatataaaagttgtgtttactttatactatagtctatttagtgtgcaatagcattaggtctaaacaaacaacaatgtacttacaagagctggaaagatggctgaataggaatagctctggtctgctgttcccagtgagattgacacagaaggcaggggatttctgcgtttcccatttcatctcattgggactggttggacagtgggtgcagcccacaaagggtgagctaaagcagggtgtggcgttgcctcacccaggaagcacaaggggtcaggggatttccctttcctagccaagggaagccgtgagagactgtaccacgaggaacagtacactctggcccagatactgcacttctcccgcagtcttcacaactggtaaaccaggagattccctccagtgcctggcttggtgtgtcccacccccacagagcccagcaagatacgatccactcccacagagcccagcaagatacgatccactggcttgaaaatctcactgcgagtacagctgtctgaggtccacctgggccattcgagcttcgtgaggggagaggcatctgccattgctgaggctagagtaggctgtttgttttaccctcacagtgtaaacaaagccagcaggaagttcaaacagggctgagtccactgcagctcagcaaggccaactgcttctctggattactcctccctgggcagggcatctctgaaagaaagacagcagccccaatcacagacttacttacagataaaacccccatctcactgggacaaagcacctggcggaaggggcagctgtgggcacagcttcagcagacgtaaacatccccacctggcagctctgatgagcgcagcatttctcccagtgcagtgttcgagctctgataagggacagactctctcctcaagtgggtccctgacccccatgtatcctgactgggtgacacctcacagtaggggctgacagatacctcatacaggagaacactggctggcatctggcaggtgctcctctgggatgaagcttccagaggaaggaataggcagcaatctttgctgttctgaagcctctgctgataatacccaggcaaacagcgtctggaatagacctccagcaaacctacagcagagaggcctgggtgtttgttagaaggaaaataacaaacagacagacagaaaggaatagcacgtccacccagagaccccatctgaaggtcaccatcatcaaaggtcaaaggtagataaatccacgaagatggggagaaaccagcacaaaaaggctgaacattccaaaaaccagcacgcctcttctcctccaaaggatcacaactcctcgccagcaagggaacaaaacaggacagagaatgagtttgataaattgacagatgtcagcttcagaacgtgggtaataacaaactcctccgagctaagggaccatgttactaatttaatgcaaggaagctaagtacctggaaaaaaggttagaggaattgctaactagaataagcagtttagagaaaaacataaatgacctgatggagctgaaaaacacagcacaagatcttcgtgaagcatacgcaagtatcaatagccaaatcaatcaagtggaagaacggatgtccgagattgaagatcaactcaatgaaataaagcatgaagacaagattagagaaaagagtaaaaagaaatgaacaaagcctccgagaaatatgggactatatgaaaacaccaaatttactttgattggtttacctgaaagtgaaggggagaatggaaccaagttggagaaaactcttcaggatatcaggatattatccagaagaacttccccaacctagcaagacaggccaacattcaaattcaggaaatactgagaacaccactaagatattcttcgagaagagcaaccccaagacacacaatgaatcatcagattcaccaagcttgaaacgaaggaaaaaatgttaagggcagccagagacaaatgtcggcgtgcccacaaagggaagcacatcagactaacagcaggtctctcgacagcaaccctacaagccagaagacagtggggccaatattcaacattcctaaagaaaagacttttcaacccagaatttcatatccagccaaactaagcttcataagtgaaggagaaataaaatccttttcagacaagcaaatgctgagagattttgtcaccaccaggcctgccttacaagagctcctgaaggaagcactaaacatggaaaggaacaactggtaccagccactgcaaaaacacaccaaattgtaaagaccatcgatgctgggaagaaactgcatcaattaatagtcaaataaccagcaaacatcataatgacaggatcaaattcacacataaccttattaaccttaaatgtaaataggctaaatgcccccaattaaaagacacacactggccaattggataaagaggagtgaagacccatcagtgtgctgtattcaggagacccatctcacatgcaaagacacacataggctcaaaataaagggatggaggaatatttaccaagcaaatggaaagcaaaacaaagcaggggatacaatcctagtctctgataaaacggactttaaaccaacaaagaagggcattacgtacagaggtcaatgcaataagaagagctaagtatcctaaatatatatgaaccctctacaggagcatgcagattcataaagcaagttcttagagacctacaaagagacttagactcccacacaataatagtgggagactttaacaccccactgtcaatattagacagatcaatgagatagaacattagcaaggacattcaggacttgaacacagctctggaccaagcagacctaataatacacatctacagaactctccacccaaatcaacagaattatacattcttctcagcaccaaattgcacttattctaacattgaccacatattggaagtaaaacactcctcagcaaatgcaaaagaacagaaatcataacaaacagtctctcagaccacagtgcaatcaaattagaactcaagatttaaaaaaaaaaaccactcaaaaccacacaactacatggaagctgaacaacctgctcctgaatgactactgggtaaataacagaatgaaggcagaaataaagatgttctttgaagccaatgagaacaaagacacaatgtaccagaatctctgggacacatttaaagcagtgtgtagagagaaatttatagcactaaatgcccacaagagaaagcaggaaagatctaaaatcgacaccctaacatcacaattgaactagagtaacaagagcaaacaaattcaaaagctaacagaagacaagaaataactaagaacactacagaactgaaggagatagagacacgaaaaacccttcaaaaaatcaatgaatccaggagctggcttttggaaaagatcaacaaaatagatagaaaagacagaagactcaaacagacacaataaaaaaggacaaaggggaaatcaccactgatcccacacaaatacaaactaccatcagagaatactatcaacacctctatgcaaataaactagaaaatctagaagaaatggataaattcctggagacgtacaccctcccaagactaaaccaggaagaagttgaatctctgcatagaccaataacaagttctgaaattgaggcagtaattaatagcctagcaaccaaaaaaagtccaggaccagacgaattctaccagaggtacaaagaggaattggtaccattccttctgaaactattgcaaacaatacaaaaagagggactccttcctaactcattttatgaggccagcatcatcctgataccaaaacctggcagagacacaacaaaaaagaaaattccaggccaatatccctgatgaacatcgatgccaaaatcctcaataaaatactggcaaaccgaatccagcagcacatcaaaaagcttatccaccacgatcaagtcggcttcatccctgggatgcaaggcttgttcaacatacacaaatcaatgaacgtaatccatcacatacacagagccaatgacaaaaaccacatgattatctcaatagatgcagaaaaggcctttggcaaaattcatgagccctttatgctaacaactctcaaaaaactaggtactgatggaacgtatctcaaaagaagaagagctatttatgacaaacgcacagccactatcctacagaatgggcaaaaactggaagcactccctttgaaaagtagcacaagagagggatgccctctctcactgctcctattcaacacagtattggaagttctggccaaggcagtcaggcaacagaaagaaataaatgttattcaattagaaaaagtggaagtcaaattgtctctgtttgcacatgacaacattgtatatttagaaaaccccatcatctcatcccaaaatctccttaagctgataagcaacttcaggaaagtctcaggatacaaaatcaatgtgcaaaaatcacaagcattcctatacaccaataatagccaaatcacgagtgaactcccattcacaattgcttcaaaaaagataaaatacctaggagtccaacttaacaaggaatgtgaaggacctcttcaaggagaactacaaaccactgttcaatgaaacaagagaggacacaaatggaagaacattccatgctcacggataggaagaatcaatatcgtgaaaatggccatactgcccaaggtaatttatagattcaatgccatccccatcaagctaccaatgactttcttcacagaatgggaaaaaactactttaaatttgacatggaaccaaaaaagagcccacaaagccaagacaatcctaagcaaaaagaacaaggcttgagagatcatgctacctgacttcaaacaaggctacagtaaccaaaacagcatggtactggtaccaaaacagagatatagaccaatggaacagaacagaggcctcagaagtaacaccacacatctgcaaacatcttatctttgacaaacctgagggaaaacaagaatggggaaaggctcctctatttaataaatggtgttgggaaaactggctggccatatgcagaaaactgagactggatcccttccttatacaaaaattaactcaagatggattaaagacttaaacctaagatgtaaaatgatgaaaacccctagaagaaaacctaggcaataccattcaggacataggtatacacaaagacttcaggactaaaacaccaaaagcaatggcaactaaagccaaaagtggcaaatgggatctaattaaactaaagagcttctgcacagcataaaaaactaccatcagagtgaacaggcaacctacagaatgggaggaaatttttgctatctatccatctgacaaagggctaatatccagaatctacaaagaacttaaacaaatttacaggaaaacaacaacctcatcaaaaagtgggcgaaggatatgaacagacacttctcaaaagaagacactgatgcggcagacaaacatatgaaaaaatgctcactatcactggtcattagagaaatgcaaatcaaaaccacaatgagataccatcttacaccaattagaatgtcgatcattaaaaagtcaggaaacaacagatgctggggaggatgtggagaaataggaatgcttttacactgttggtgggtgtgtaaattagttaaaccagtgtggaagacagtttggtgattcctcaaggatctagaaccagaaataccatttgacccagcaatcccattactgagtgtatacccaaaggattgtaaatcattctactacaaagacacatgcacacatatgtttattgtggcactattcacaatagcaaagacttgtaagcaacccaaatgtccatcaatgatagattggataaagaaaatgcggcacatatacaccatggaatactgtgcagccataaaaaaggatgagttcatgtcctttgcagggacatggatgaagctggaaaccatcattctcagcaaactaacacaggaacagaaaatcaaacgccgcatattctcacttataagtgggagtggaatagtgagaacacgtggacgcagggaagcgaacatcacacaccagggcctgccagggggtgggggcctgggggagggatagcatcaggagatatacctaatgtagatgatgggttgatgggtgcagtaaaccaccctggtgcatttatacctatgtaacaaaccagcacttttttctcatctaccccagaacttaaagtttaaaaaaaaaaaaaaatgctaatcatcatctgagcctccggtaagttttaatctttttgctggttgagggtcttgcctctattttgatggctgctgactaatcgatgggcggtggtttctgaagggtgaggtggctgtagcaatttcttaaaagaaaataataatgaagtttgccacatcaagtgactaagtgacaaagtcaagagccttctctgcaccatgcaatgttgtttgatagcattttactcacagtagaacttctttcaaaattggagtcattcctctgcaaccctgctgcttttctattaactttgtttatgtactattctaaatcctttgttgtcatttccacagtgttcacagcatcttcatgagtatattccatcttgagaagccactttctttgctcatccgtaaggaacaactcctcatgtattcaggttttatcatgagattgcagcagttcagtcccatctcctggctccacttctagttctagttatcttgctattccaccatttttgcaatttcttcctctactgaagtcttgaacccctcaaagtcatccatgaagattggaatcaacttcttccaaactcctgttactgttgataatttgatcttctcccgtgaatcacaaatgtttttaatggcatatagaatggtgaattacttccagtaaattttcaatttactttgcccagacctatcagagaaatcactatctatctatagaatgtatagccttataaaatgtagttcttaaataacaaaactttaaagttgaaattcctccttgatccattgggctgcagaatcaatattgtgttcacaggcatgagaacattaatctccttgtacattccaccagagctcttgggtaacaaggtatgttgtcaatgagcagtattatcttgaaaagaatcttttattctaagcagtaggtctcaagagtggccttaaaatgttcagtcaaccatgctataaacggatgtcttatcatccattctttcttgttccatttatagaactgggctatttggtacaagaggtcgagctttcagcctgtcttgatgttcaacgtgccttccttactaaaacttaattttttcaagcttttgacttaaaatgagagatgtataactcttcctttcacttgagtatatttagtgtaattcttgagagccctaggattttcaaatggtaaatgagctttggcttcagcttaatgtcaccagctgcatgagcccctaacaagagagtcagcctgttctttgaagttctgaagtcaggcattgactcctcctctgtagctatcaaagtcttagatgacaacttcttccaatataatgatgtttgtctacattgaagatctcttttttaatgtagccaccttcatcaatgatcttagctagatattctggataacttgctacagcttctgtaacagcacttattgcttcaccttgcacttttatgttatggggttggcttccttccttaaacctcataagccaacctgtgctaacttcaaacttttcttctgcagcctcctcacctcccagccttcatagaattgaagagagttagggccttgctctggcctaggctttgatttaagggaatgttgtaaatgatttgatcttctatgcaggcctttaaaactttcttcatatcagcagtaaagctgttctacttccttatcattcatgtgttcactggagtagcacttttaatttccttcaggaactttgcattcacaactaggctgtttggtgcgagaggcctagctttcagcacatctgggctttaagcttaattatttctagtttgtgatttaaagttagttagatacacgcgactctccctttcacttgaacacttagaggccattgtagggttattaactggcctaatttcgatattgttgtgtctcaaggaatagggaggcctgaggagaaaaagacagatggggaaactgctggttggtgaagcagtcataacacacacatttgtcaattaagtgtttgttgtcttatggtcatggttcatggcaccccaaaccaattgcagtagtaacatcaaagatcagtgatcacagatcactttaacagatgtaatagtatgaaaaaatttgaaatattacaagaattaccaaactgctacacagagacacaaaccaagtatgtgctggtggaaaaatggcaccaatatacttgttcaatgcaagattgacacagacgttcaatttgtgaaaaacacagtatctgcaaaactccataaagtatagcacaataaaacagtgtatacccatattcagacaaagtagatggtatatattgggattgaattacctggatatttcttttatctttactcataatttgcccaaatgctaatttaaacttttctaaaataatctctaaggaaaagagtatctttaatttaatacatcttcttaactttaggcatccttatatgtataggtacataaatgtgttatgtgtgcctgttctcattgtttttgtcataaaataattttaatattcctttagtataatgctaaaggaattgcgatgcatataccttttatatatatatatatatatatatatatatatatatatatacacacacacacacacacacacacacaaagaagacttctatatatttcctcttatttaggaatgttctgaaaataccacttttcttatttataacttattaaagtaagatgataaaaccagtaaattgaaaagttgtgagtccaatgtctgttctttttttgaaaatacttagtagaaagtaacccaatgtttttgttgcattcgagctatcaaatcaaggtaagatagactctggcaaggtaagatagactctggagtacctagatcattcaacaaaaagataataaatctcagtttctcacaactaagagagactttcaaggttaaaagggaccttcaaggtcatctgcttcatcttaacagaaggtttcactgccgctagacatcttcaatcacttcttaaagactgactccgcttggattttcaaacctcacttaacatttctgtttagactgtagaaaccccatttataaagggacacactatttatatatgcctgtcagctacaccctccagtaaatgaatccatctattttctacagcccgtgcccaagtgttacacatgctgtttaattaggatccaaaaatgcagggatttttcagattattcactgtttccctcattatctgaacttcccattgctttcctccttaagtgcacaagagctatgaattaattttctttcttgctaccgtgaagattctggagttatcttaaaacaatgaagacaacagagagaaactcaaaacctttctaatgtggttttagttgctgatcatgtaaaaatggtagctaagttcagagatcaatggctcttaaccatttttttttaagattagagacccctgtgagaatctgttgaaagttctaagtctcaagaaataagaaaacaacatagtatttacttcatgtgtacgtacacttacaggatagtcataaaccctcctgaagactaagtgaaaatcacgtatataccctgttataccatctcttttctcataataaaaccagtgtaaacatttgactagttataggcaaatacatttaggttatgggcatcgcatatgtattttaagtaactgcaaaatgtgaacagtgtgatagaaaagttgaagatgccaaattcacttcaccttattctgaattatttcatactttaaaaatattaagtaggcaggttgtaaatttcagaatctccatgaatattataaacctatatgttatttaccctttcttttcatttgttatgtttccttggtctttctaaaatggtataaatccccattgaaaagaccttttattagacttactcctaattacttcatcctcattatcacatgctgttacaactcagtatcccaagagtaatcatttgatgaatgtgataccatgttttcctgaatatggctataaagagatacggagtgtggaagctggtagaagtatgtccacacccaagcaaatgtggccaagactgtgaacatctcacccagtaacatcgcctttgttattgtggcagcgcgggcgttggaagaactggagtcttcataacgctaagcattgttttggaaagaatgagatatgaaggagttgtagatatcttccagactgtcaaaatgttaagaacacaacgaccagctatggtacagacagaggtgagaaaatccattgcatttttcgcatctcaagagcctacgttttgctagcctggacctcccggactccatactctctcaacaccagacacaaaatactgtggggaaagcatcaaactgtttaataattttgaacctcattttccccctttttaaatgggatgagattattagtgtcttagtgttgctatagaaattatgtgagattatatgttagattgagctatgttaaattttactactggaccatttttgaccaataaaatggcaatttcataaaattcgttatattcatagtcctataatataaatatataaatatatagaaagcataatatttagtacataatataatctcagcccatttaacttctccattctccctctgtatgcctacagaggtatcagctcttctatatttcatgtcttaacaatggccattcaaaacattttgattctggataagcctagagatattaatattagcccctcatttcctattccaataattaatatggaaatttggatatttctcgtaataataagagtttatgatatagccagtctggtctattgagcattcatttctaaagataatattactgatagagtttatgttctgcaaaaggccaccaaattatacaacttatatgtgttcctcaattcatcatccacagtatctttcagacggatttcaaagtagtgcaagtgtttggcttgcaatagtcaaaacattatgccagcttgacaaacttaatgggtcttaggggttacagagggaaattggacatttaaaaagccttaacactcagccaagcaacttactgtgacaagataggaaagtaaacaccatttattttgcattaccaaccatttttattacagaaaaatgcacatttaagcaaaatagaaactatctgtctactttcagcccgattggccactgaaaataggtttcttttatggggaaaatccttttcctcatccctatagagagctgtaaattgtgatttttccatctctccaacaatgcttcaatttattccaatatgatagtgttcttcgttgtctgaaaaaggccatgcttcatactgcttttttttagtgtgtgcctctctaaaacagacaactagcaatcacacagaattgggctgaatttacaggtattttttgatgtgggcagccagtcctgtgaagccattttcagggatggaaagcttggaagtccagtgccctgtgtaaatggatttgtgtgcctggtgtgccgcaccagctaccttctggctgtatatgaacatcatatgtaagtgagagagacagccaaagggtagctgaaatgactgtgagtgattctcactgcaagctctactgtccaaacataattttttaaaaattcaaattctgttggcagtagttcagaagataagtaaattcagatttttctcaggacagtttgtgtctgtatcagcctctcttaaatatttaaactgagaattagttatcttgaataagcagataattgtaaaggatgattttcatcattatctgcttataaggcatgtaagaagtttatgtgttcaattggtggtaatggtttgatactacttggaaaacacttgtctgggaaggtaatgttcactcgacctgccactgcttggaattgggagatcgttttagtcaaattgattggcaaagttaatcaacaccccatgtggctttttctttgttcactataaacaattggtcattggattagaccagttgacgaaagtagtgattttgcccctatatagatgttattttgttatgcaatattgatttttatttttctattaaaatatgctcatggtcccttcttttgcttctccccattcattgtctcctgcaggatcaatatcagttttcctatcgtgccgcactagagtacctgggcagctttgaccactatgcaacgtagaaacccctgacccattctggatttttactacaggcccttcaatatccatggagtctcttctgagccatacagggcacttgagaagtccttcttaacttctagctaacaactacttagtgggactattacacacaaaacaaattaaaaacaaattattccaggtggaccaagaattcacagtttaataatctaacctgaaaaataatgaagagaatcctgactgatgaggcatctgaaggattttatttacagatacctcaaggattcaaaatcaagggaagaagaaatcacagcaaagaaccaccatcttattcaggattgcttgaaaggtgcaaggagaaattgccagaatgctgcagttcagcacaagatatgtgctggtgtggcttctcacaatgaaacggactctgctttgacatcgccccttcccaccatactgctcataataacattttagggggaaaggggagggaatgtttaaaaagaaagtccttgatttagttttttagtattgtaaagatactgctgacctgtgcttcatttctaactgtgtaaacttttttttaacaaaatgtatcattcgataaagtgaattttaaaaaagttacataactcttcatttttttatttccaaatcgtaggtttttttaagctgtagaactgttatctgtaatatcttgctgtagaaatatcaaatcatttgaaaatttgcacatttttgtgcaaaactcaatctacagtatcagtctcgtcagatatattaattttacacttcagttttgattggtgagaaagtacccattctcttcaaataatcaaagataattattattttgttttgtttttggaatcaacagggaggcgcaaagtataaagttgctgctaacatatatacatatatatccatattttataagggtgtctatgtatatatagacagtgtgtccacacaaaaaatagatacagttatcagtcagtcagttcttccatgatttagtttttttaaacgtagaaaagctattgtaaacatctctttccatttattcttaattttttgacatattggtatttctttaaagggaaatgaggaatgcacatcagtgattgattgtcaaacctcaccccctgatttcctacctaatctacccccacctaaccaatcaatcacatccacaaattgttttgtttgtttgttagtcaggcttccaacaaagttcaatatttctaacactctagtgcaataaaaattattattaaatagctaagaggtgtgcatgtgggaaaggtcagtgcatatccctttaggaggggagaatgttgtaatatatcagctatcgagttgtttaaaaaaagtgtattcaatcgtatattgtctatagtatgtgctatgaaatttgcatttatgatatgtaacaggggcaaagccaaattcatgttactctgttcagtcagaaacattttgtggcatacagcattcctgggaagtgctgtactttgtttcgttttggttttagttttgcatttagagtgccttataattgatgcctattttaatagcatttctttttagcttttggttcgtatttccattcactgttcgtatctgttactttctattaaagcattatctgtttaccacatgtacaaaaactctttgaataatatgcattcctagttttcagccaagtcggggatgttagtgattgtaccagcccaaagcacttggataatcagggcccttcttccttttataatcaatcatcaacatcagaaaaagctacttgttttatttatattcccttccaaatccgctctggaacatgcagtaactgcaccaaacttattttagtaacaaatatcattggcaactttggaatatatttgatattccattaggatttttctaaaaggggaaataaactatatatatatatgtatcttacccccaattcttccaacagaatttctataggaagccatggatgatggcataagtttgccacatattacatgattttaaataatcctcaaaatacccaaggaactcttaaagagttttggtatgagtatactactttggtttaattttagcttcatggatgttctgcatggaaggatttttgttttccacattttcccattgctagcagagtgaaatccaagagaccaaacatttgcaagcattgtatttgagcacttttgtaaaaaacaaagaaaaagaaaaaaaagaaaatatatataatactaaaaaaaagtatctagaaggctacctcagaatgagactctctaacctacatcagaaccagagaagaatgtgcactatgtgggtctgttatcattattttcttttagtttgtatctttttggagatttatccaagtgccagattactcagtgctataattttcttttagttaaacaaagggggtcagacagacattgcatcatccagacatgccttgttggacatgtagaatccgatggagcactgcacaccagaatgattggccaatgagcagcttctctccctgaaacaataactgcccatttggcaaagggaaagatgacaataatcagaagaagaaaatgaatgggatgcataccatagacgaacgaggcggagactattgcgggaatcttactgttcaggagctgttcctagaactaactcccttactgtcattgatgtgcattccactctgtgcttttctgtacaaccattcaagttttaatttcccaggtgaaccatctttatctgccattaccacaagctttcaagtttccagttattttcatcatcataaccagtacggtgctattatttacctatgtacgtgtagttatgtataattttgtaattagttacaatggtaaaaaaaatcaaaatatataaaaagtgatttgtacagaactttattttagctcttttttaaaaatgatttgcatggttagaaaacggcgaggacagccaggggagggaagggcctctagggaactttgcactttctatacctttgtactatgcactgccctattgattctacacccaataatgatattacttgaacccatctgtaagaaactgcttcggaaattcatttgtgtgtatgtaaataacacaacatagaaacaggaagggaaaaaagtctgcagtaatgcacgtattttttttctttcctgtttattttcggttttgctttaagtccttttatttttaattccctttttgtttttctttttgggttttggttccttttgggtttatgggtgccctgatactccagcagagatcagaaggctacagatccattctatccatccgttatgtggctttgccatcccagcttggagtgtctttacaaagataataacagttgtgttctttgctctcgttttggatgcatagactgaaaaattaaaacaaataacttgtaaaatggcttgttaaaaaatacaattacctctaattagtagtacgcgtaaatgttttacagaatgaaaggcgtgctttttattttcttacttcgttacattggtggcgaaagaagtctgtatgaaaatcagttctttgctgacacaagttccatttgttacaaatgaattctaataaaaatgtcagtgttatgca

SEQ ID NO: 348 - DNA, 124299 bp, Homo sapiens
cttttccgcgccgccgagtcggagctgcgccgcacgcccagcggccgcccggacccgccggccggagctgacccagtgggccacgggctccggactccagaactttccaagcgggggaaacttggcggcgggtaggtaggaaaggcaggtgaggcaggggcgagcgagagaactggctggcagcggggcggggagccgggggcgcggcgttaaggtgggcgcgtggggcgggggctccaacccgtgccgcaggtgcccacgtgccgcgcggagtccgcgggccaggcgaggtagcctggccgaggctcctgcctgcgtcctgccggggatggcggtcggtgcttgggacaccggcggccacctttgtgcggcttggggcgcgcttcccttttctccgtcgtctgcagctcttcgcttctgcgctgggcggagggcgggccgggtgacgtgggagctgaacagccgccacctagcgcccgccccgccggccactgtccccgcgcggaggcaggtcgccgcctcccgggtcctgtgctctccgaggctgggggcggggctgtctgcgcagacggcggggtgatcattgctgaaccaccccaacgggagaatctcaagtgccagcttagcccgtctcccagagactgagttaatgggaacaaagtgaccgagttgcggcggggaggtccccgcagactccgggagaaaagagacctgggccgtggcgtcaccccggattaccggcggcgcgcgggataatttcgagagcaggactcccctgatgggggcgggcaggacacgccccgccacggtgggcgtgggcactttggcgggtgcacagccgtgttgggtttgtagggcccctgctgtgtcgaggacagagatacccctggggcttcccgagtgttcatgggtctaggagcgcgggacctgttcattttattgaaaaagccaagtgaagtgacaactatggcagttattcaagggtcgtggcattgagcatctgtgtggccaccgaaagaacagaactccgatgtattcacggaataaataatgatatgacagggtttatgttttgtgcgtcgctgcctaacccgaggcgcctcccagaagcaccaggagagcttttcagaacacacctattgggcccaccccagatgtcctgaatcacgtgaggggataaagccctggcgtgagactttttgtaaaagctgccccggggatatggctggggacgcctagttaggcatcaggaaggagaagaactgggttccactcatgtgaccttaaacacattttcagcccagttttatcatctgtaaagtggccccagagaacttgtaatagaggtgaaatagggtgtatggaagtgtgtggaaaggggagaaattggaatactacaaagttccggtgcaggttgcaacaaataaattcattctttggttctgcaagtgatctttgggctgagtgagaggagtgtggcaggatacccttgccacgggaaggaaaggagggctggttttcaggtgatcaactctgtgacaacgttggtgtaaactgtaactcagaaaattgtcagcaggatgaaaagtgagccagctccagccggtggaggatggtttgaaaaaggcaccatttctgcttcctcttctcaagaaccaaaggctttagattattttcctgcaagcaaattaagagccagtaatcgccaatgtgtcctgccctatggtaaccccggtctgtctgaaggctgcatgtttttctgctaaatgtgaatttctgttccatcattcaacagacatgtgttggggatcttcatgtaccgggcattcttggaatataaagatgaataaatgctgtttttttgccctagccctctctgttaagttggggagactaatgtgaaaacaggctgcaatataacccggctacgatgataactaaggtagaaaatgaacaaagtgctgcgtggcccagagagaggggcagctccctaggtttggggggaaaagcatccaagggaggcaaaaacagggacgggtaaacagtgcccttctgtactagccacacatataattgaggattcactgtatagtcaaatctgtgtttttttttttttttttttttttttggtctgataacattctagtgtaattatgtgctgataatctaaaaatggaaatgactttgtttcatgatgtctctctctttttttttttttgtttgagacggagtctcactctgtcacccaggctggagtgcggtggcgtgatcttggttcactgcaacctctgcctcctgggttcaagtgattctcctgcctcagcctcccaagtagctgggactacaggcgcgtgcctcctcacctggctaagtttttgtatttttagtagagacagggtttcaccgtgttagccaggatggtctccatctcatgacctcgtgatctgcccgccttcatctcccatagttctgggattataggcatgagccaccgtgcccggcccatgatgtctgttttttaagtttgctaagcattctgtcatttcatcttcataaaagtctcagctatgtctaaagttaacctaataaaggggtggttaaaaaacaaaacaaacaaaaaagaaaaagctcaaaatgggtcctacattcatagtaaatataattgatacattgttttaattgcatgcactttcaagttgtaggggtttgttctcatgttaattacagaaggttggaatgacaacagaggagaagtgcacaaaaggaaaatcgtaagaggaattaaaaaaaggaataactagaagagggagattgggaggaggaaggaacttgataaaattgatggtgggaggtggggagtagaaaaggaataagtgaatcaaatctggctgccaacttcttcctcagggacttattttttcatatacattttaataaaactgtatagatttgtagttttaaagttatttcaaaatatagagggaggcagtataatgtggaagttaaacatgggctaaacaagtttgaataacttactggctggtgaccttgaacaaggtcctcaattagctgtgtctgctcattgtacaatggggatataataatatgatctacaggagacttatgaggattaacagctacgatgtttcagaggcacctggctgtgaaaaggccacattcaggagtggctgctctcttgttcttacctcactttgtttgatcctggtggaacttggtaggttgcacagatagactgtcctgttccagttgtagaaagaaattggaattggaagagactgacttgctaacgtcatatggctgatgggtaactgaagtgaaatgagaggctcccttttggaatttagtcctgcgtgtttcttctgctccatgctatggttggctctcttctggctgttgtgactctccctggagtgaaaaggaacaaaggctgtaatcatgcatgtctgttacaactcttctactcacactgtcacccagtacctttccacttccaattgtaaatttctttgaaaattacatttttctttctgaggcttataagtggaggtctccttttgggggcaggggagagaaatggtggaaaagctataaggaagtcatatatgggagagctttagaagggggaacccctctaacttccaataacatactgaaatattactagagaaatagtcagctttattgtttagcaactcaactgctttttttctgcagctggtagttctggtgtcagaaataatattttcttgcatatcctttcacataggtctgatctctgaagaggtcggggaggggaccatggatctatatggagatgagggatgtgggtcaaattttaattagaatggtaatgggtaatttggaatggaaaagtgtgaataagaatctcttcgttgaaaaataaggacacaggaaagtgtaaagaatgctttggagaatacttcccagtgttggttcatttttttcttgggaagaggcagatttaatctccatagatcaccacctttctagttttagatgcacgtggcccctactttcatgtcttccaattcagcatttttaaccttctcaatcaagtaatcaaaaaatgtataacataccagccctgtgtctaggataatattgggtgctatatgtaatacatgaaggtggaaagtcaacatttaacctggggagcaatgaggaaaccaactaggtgaaataaatataaatgctaaatgctgtgacacaggctggcccagtggctcatgcctgtaatcccagcactttgggaggccaaggtggatagattgcttgagcccaagagtttgagaccagccttggcaacatggtgaaaccccacctctattaaaaaatacaaaacttagctgggcatggtggactacgcctgtagtcccagctacttgagaggctgaggtgggagtattgcttgagtctgggaggtcgaggctgcagtgagctgtgatcacaccactgcacttcagcctgggcaacagagtaagaccctatttaaaaaaaaaaatggtgtggcacaacttcctgaaaggaagggatcagagggttctcataaaatttgagaaagcttcgtggaggagtaaggaggacttgctcttgctagatggggggaaatgacctttcagacccttggccacctggggacagtgaagtggcattagggacagagaaataaacagtaaaggtactaataaccttgaggttatctcccaaaatggacctcaaggctgatctctcaaaaaggccctaggtaccccaaaagactaaagcaggtttacttgcagggcagcctcagggatggaaaatattattaatggcaagacaaagcttaatgcagccagtgacaagactcccttaaattcacaataggtgatagatttagtgagtggctatgatgggtggtagctatttgctgaatagttttgctgaatacatttcctaaatatattaaaaatatctgggaaagttacaattagagttagggctgtgagtagtatttatcaaaatatatgtgattcttccctattattgagaagggaggttacagagcaggaggtcacagggtccccaggaaagggaattgagaggaggtatctggagaggactttgatgctttgttaacagacacaaaggcccctgaatcctgcccagttggtggaggaaccttagcaagacctgtaggtctgagtcacattgtaggcccagaggcctaggaggaaagaatggcttaaagggccaggcctggggccctgatgccctgcaccaccctgggaagctgctcctcacattccactgctccagttccagtcttggttcaaagggccccaggtagagctccggctgtggctttggggagtgcaaggtgccataagccttagcagcttcctgtgggtgcatggaatgcaggaatgaaggaggcttggcagcttccacctatatttccaatgacatatcagaaagcctgagtgtacaggcagaagcctgctgtaggggtggagaccctgaagagaaactctagtagggcaatgtagagggaaaatgtggggctggagccaccacacagagtacccccagggcactacctagtggagttgtgggaagggggccaccaccctccagaccccagaatggtagatccaccagcagcttgcactcttgcctagaaaagatgcagacactcaactccagcctgtgagagcagctgcaggggctgtaccatgcaaagctacaggggcagagcttcctaaggtcttgggggtctactccttgtacccatgtgtcctggatgcaggacatggagtcaaaaaagataatttccgagctttaagatttaataactgccctgctgggtttcagacttgcatgaaaattacccctttcttttggccaatatatccctttagaaatgggaatgtttacccagtgtctgtaccaccattgtattttggaagtaaataatttgttttgcttttataggcccaaaaatggaaggtcatgagtctcagatgagacttagggctttggacttgatgttggaatgagttaggaatttaatggactgttgagaagggatgattgcactttgtaatgtgagaaggacatgagatttggggggctggggcagaatgatgtggtttgaaaattcgtccctccaaatctcatgttgaaatgtaatcctcagtgttggatgtggggcctggtgagagatgattggatcatggggacggatccctcaggaatgcttagtgccatcttcctggtgatgagtgagctcacccaagatctggttgtttaaaaagtgtgtgatgctgtggcaactccctcaccttgctcttactctcatcatgtgacatgctgggtccctgtcaccttctgccatgagtaagagctccttgagccctcaccagaagctgagcatatgtcagcaccatgcttcttgtacagcctacagaaacataagccaattaaacctcttttctttgtaaattaaccagtctcagttattcctgtatagtgatgcaaagatggcctagcacaaatgatattttggaaatgacaccaattttagctttagtataggtgtataaatttggagtcaatcttattagagatggtcaagtattcattggctcagcctaatcttggtttgagatctggctaaagttaaaactgcaatagtaataataagttccttcagacattaatttgcatgagtccatgaacctgagggctttgggctgaaagaagagaggaagcatgtagaggtaaaaaaaaaaaaaaaaaaaatggtgaggcgtggtggtgtggaaggcatgggatggcatttgccactttctccaacaaccttttctcttcgggcacagctacttagactgggcttttagggagaggagctagagacatgagctgatgaagctaatgggtgtggcattttcagagaaagattgaagggaatgtagcatcttttatcagcttgtgggtttggaatctttcgagtacattgggaaatggcaccagtgcagggaagggtacgattctctggagcactgtatgcagtatgcagcatgccacagtggcacgggtgctggcacatgcttcctcctgccactgatgggccagcccttggccaggtatacatgtagggtgcctctggtgagaagaaaggtgatttttaatatattattcaatacagagcaacatatttataaacaacttgtttaggagaagtaaaagcattacatttctatcaagcaaggataaatagaatactgctggttattaacgatttgcaatgtgcaaagtaccatgtgccttgtctttatataggtcttctctttagtaaaagtgaatgtgtctttgcaaggaactttggcagttttttataaaactatacatactcttaaccatataatccagtgattgcactacttggtatttacccaaaggagttgaaaactgaagtctacaccaagaccagtatgaggatgttaacagcagctttattcataatttccaaaacttgaaagcaaccaatatatccttcagtaggtgaatggattaacaaactgtggttcatccagccaatgggacattatttagcactaaaaagaaatgagagtcaggcatagtggctcagcactttgggaggctgaggcaggaggattgcttgagcctgggagtttgagagcagcctgggcaacacctgggcagcataaataaaattaaaaaaaattagcttagcatggtggcacacacctgtaatcccacctacctgagaggctaatgtgggaggattacttgagcccaagaggtcatggctacagtgagtagtgattgtgccactgcactctggcctgggcagcagcgataacctgtctaaatttaaaaaaacaaaaacaaaaacaaagagctatcaagccatgaaaggacatggaggaatcttaaatgcatattactaagtgaaagaagccaacctgaaagggctacctactgtatgacattctagagaaggcagaactatggaggcaataaaaagatcagtggctgtcaagggctaggggtgaaagagggttaaatagacggagcacagaggagttttgtttagagcagtgacactactctgtatggcactatattagtagatatatgctgttataaatttgtccaaacacatagaatgtataacgtcaaggtgagcccgaatgtgaaccatggacgctgggtgataatggtgtgtcagtgtggattgaacagttggaacaaatgcgccatcctggtggggatgccggtaataggggaggctgtgcgtgtgtgggggatgggacatgtaagatgtctctttcctcctcaattttgctgtgaacataaaacagctttgaaaaataggcttttttaaaaaagcgaatgtgttaaaagatataaagcagcggttctcaaactgatcccttggaggtctagatttcttcagaggtgggggtgggatggagaaagggatgaggggaaagaaaagtgagtcatcttttaccatgttgaacttctctgtggtacttctgtcttatatgttgaacttctgatatatcattatgaaaagggtggatctgctttcaaaagtaagagcactactattttatgagcttttgaaggttaaattttagcccaaatcacagggctgtcatgtaggtggaacatgaatctctctgtgtgtgtgaatgtagtacccaaagaaagacagtggctgtgtatcgttcatggggatgaggttctttcttccaggacttgttatcgttaataatgtaaatgtagctttcactttcctaaaggcacctgtagttatgatttatatctctgacaactgtggctccagatctggagatgagcacatacatgtttcccttcactaagacccaaaactttgctaaggatgaaagtgaaggtcagggttggggcagagcagagatggaccagcacaagggccatcaatggaagagactgttgagatgagactggagggaggagaaagaatcacaggcttgagggtagttgggggtcctacgatagaggcacccagggcaacaagaagctagatttggggacaaaagcaatttaacacagataagaacctccatttaaaccataagcctcatctgtataataaaattcatcatgttaaagaatgccagtgtggttttgtataacaagcacagcaagtcatggtgggttgtggttctggtgctgcttctgttcttggctttgtgacctttgagtctgcttccttatatgtaaaatgaaagtgttgaactaagcactcggtaagctttcttctctgtcgaacacactgtgtttctgggtaagtgtgttttcatgaatatctgtggatatgaatatctgtggatatgcctctccgtgctcattagacatttctttttcaaaatatatggcactactatatgtaaagggtgtttttcaatagaaagttctatttttttgagcttcaataacacttggatggaatcctttattatgacaattcatgttgaaaaggtgctgggttaatgcattttcctcgtgttttaatttgtacatgtccaaacactgacctgtgttaagtacagaataaaatggcattaaatttctattatttatatgttgcatttcctttacaaatttaaagtttaggaaagaaataattttgctagaaatacttttgtaaggaaaatagctctagtacaccttacacatgaacacacacacacacacacacacacacacacacacacacacacacactcttttttagtttttctttttcttttatgctccgggatacatgggtacaacgtgcaggtttgttacataggtatatgtgtgccatggtttgctgcactatcaacccgtcatctaggttttaagccctgcatgcattaggtatttgtcttaatgctctccctcccctcgcctccgacccctgacaggccacagtgtgtgttgttgccctctctctgtccatgtgttcttattgttcagctcccacttacaagtgagaacgtgcagtttttggttttctgctcctgtgttagtttgctgaggataatggcttccagcttcatccatgcccctgcaagggacatgatatcattcctttttatggctgcatagtattctatggtatatatgtaccacattttctttatccagtccatcattaatggtcatttgggttggttctatgtctttgctattgtaaattgtgctgcaataaacatacgacacacacattgtttttcttgcataagtaaaaagtaagtttggaaagatgtatactaaacttaatcttggctaactctgaagaatggactgttgtaggggctggtaaactttcagtttttactttatatacttttgtattgtttgttaagtgagcatatattttataatttcatgcatgtggtatgttatagaatgagactttataattataaagcactttattggatttataggtacaattgtcatttgacataagtaagttaagacctagagttaaatagtatcatttgttagaccatatagagaaatgaatatccctttcctgatggattttgaagttgatggtgttcttcttggtatgtactttgacaggattcatgtgataattaatataatcaaagactttcctgcagcttcttaaagaggctgagcccagagatgacaaataagtttcatcatattttattgtagctgcctagaaggatgtgctgataaggatctcgaggttataactatgttcactgggcaagaataccgtgatcagtaactggcctgacatagttactagaggatgaggaagacagctgatcattttccatgtatttgccatccccgaagcctaaacttttaggtggtaagtttctttatgaaggtagtattttcctttttatccaaataagtcctgtagggacttattgtctgtactgtccatcatatttaatcaaatagtattttgcacagttattgaatagtttcatgataaatcatgttaagatggcaagcactgggaccttttgtatccctcataggtggtagcaagatgttatacttgaatgaactactcaagaattaatgactaattaggccgggtgtggtggctcacgcctgtaacaccagcaatttgggaggccatcgtggctgatcacctgaggtcaggagtttcagaccagcctggctaacatggtgaaaccctgtctccactaaaaatacaaaaattagctcggcatgatggtgcatgcctgtaatcccaggtactcaggagactgaggcaggagaattgcttgaacccgggaggcagaggttgcagtaagccaaaattgcgccactgcactccagcctgggcgacagagtgagaccatttcaaaaaaaatgattgattgattgattttggcaatgtgtggttgtagctgataaggatgacccaatatggttgagcatcagttaaaataaataatttcatccttgtttatcaaagcatttacaagtattggtgctaacctgaaaaaatatagtattgtgagtataatttttttctgtgacccccttcagtcttctcagttcatgataccaagaaagaattaaatggcttaaatgttgaaacaaggagtagttcaattttttacatttttgttctaagagggcaccaatgttgcatatatcctggatgtggagaatttaaacacattgttgatagaatttcttttcataagaactagttgttggaaaaggaaaaatacagaaaatcagtccctccacaaccccctcccccacatttttttttctttttttggtttagtagttgtggaaagagaaaagtgcttaatcagcatagtgtgaagctgccagcatattgagtccccaattatttcagactgaatttttaaaaatcaagcatttgtttgacatcctgtttgcaaccatatgaacaagatatatattcatccattcatttgtttaacaacatctattagatgtcaagcactgtttaggctctgggagtagagtgctagacaggagatagagtccctgccccatgttcattatggatgagaaaaattagatctctacaaaatgtcttgcccaaagtggtagaactggggcttgaactaagtatccacattttaaattcagtgctctattctttgtatcacactgcctcacataattctaaaggacccttattgaatatcagcaaaaatgttctatctgccttggttgattgattgattgattgattgactgattgctccttctttggtggtagtcttttccttgccatgtgctcttttccttgccatattgaatgaaggacatatatactatctgtcaggatcacttaccttcttttctgatcttaggacaaatatttatttttctgaatagcaacctaggatcatgtcattaaaaatagtatctgagtaaagtaattggagcagtatttttcaaactcttaagttttaatttggtaaaatgaaaccagtaaaaataaaaataaatctcacagtgcatcatgagtggtaaggtaaatattgttagattaaactgtaattcatgaatatatgtgatatggtttggctgtgtccccacccaaatttcatcttgaattgtaactcccacaattcccacatgtcgtgggagtaacccagtgggaggtgattaaattatgggggagggtctttcctgcactattctcatgatagtgaatgagtctcatgagatctgatggttttaaaaatgagagttcccctgcacaagctctctcttgcctgccaccattcatgtaagacatgacttgctcctcctcgttttctaccatgattgtgaggcctctccagcaatgtggaactgtaagtccattaaacctctctttcttcccagtcttatctatcatagttatgatatgtctttatcagcagcatgaaagaggactaatacaatatgtttgaacttggttgcaacatgaaatgtttttcttagtgttggtttggtaaaaacatttgaaacatattggtttaaagggcatccaataagatatcatttgtgaaaaaaacaggagtaaatgattgtccttagttgttatttgattgtatgtgtgtgcctcatgcatggtgggtgttgtttaccaaaaggattcaaagcaataaagtagaattagtgtgaggaaagtgctaggagaagctgtttggcatctaaatatatgcctgaatggatctttttccattaagcacatacatgttgcagttattggtttccctgtgtcctgcacttttgcttattgtggtttcctgtattgagtggattcattgttttctgaaatttattgtaatttaattgtgtgatatatagaaaacttagagaaagtacgtaattgaggtgatttcctagacattatctgatagtctgtaggtgtctagattttaagttgttacatattacaaactgttaaagctgatttagagttgttacatatcatgtactgacttattttaaagctgatttaagattttatttttacatttaatttataaatgtttgtcagcagattttgcctgaagatattattggtaataaaagagtaacagatacagttccctaaggtttttggctttgttttgtttttgagacagggtcttgctttgtcacctaggttggagtgtggtggcacaattgtagtttactacagcctgaaactcacagactcaagtgatcctgccacctcagcctcttgagtagctgggacaacaggcatgtgccaccacacctgatttacttaaaaaaaaatttttttttgtagaaacagggtctcactatgtttcccaggttggtctcaaactcctggcctcaagtgatcctcctgccttggcctcccaaagtgctgggattatagacatgagccactgcacctgacacagagatgtgtataaatatcatgtgcttattctttgcaaggcaggaataagatatttattccctagaataagcctataatgtaataatagagacataaacatagagaagagacagccttaaaagagtgtagaagaatctttctctcctcagacagaagaaaagagaataacatatgagcgataaaaatgctctgagaagggatttgggcaggaaagccgagcaagccctggttgctggtatcaaagaccttctggcagcattgtgttatggacatatttcacttagttgagttcagcagtcgatttcaaggggaaataaaagaacaataattagcacaggaggttgcccctagcatgtcacacagtgggtgtattgtcctggaatgagtacgttctgggcaatgtgaatctcttgttcccttaggtggtctcaatttccctcaaaactcaccagacacataaatattttgagttaaactcaaagtaagcacccttacttgctttcatgaaaaataactactctcctacttcattcaaaaagccgaggctctaaattgtgaatggcttccctcccattcaccctttcccccttctgccatttttcgcatctgcacctttcctcccctccacttctccagcttcgaaggatcttagtccagacctgtcttgtgcactgttggaccctgcttactcaatttatcctctccctcatgatcagaagctacgcagcacgaaggataaaaaccttggctttggagccaccttctaagtatgtcacacagttatcaaacctccatgtgtctcagttttttatttgaaaaatgggactagtaatagagtgacataattaggctttgtgtccccacccaaatctcatcttgaaattgtaatccccataatccctacatgtctagggagagacctggtgggaggcaattagatcatggggccagttttccccatgctgttctcatgatagtgagtgagttctcacaagatctgatggtttcataagaggctctttccccttcactcctcactcttcccctgctttcatgtgagaaggtccaagcttgcttcctctttgctttccaccatgattgtaagtttcctgatgcctccctagccgtgcagaactgtgagtcaattacatctctttcctttataaattacccatctgaggtatttctttatagcaaagtgaaaactgactaacacagttaattgataccaaggtagtggggtattgctataaagatacttaaaaatgaggaagcaactttggaactgggtaacaggcagaggttggaacagattggagggcccagaagaggacaggaagttgtgggaaagtttggaactttctagagacttgttgaatggttttgaccaaaatgcagttaatgatgtggacaatgaagtacaggctgaggtggtctcagatgaagataaggaaagtcttgggaactggagcaaaggtcacatttgctatgctttagcaaagagactggtggcattttgcccctgccctagagatctgtgcaactttgaacttgagagagattatttagggtaactggcaaaagaaatttctaagcagcaaagcattcaagaggtgacctggttgattttgaaagcattcaatcttatgcattcacaaagagatggtttgaaattggaatttggatttaaaagggaagcagagcatagaagtttggaaaatatgcatcccgaccttgtagtagaaaagaaaaacctattttcttaaggaggaattcaagccagctgcagaaatttgcatgagtaatgaggagccacatattaatagccaagatgatggggaaaacatttcagggcatgttagagaccttcttggcagcccctcccataacagacctggaggcctagtgggaagaaatggtttcatgggcctggcttacagccctgatgctgctctgtgtagcctcaggacttggcaccctgtgtcccagccatagctaaaaggggccaacatacagctcaagccattgcttcagagactgcaagctgtaagccttggaggcttccatatagtgttgggtctgagggtgcacagaagtcaagaatcaaggtttgggaacctctgcctagacttcaaaggatgtatggaaatgcctgaatgtccaggcagaagtctcctgcaggggtggagctctcatggagaacctctgctagcgtagtccaggaggaaaatgtggggttggagcccccacacagagtccccactggggcactgcctaatggagctgtgagaagagggccactgtcctccagatcccagaatgctagatccactgacagcttgcactgtgcacctggaaaagccaccaacactcaatgccagcccatgaaagcagccaagagggaggccgtaccctgcaaagccacagaggcagagctgcccaagaccgtgggagcccacttcttgcatcagcataccctgatgtgagacatggaataaaaggagattatgttggagctttaagatttaatgactgtccccttggattttggacttgcatggagcctgtagcccttttgttttgaccaatttctcccatttggaatgggagcatttatctaatgcttgtaccctcattgtatctgggaagtagctaacttggttttgattttacaggctcttaggaggaagggagttgccttgtctcagaagagactttggacttggacttttgagttaatgctgaaatgagaaggctttggggaactgttgggaagggctgattggttttgaaatgtgaggacatgagatttgggggtgtcaggggcagaatgatatggttagaatttgtgttcccacccaaatctcatcttgaattgtaatctccataatcctcacaatccccacgtgttgagggagagacctggtgtggggtgattggatcatggggatggttttccccatgctgttcttgtgatagtgagtgagttcccatgatatctgatggttttataagggaattttccctgctcttgctctcattttctcatgccacataagccatgcctcttccccttctgccatgattgtaagtttcctgaggcctcccagccatgtggaactgtgagtcagttaaacatctttactttaaaaattaccccatcttgggcagatttttatagcaatgtgagaatgcactaatagatagagcttaccttataatgttgagaggatgccgtgagttaaggtaggtaaatagttggaataatggtccgctccaagatggccaaataggaacagctgtagtctgcagctcccagtgtgatcgatgcagaagacaggtgatttctgcatttccaaccgaggtacctggttcatctcactgggactggttggacagtgggtgcagcccatggagggcaagctgaagcagggtggggtgttgcctcacccgggaagtgcaaggggttgggggatttgcctttcctagccaagggaagctgtgacagactgtacctggaaaatcgggacattgccacccaaatactgtgcttttccaatggtcttagcaaacggcacaccaggagatcatatcctgctcctggctcagcgggtcccacgcccacagagccttgttcactgctagcgcagcagtctgagatcgaactgtgaggtggcagcctggctgggggaggggtgtccgctattgctgaggcttgagtaggtaagcaaagtgtccaggaagctagaactgggtggagcccacccgcagctcaatgaggcctgcctgcctgcctctgtagactccacctttgggggcagggcatagctgaacaaaaggcagcagaaacatctgcagacttaaacgtccctgtctgacagctctgaagagagcagtggttctcccagcacagtgtttgagctttgagaacagacacactgcctcctcaagtgggtccctgacccccgtgtagcctaactgggagacacctcccagtaggggccaactaacacctcatttagccaggtgcccctctgagacgaagcttccagaggaaggatcagccaggaatatttgctcttctgcagcctctgctggtgacacccaggcaaacagggtctggagtagacctccagcaaactccagcagacctgcagctgagagacctgactgttagaaggaaaactaacaaacagaaaggaatagtatcaacattaacaaaaaggacatccacaccaaaaccccatctgtaggtcaccatcatcaaaggccaaaggtagataaaaccacaaagatggggagaaaccagagcagaaaagctgaaaattctaaaaaccagagcaccttttctcctccaaaggatcacagctccttgccagcaacagaacaaagctggacagagaatgactttgaggagttgacagaagtaggcttcagaagattggcaatatcaaacttctctgagctgaaggaggatgttcaaacccattgcaaggaagccagaaaccttgaaaaaagattagatgaatggctcactagaacaaacagtgtagagaagaacttaaatgacctgatggagctgaaaaccatggcacaagaactatgtgacgcatgcacaagcttcagtagccaattcaatcaagtggaagaaagggtatcagtgattgaagatcaaatgaatgaagtgagaagagaagtttagagaaaaaagagtaaaagaaatgaacaaagcctccaagaaatatgggactatgtgaaaagaccaaatctacgtttgattggtgtacctgaaagtgatggggagaatggaaccaagctggaaaacactcttcaggatattatccaagagaacttccccaacctagcaaggcaggccaacattcaaattcaggaaatacagagaacaccacaaagatactccttgagaagagcaaccccaagacacataactgtcagattcatcaaggttgaaatgaaggaaaaaatgttaagggcagccagagagaaaggtcgggttacccacaaagggaagcccatcagacaaacagtggatctctcgccagaaactctacaagccagaagagagcaggggccaatattcaacattctcaaagaaaagaattttcaacccagaatttcatatccagccaaactaagcttcttcataagtgaaggagaaataaaatcctttacagacaagcaaatgctgagagatttttgtcaccaccaggcctgccttacaagagctcctgaaggaagcactaaacgtggaaaggaacaaccagtaccagccactgcaaaaacatgcccaattgtaaagaccatcgatactaggaagaagctgcatcaattaacaggcaaaacaaccagctaacatcataatgacaggatcaaattcacacataacaatatttaccttaaatgtaaatgggctaaattccccaattaaaagacacagactggcaaattggataaagagtcaagacccatcagagtgctgtattcaggagacccatctcacatgcagagacacacataggctcaaaataaaggaatggaggaagatctaccaagcaaatggaaagccaaaaaaaaaaaaaaaaaagcaggggttgcaatcctagtctctgataaaacagactttaaaccaacaaagatcaaaagagacaaagaaggccattacataatggtaaagtgatcaattcaacaagaagagctaactatcctaaatatagatatgcatccaatacaggagcacccagattcataaaacaatccttagagacctaaaaagagacttagactcccacacaataatgatgggagacattaacaccgcactgtcaatattagacagattgagacagaaggttaacaaggatatccaggacttggactcagctctgcaccaagcggacctaatagacatctacagaactcttcaccacaaatcaacagaatatacattcttctcagcaccacattgcacttattccaaagttgaccagttggaagtaaaacactcctcagcaaatgtaaaaggacagaaatcacaacaaactgtctctcagaccacagcgcaatcaaattagaactcaggattaagaaactcactcaaaaccacaccactacatggaaactgaacaacctgctcctgaatgactactgggtgaataacgaaatggaagcagaaataaagatgttctttgaaaccaatgagaacaaagacacaatgtaccagaatctccgggacacgtttaaagcagtgtgtagagggaaatttatagcgctaaatgcccacaagacaaagcaggaaagatctaaaattgacaccctaacatcacagttaaaagaattagagaagcaagagcaaacaaattcaaaagctagcagaaggcaagaaataactaagatcagagcagaactgaaggagatagagacacaaaaaacccttcaaaaaaatcaatgaatccaggacctggtttttgaaaagatcgacaaaattgatagaccactagcaaggctaataaagaagaaaagagagaagaatcaaatagacacaataaaaaatgataaaggggatatcaccaatgatcccacggaaatacaaacttctatcagagaatactataaccacctctatgcaaataaactagaaaacctagaagaaatggataaattcctggacacatacaccctgccaaggctaaaccaggaagaagttgaatccctgaatagaccaataacaggccctgaaattgaggcaataattaacagcctaccaaccaaaaaaagtccaggaccagacggattcacagccaaattctaccagagttacaaagaggagctggtaccattccttctgaaacaattccaatcaatagaaaaagagggaatcctccctaactcattttatgaggccagcatcatcctgataccaaagcctagcagagacacaacaaaaaaaaagagaattttagaccaatatccctgatgaacatcgatgcgaaaatcctcaataaaatactggcaaaccaaatccagcagcacatcaaaaagcttatccaccaagatcaaattggtttcatccctgggatgcaaggctgattcaaaatatgcaaatcgataaacgtaatctatcacataaacagaaccaaagacaaaaaccatgtgattatctcaatagatgcagaaaaggccttcaacaaaattcaacagcccttcatgctaaaaactctcagtaaactaggtattgatgggacatatctcaaaataataagagctatttatgacaaacccacagccaatatcatactgaatgggcaaaaactggaagcattccctttgaatactggcacaagacagggatgccctctctcaccacttcaattcaacatagtgttggaagttctggccagggcaatcaggcaaaagaaagaaataaagggtattcaattaggaagagaagaagtcaaattgtccctgtttccagatgatatgattgtatatttagaaaaccccattgtctcagccccagatctccttcagctgataagcaacttcagcaaagtcttaggatacaaaatcaatgtggaaaaatcacaagcattcctatacaccaataacagacaaacagagagccaaatcatgagtgaactcccattcacaattgctacaaaaagaataaaatacctgggaatccaacttacaagggatgtgaaggacctcttcaaggagaactataaaccactgctcaacaaaataaaagagaacacaaacaaatggaagaacattccatgctcatgggtaggaagaatcaatatcatgaaaatggccatactgcccaaggtaatttatagattcaatgccatccgcatcaagctaccaatgactttcttcacagaattggaaaaaaccactttaaagttcatatggaaccaaaaaagagcttgcattgccaagacaatcctaagcaaaaagaacaaagctggaggcatcacgctacctgacttcaaactatactataaggctacagtaaccaaaacagcatggtactggtaccaaaacagatatataaaccagtggaacagaacagaggcctcagaaataacagcacacatctacaaccatctggtctttgacaaacctgacaaaaacaagaaatggggaaaggattccctatttaataaatggtgctgggaaaactggctagccatatggagaaagctgaaactggatcccttcctttcaccttatgcaaaaattaattcaagatggattaaagacttaaatgttagacctaaaaccataaaaaccctagaagaaaacctaggcagtacattcaggacataggatgggcaaggacttcatgactaaaacaccaaaagcaatggcaacaaaagccaaaatagacaaatgggatctaattaaacgaaagaggttctgcacagcaaaagaaactaccatcagagtgaacaggtaacctacagaatgggagaaaatttttgcaatctacccatctgacaaagggctaacatccagaatctacaaagaactcaaatttacaagaaaaaaacaaccccatcaaaaagtgggcaaaggatatgaacagatacttctcaaaagaagacatttatgcagccaacagacacatgaaaaaatgctcatcatcacttggtcatcagagaaatgcaaatcaaaaccacaatgagataccatctcacaccagttagaatggtgatcattaaaaagtcaggaacaggtgctggagacgatgcggagaaataggaatgcttttatgccattgttgggagtgtaaactagtacaaccattgtggaagacagtgtggcaattcctcaaggatctagaactagaactaccatttgacccagtgatcccattactgggtatatacccaaaggattataaatcatgctactatgaagacacatgcagatattgtatgtttattgcagcactattcacaatagcaaagacttggaaccaagccaaatgtccaacaatgatagactggattaagaaaatgtggcacatatacaccatggaatactatgcagccataaaaaaggatgagttcatgtcctttttagggacatgggtgaagctggaaaccatcattctgagcaaattgtcacagggacaaaaaaccaaacaccgcatgttctcactcataggtgggaattgcacaatgagaacacttggacacagggtggggaacatcatacactggggcctggtgtggggtgggggcatgggggagggatagcattaggagaaatacctaatgtaaatgatgagttaataggtgcagcaaaccaacatggcacatgtatacatatgtaacaaacctgcatgttgtgcatatgtaccctagaacttaaagtatatatatatatagaaagttggaatagtatctgccacaagctctcaataaatattagcttttactattcctattactatggctactactactgttaacttgctactccccattggtcttcacccctcagctcatatgtctgcaaaacatttcctgttctggaaaagaataaagccgaactgtctcttgaccacagatccctttctaactactatattctctctttttcccacctaagggttttaaagattattcaaggtgggctatctttacttcttcatctcctattactttgcttttttgttttgtttttgtttttgtttttgagacagagtctcagtctgtcacctgagctggagtgcagtggtctgatctcagctcactgcatgcaacctccacctcccaggttcaagcaattctcctgtctcagcctcccaagtagctgggattacaggcatgtgctaccacacaaatttttttgtatttttagtggagacaggttttgccatgttggccagactggtctcgaactcctggcctcaagtgatctgactgccttggcctcccaaagtgctgggattacaggtgtgagccactgtgcctggctacctcctagtagcttttatttttttttagacattgttttctttatttttatatttctttattttttgagactgagtctccctctgtcacccaggctagagtgtagtggtgtgatcttggctcaccacaacctctgcctctcaggttcaaatgatttgcctgcctcagcctcctgagtagctgggattacaagcatgtgccaccatgcccagctaatttttgtttttttaatagagccaggatttcactatgttgcccaggctagtcttgaactcccgggtttaagcgatccacccgcctcagcctcccaaagtgctgggattacaggtgtgagccaccgtgcctggcctagaccttgttttaagtaagatattaactagctaaaacattactaaaatattttctattttgagtgctttgattatgtatttagtacttaccatgaactttggagttccctgtaggtccctccctaagcccttccttctttttttctcattaaatgttatcactgtgcagtatttttatattaatcattttctaaccttgttcatcattttccctgacatttgtatatgtttagttttgcttgttgttgaatgttgtacatggaattatatgatataaattatctggaggcttgccttttgaacctaactataatttcatccatttttattggcataaggatgccattatgtgccacaatgtattaattttcttgttgatagaccttttggccttttgctactacaaagagatttgctgtgaacattcttgcagatatatcttggtgtacatatgcataaatatgtctaggatttatacccaggaatggaatttctgtagcatttagtatatacccctttgtattcactgactattacaaattattgatcaaagtggttgtgctatttaatacccctatcagaagtgtaaatctctccttgtcaaccttttcatttttggggtgtaaaatggcatgtgatattttatttgattttatttttgagacacagtctcactctgtcacccaggctgaagtgaagtggcacaatcttggctcactgcaacctccacctcccaggttcaagcaattctcgtgtctcagcctcttgagtagctgggattacaagcatgtgccaacatgcccagctaatttttgtatttttttgtagagatggggttttgccatgttggccagactggtttcaaactttgggcctctaatgatccacccacttctgcctcccaaagtgttgagattacaggtgtgagccactgcatctggccagcatgtgatattttaaaatttcattatctgatgactaatgaagtcaaccatcttttcattggtttctgagccatttctgtttattcttcagtaaaacacctgtttatatgccttgcccatttttcttttggattgtctcttccttatttatttgtaatcactttttataattctggaatagcaaacctatctcccaaatttgtggcttgtgtttttactttatgtctttcccctatccctgagctacttctgatatttattttctatattactggctctcagcaatttttatgatgtgtctcttggcatggttttcttttctttttgtaaaaaacaacttactgagatatagttcacatatcatacaattcacccatttaaaatggcttttagtatattcatagagttgtgcattttccactataatcaagtttatgactttttcatttagtcatcatccccactcctttcatcacttttagccctaggcagtcactaatctactttctgtctctctagatttggctactctgggcatttcatataaatgggatcatataatatgtggttctttgtgattgatttcttcacacagtataatgttttcaaaggccacccatgttgtagcatgtatcagtacttcatttatttttatttccaaatatatttctttgtttggacatgtcattttatttatccattcattgaaaaaaaactattctttccccattgaattgtcttggcatccttgtcagaaatctactgggtacagacatatgggtttatttatgggtgcttgattctattcattaatctatagctagccttaatgccagtacctcattgtcttgattactgtagctttgtagtaagttttgaaattagggaggatggccccttaactttgttctactctttcaagattttttggtaattctggttcccttgaattttcatatgaattttaggaacagcttgtcagtttctacaatgaaattaaccaaaatcttgatagggcaaccttatgtagtgaagaagcctcacaagttcaaacaaacaaacaataagtagataagtttcagtcgtattaccgtcttaacacatgtagctttattttttgtgctttggagtttattaagattcatagatctgcaggcttatcgctttcatcagatgtgtagcattttcagccattattttgtcaaatgctattactatcctccatctgagactccaactactatctgttagacaacttgatattgttcccacagatctcagagactttgctcatttttttcaattatttttctctttgcataggtgggagttagttcattttagtattaccatttattggcgacaagcgctaacttttcttacattctaaggggggaaattgtagcctgaacaatgaatcaaagcagtactaagtctcaagagtacgtgcttttcattgcagaaccttactgtgtacatttctatgtacaatagcacaacatcaaaagcagtagtttgggtttgggtttttttgtgaaagtgactattttgtaaacaaagacagtaaatatctaagaaaatatagaaataaaaaacatagttcataatgttgatatgcattgtattccttaaaagaaatgaaactgtcaccatcatgatcatttttctttaaaatatcttctaaaactgctttgtttttgttttttttagaaatggagtcttgctctgtcacccaggctcgagtgcagtggcacaatcatatgatagctcactgcagtctcgaacttctgggcaaaagcaatcctcccatctcagcctcctaagtagctgggactacaggtgcacactgtcacacccagctattttttttttttttttttttttttggtagagatggggcttcaccgtgttgtccaggctggtctggaattcctggggtcaagttattgtcccacgttggcctcccaaaatattgggattacagatgtgagccactgtgcctggcctaaaactgcattctgatatgacttgtcacatggcttctcatctttttaaaacttctcttttaggtagtgattagctctgttttagagagttgtctgtcatggtgtctttctgtttaaatggttcagtggtcctctggtcacagcataaaattcagtctcaaaaatcagtgttgtatcaggtggactcttgcctttacatgtatacttaattaaagcactaaaatatcacatgcttttagagacacgcaggcgtgctctgtgacaagaggcaagcagactgtgcgaaggaaagatttaagatactacctttagttttcctttccatgtgcaaatgaaggtggtgtaatcactttctgcctctctccagggcatataattcatcacagcaatgtctggtccttttatgatttgtccaacaccaagaacaaaccattaggggatggccttcattttatgccagagtatttcaaacctgtttagtcaaatagtgtcataatgggcatttagcaggtctgccttcttgcttgtcttagagcagttttctggaagttgcacaatttctgttctgtagtttcactttttccattctttcctctttctttcgtccctgagtagtgaagaagcctcacaagttaaaacaaacaaaacaaaaagctattctgaataagaaacacatgttcctagagttggcccctagatgtctaccacgctctttccagcatgtcacttgcacccggtagcagccccaggactggagtcctgtcacgcggcagtaattgtcctgtcacaaagtgctgagggtgtggagttgtgtagcgggtccccttgtctgggcaggctcggctgtggaatttttgcccatttggtgtggagcatgtgcccctttggtactgggcatgtgggctggctgtcttcagtcactaagactgaagcattgcacacttgcaccacttctctgcacaaagtctgtgtatttcacagctgatttcctcaggattgtgttataaggcttgtgtttcctaaaatgaaactggcaaagatgaaatagcctaaatggactgttcttagagtcagaggaagtggttgtcatttctgggcataaaagacttctcctcaggcccctaagcattagtgagcattggaaggagtcattctggaggcagagcataaaagtcggcttgtagctgccctctgggtccacctggggtgtccttgaagcactttcttggggttggagtcctgcattgagggtttccaggctaagccacacgtaatcagatggccatccaggcacaataaaacccagaaatgcccctgctcctccacctccttaaagaagtttctcaccagcccactccagtgatccctgaactgcgtttctttgccccaccaggtggctacccttgatttgagggcctctagtagtgccagaaatgttcttgacattgtcatttttctcatcaaccatatgagatcagtaatgatctacattacacatattaaaaaaatgaggtatcatatctagaggcaaaaagaagaaaaaacaagaaaatgaggtaatttgagtattgggcattttgttctagtctcaccactcatagcaacagggatttgacacaaagcctcttgccccctgtgatggttaatattgaatgtcaacttgattagattgaaggatgcaaagcattgttcctgggcatctctgtcagagtgttgccaaagacgattaacatttgagtcagtggactgggtgaggagacccaccctcagtctggttgggcaccatctaatcagctgccagcacggctagaataaagcaggcaggagaagatgggagggcagatttgctgagtcttccggccttcatctttctcccgtgctagatgcttgctgcccttgaacattagactccaagtacttcagcttttggactcttggacttacaccagtggttttccatgggctctcgggcctttggccatagactgaaggctgcactgtgagcttccctatctttgagtttttggtgcttggattgatctaccactggcttccttgctcctcagcttgcaggaggcctattgtatgacttcaccttgtgattgtgtgagtcaattctccttaataaactccctctcatatatacatctatcctattagttatgtgtctctagataaccctaatatacccccaaccccctgaaacattttagtatgaaaaactttgaaatgtacaggaaagttgaattttacagtgaatgcccttatacccaccactagattctatcattaacatttaactgttctcaatgtattacatacccatccatcaatttaccttatttccaagttaatactcaaagatttttgtccaaacctgaaagccttcagctgtagtcctagatcaggctctgggaggagtattagtctactcagtgatgttaaacaaagctgatgctttgttcctggttcatctactttgcttaaagcttgcaaaactccacaaatctgaaaattactgtcagctatgtaagatgacagtcccctccaaggaagattttttttttcaatcttaaaagctagggggaaaacctgatttttagaataaaataaactccaaagttaagttccatgtttgatattgtagatgaaattttggctgtccaaggttcattattgcataatgacaatttgtcggggcctcccacttttctttgctggaggactgaattagctgcacacttcctttctggcagatgatttattgaaccccctgaatgagaggaggatacaaaggaaacaaataagtgttttattttcttgaagagaaacaaacactaaaaggacttgaggcttacttagttaacaggaaaactggagaggcttaagtcactgcccttgggatgagtgtgcagtgagccccgtcttccagtcagcctgggggctgtgtgcccagcagcctgagtcagcaatctggggcctagaggcttcagtccagagggtgtggtgtggttggggggttgtcagcctgggccttggcagctagagaaagatggaagagccctggaatgaggcaccccaggagggaggctggggttcgctaagctggggcaccccctcctccaacaacgtggttttacatgtaaacacaggtcattcttttcagccctgcatggagatgtaattaacagtataaaagactccaggaaaattgaagtctgcagttttatatgtactacatggagaccatgtctgtagtgtagtaaaagcatccatgtgtttttgattttgcatagtgtatctttcatctctagcaattctatttgggttcttctacattcttgagtgtttggagcacatttataatagctgcttttatgttcaagtctcattacctcagacttagaaaagaccatttcttttgacagatttttttctctagttatgggtcatatcttcctgcttttttgcatgcctgataattttttgatgtgaaggtagaccttgtgattttacattgttttatgctggattttgttttattcctttaaatagtgttggactttgttctggcatgtagttaagttacctgatcagttctaaacttggacatctctttagctaaatatcccagtccactgtttacacttctggctttccacataactacaggacacatttcactaagctttctactagtatataacaaagatcatccttactgcagtttctagtaatgtgttcctcatttccttctgaactctcactggtaccacctttcctgtctgtatttcagtttgctgaagacaatctaggtttttccatcatgtttctcagaattcttccagcttctacccactccccaattccaaggctttccacatttttagatatttgttacaacagcacaccacttccaggcagcaaagttcatattagttttctattgctgccctgacaaattactacaaacttagtggcttaaacctggtatttattatgccctaggtctgtaggtaaaaagtccaagctgaccctgcagtagctctgacatcgtctctcaccattctttgtatattccaggctttagcaattacaggcagtagtcctcatgtcactcacatatctgcgcacttcttgtggtatgacctttacctagcatgctcttcccattttgtttatttgctgatgtcctgttttctaaaattcatctaatgaataatttcttctagaaacttgggctctactactgagttcagctaagtgacctaaatctgtgtgtccataatagcatgtggtccttcatcatcacttatcatgccatatagaattatctatcacatgtctattgccccgatatagtgtccctcttaatctcttacctctcagggtttacttagtaattgcctggaacatagtagcaaccaaagaatgcttagaattgaactaggtaggctgggcatggtggttcatgcctgtaatcccagcacactggatcacttgaggtcaggagtttgaccagcctggccaacatggtgaaaccctgtctctactaaaaatacaaaaattagccaggcgtgttggcatacgcctgtaatcccagctacttggaaggctgaagcaggagaattgctagagcccaggaggcggacgttgcagtgagccgagactgtgccatttgactccagcctgagtgacaaaccaagactccgtctcaaaaaacaaacaaacaaaaccccaaaaacacaaccaaaactgaactaggaggtagaagaaattatgacactattttaccacttagaacttaaaatttctgccaagaagctaaaaattagaaggcagataaaaactggcttaaaaattgcaataagtagctgggcatggtggttcacacctgaaatcccagcactttgtggggctgaggtgggaggatcacttgagcccaggactttgagaccagcctgggcaacatagtgaaacctcatctccaccaaaaaaaaaaaaaaaaaaagccaggtgtggtggcacatgcctggagtctcagctactcaggaggctggggcaggaggatcgcttgagcccaggaagttgaggctgcagtgagctgtgattgtgtcactgcactccagcctgggcaacagagagatagatactctgtctcaaaaaaaaaaaaatgcaataagttatagggagaaacttgatataccatatattttataaaaaccattgtgcccaaataggtaaaggggaaaaggtcatcatgactatgaaagaaatcatagatgacacaaagaaatggaaacacatcccatgctcatgcataggtagaattaatattgtgaaattgatcatactaccaaaagcagtctacaaattcaatataattcctgtcaaaataccaccatcattcttcacagaactagaaaaaacaatcctaaaattcatatggaaccaaaaaagagcctgcatagccaaagcgagactaagcaaaaagaacaaatctggagacatcacattacccaacgtcaaactgtactctaaggccatagtcaccaaaacagcatggtactggtataaaaataggtacatagaccaatggaaaagactagagaacccagaaataaagccaaatacttacagtcaactgatcattgacaaagcaaacaaaaacataaagtggggaaaggacaccctattcaacaaatggtgctgggataatttgcaagccacatgtatgagaatgaaattggatcctcatctctcttcttatacaaagatcaactcaagatggatcaaagacttaaatctaagacctgaaactgtaaaagttctagaagataacatcagaaaaatccttctagaccttggcttagacaaagacttcatgaccaagaatccaagagcaaaagcaacaaaaacaaatataaatagatgggacttaattaaactaaaaagcttccacatagcaaaagaaacaattagcagagttgacagacaacccacagagtgggagaaaattttcacaacctatatatctgacaaagaaaaatatccagaatctacaaagaactcaaacaaatcagcaagaataaaacaaacaattccatcaaaaagcgggctaaggatatccatagacaattctcaaaagaagatatacaaatggccaacaagcatatggaaaaatgctcaacatcactatcagggaaatgcaaatcaaaaccacaatgcgatatcacctcatttctgcaagaatggccataataaaaaaaaatacagatgttggtgtggatgcggtggaaagggaacacatatattgttggcgggaatgtaaactagtgcaaccactttggaaaacactgtggagattccttaaagaactaaaagtagatctaccatttgaactaaaagtagatctaccatttgatccgcaattccactactgggtatctacccagaggaaaagaagtcattatacgataaagatacttgcacactcatgtttatagcagcacaattgcaaaaatatggaaccagcccaaatgcccatcagtcaacaagtggataaagcaaatgtggtgtatgtataccatggactgctactcagccataaaaaggaatgaagtaatggcattcacagcaacctggatggaattggagactatgattctaagtgaagtaactcaggaatggaaaaccaaacatcgtatgttctcacttatatgtggaagctaagctatgaggacagaaaggcttaagaatgatacattggactttggggacttgggggaaaaggttgggaggtggtgagggataaaagactacacattgggtaaagtgtacactgctcaggtgatgggtgcaccaaaatctcagaaatcaccactaaagaatttattcatgcaaccaaacaccacctgctccccaaaaacctattgaaataaaaaaattttaaaaagctgtaccttattccattatatgaacttatatccattgtattaaaatttacatcttctttttttttttttttttttttttttttttgagacggagtctcgctctgtcacccaggctggagtgcagtggcgcaatctcggctcactgcaagctccgcctcccaggttcacgccattctcctgcctcagcttcccaaatagctgggactacaggcgcctgccaccacgcccggctaatttttttgtattttttagtggagacagggtttcaccgtgttaaccaggatggtctcgatctcctgacctcatgatcctcccgcctcggcctcccaaagtgctgggattacaggcgtgagccaccgcgcccagtcaaaatttatgtcttctattattgaacttttgctattagaaatatagctttattgcctaaccttgttcttccatcatattgaacatgttagtttatctacaggacatattcttaaaagtggaaatgtgagatcaaacagtgcacgtgtttatactttttatagattttaccttccataaggttgtaccagtttctactcccatcagcaatatgtgagcaatatgtgaggcaacttccataaggttgccttccataaggctgtaccagtttctactccgatcagcaatatgtgagagatgagagtgcctttctccaaatgcttgacagcatagtatgtgttaagatttttgaatcattgccaatctgataagtggaaaatctcagcatagttttaatttgcatttctcttatgatgaggagtatcttttaatagacttaagagctagctctctattcttcacgaaatgagctgtgtcttttcctattctttgttcattattctattgagttaatcttttccttacttatctgtagaagctttctctatattaaggaaattagccctttattgtgaatcacagttacccctgctcccaccccatcaggttgttgttgtcttttgactttgtttatggtatgtcttatcatacagagaatctgattttgttacatggttgaatttattaatttttttgtggctgttggggtttgtgcaaacttggaaatgccttccttaccacaggagatgatttaaaatatgttgaaagatttatatgtaaagatgttcattccattctttataaattaaaaaagataatatagaagttcaacaactgaagaatggtgctttacttgtgatatagctacataatagattattatgcaactcgtataaataatatctacaggaagttcctcaaaacatatagtaataaaatgtttacaaatgaaggtcatgggattatgtttgttcaagttgagaccagaatcaatactgtaattattccagatcatctcaattacataaaaaatgagaaaaaatggaaggcagattaattactgtaatttggaagtgatattattttatttaaaatgtttctatggtctctgaaaacttctaaaacaagcatgtatttttataataagaaaaaaatacagcatcatggatgatattgtagtcccagcacgtagataacaagcatttgctttggatccacttgctttgagtatttgacattctctacaccctcagcagccaaaagtagagcaaagaaaactgatcattgttttgtcctgaatagagctagtttatccagattttcttcttttatagacggatatcaggattgcagggaatgtactcttttatgtatttcactgggagaaggtgcagctcactttacagccataccctaaaattagcacttaacagtaaatctttatttctccttttaaaattattagtgatttgactttcttttaaaattaggcccctttccctgctcccctcccaccacatcttcatcacacttgacagagtcttttttcctcatcagctttactgagttacagtttacacacagtaaaatgcaaccagtctcaatgcacagcttgaattttgacaaatgtgtttacccttggagctgtgactacaattaagatagaacattttcataggagactacagagaactgacttaaaatatataatttaaaagatataatgtgttttatactaatatactttggaacacttacaagagtaatagttaattttagacagagtattctaaaggaataaatgtttgaaaagttaatggcttatataataactgcatacagttaaataattaacctcacaaaggaagcctgctttggttatagcataaaattatagtaagagtgataaagaaccatatgagccattatttaaattgtttgaggtgctgagacttcaaagggacaatcctgtgcatttttggagttttgaattctttatatttccttgttctctctcttttcaaaaacaaatgctgccaggcatctgtttattctcatatcaaaatgaaagacactctgagaaaattggggagcatcagcaaaatcctttctttaggaccttatatgtgagtctgtgcacatatttgcaagactggagaaatggagattattagaatggatatataatagtaagtttagcaaatatgattaacatttccctgacagagcgaagtgtttcccactaaagagacttttaaatatataacctcatttcaaaacaagaacacttaaaggagctttcatctgttggagcaagaggttatatttgtgtaaatcaaagcactgtacagtcttagaatttgactgtggtgcttttataggttcttttccatgggtgcagttggtgctggaggatggtgggaggtggaggttagtgttgttatattggctgtttttgttctactccctcactcttgagtggtatctgcattctcctatttctcctattaactgcttctctatttcttcctactagtttgtcctgttttctcttcttccctagctgtttctcatgggattgtagaagaaacaaaaagatcctcacctgcagttttgcttcttattctgaatacttacagatttcacttcttaaagacattgtacttcagatcaaataactttctttctttctttctttctttctttctttctttctttctttctttctttctttctttcgttcgttctttgagttggggtctttctctgtcacccaagctggagtgcagtggcatgatcatggctctccacagcctcaaactcgtgggctcaggtgatcctcccacctcagcctcctgagtagctgggatcacagatgcatgccaccgcggctgactaatttttttaattttgtttttgtagagtcggggggtggggtcttacttttttacccacactggtcttgaactcctggactcaagtgatcctcctgcctcggccttccaaagtgctgtgattacaggtgtaagccactgcacctggccaaaataatgctaatactaggttttattgatgagcttaatttgcactgagaagtctaagcaaactgatccaacctgaaattgaaaagctaccattttttgtctttagaaagaaatgttcctatctgctttgccagtagttacagtggtttgcagggcatccaaaggattaagcactaacagatcttgagcagtactgtgttcttgtgaatgtaatctagagattgaaaatacatatttattctaacttgaaacaataagcaaagaaatttggacaagtcgggcttgggtatagatgaattattggaaaacatgggtttctataagaatataccatcagaaattttttaggctatttgtacagaagatttatgtggcagttgaaccacaggtctctaaatttcatagccagggatgactatcttaactagacagctgctataaattctttctggagatatggtggaataaattataaatgaataagtgtaaatatgccatgatacttcttaggctaagattttgtgagttggttaatgcagtactattttttagtataaaccatagaaaacagttctattttgctattgttaaagcaaaatcttttctctaagatttactcaccttttttcctctgctaaaccgaagctccttgaggccagggacataatttattatggtagatttcaaactcttttggctttaaatctgtattaagaattgcattttatatcataatccaggacacacacacatacacgaaacaacctaatcttttattatataagttggattctaatactttttattctttcatttcagtaggaataaatgcttattgaatatatgaatgaatgggttgggaaagtaataaggagctgggataaactggagaaattctttagaggtagattttgtccattattagttgttacttagtattcgtgttatatatgtggcagtattcccagactgactgaatccaaatctcttcaggtagaacttgggcaagtaggtgttatttattcatttatttatttgagatggagtcttgctctgtcacccaggctggagtgcaatggtatgatctcggctcactgcaacctccacctcccgggttcaagcgattctcctgcctcagcctcctgagtagctgggattacaggtgcgtgccaccacacccagctaattttttttgtatttttagtagagacaaggtttcaccatattggccaggctggtctctaactcctgacttcaagttatctacccgcctcagcctcccaaagtgctaggattacaggtgtgagccactgtgcccgtccagtaggtgttttttaaaaatatagtttttactttagaatagtttcagatttacaaaaaagttgcaaaggcagtacagagagtttctagatacctagcacccagtttccccgagcattaacatcttacatttctatggtacatttgtcacaattaatgaaccaatagtgatacatattattattaagtaaacctcatactttggatggattccagtcattttcccctaagtcctttttctattccaggattcctcattacatttagtcacaaagtctccttagggacttcttggctgtgacagtctctcacattttccttttttcttttgatgacccttatagttttcaagagtggtgatcaaatattttgtagaaagtccctcaatttgggtgtgtttaatgttttttcttatggttagactggggtttgagggaagactacaaaagtaaaggaaaagggtacagctgtgactatgacttgtcgctgttgacgttgaccttgatcacctggctgaggtgatgtttgtctggtttctccatggcaaagtcacccctcccccctctataatgtacactttggaaggagggctgtacatgcagcctatgcttaaggaatggggagttatgcctcatctcctggagagtggagtgtctacataaatttgaaattcccctgcacaggatttgtctcttcctcctcatttatttacttattcattcaattatttgtatcagtatgggatcatactgatatacatggatatttattttatactttgggctataattcaatactacatgaattatttggttgctcagatggtttcagttttggtcactaggaactctttcaggttggctcgtgtccctttgacataccaccattattgtttttatttttgagcacttccttactttctggtattcaggatgctcaagtgtattagtctgttctcatgctgctaataaagacatacctaagactacttaatttataaaggaaagagatttaattgactcacagttccacatggctaaggaggcctcacaataatggcagaagtgcatggaacgtcttacatggcggcaggcaagagagcttgtacagagaactcccatttataaaaccatcagatctcatgagacttattcactaccacaagaacagtatgggggaaactgcccccatgactcaatgatctccacctgtccctgctcttgacacatggggattattacaattcaaggtgagattttggtggggacacagccaaaccatatcatcaaggtacatcttgtatattccctgcccacccctcacatgaatgctttctccaaggggcatggttccttttattggagaataatattagacatgaaaatctgaccaggtgtgttcaccatcagcagagtgtcactgcatgtaggccttctcagtagacagagctaggaaatatataggtggatgctaacctgtgcatacacacatagctacaattatttatatatccacatgtatctttctaaagctggtcaggtgcagtggctgaggcctgtaatctcagcactttgggagggtgaggcgggccaattgcttgaggccaggggttcaagaccagtctggtcaacatggtgaaaccccgtgtctactaaaaatacaaaaattagccaggcatggttgtgcgtgcctgtaatcccagctactctggaggctgaggcacaacaatcacttgagcctgggaggcggaggttgcagtaagccaagattgcaccactgcactccagtctgggcaacagaacaagactctgtctcaaaaaaaaaaaaaaaaaaaaaaaaaagctaaatatgagttcataatgatgtccaactctaatccagtcctatgtggcttattctagctttcccctcttgcttatctgtaatttccctaacagagaaacctagctcccaccacctaccatctaattacttacttggccattcccattgtgcatggactgtggttttggaattgttaatttgtacccccacgggaaacaactttatcaattagagtgtggtgcttatttttcgtgcagttcctttttgtctttatgcatttccaaagttacttagatcagcacctttttttccccagccccccttcaatgagtttatgccgtacattagtattacagtgagattcttttgtcgctgtctgcattccatcctgggatttgcatatggtaaggtttaccctttgtgctataaaattctgtaggttttgtcaaatgcatattgttatgtatccaccactatgttatcatacacaatagcttcactatcctaaaaaaaaatccccaaatcctctgtgttcacccagtcaatctacttccttccacaaactcctggtgagtttgatttgtttttcatgtttatagtgttctctttttcaaaatattatgtgaatggaatcatacagtatgtagtcttttcaaacttgctcctttttcttagcagtatgcattaagtttcttccatggtgttgcatgaattaatagctcattcctttagattgctgaataatattccacattatggatatatcatagtttgtccattcatctattgagggacattgtggttgctcccagtttttggcaattatgagtaaagctgctataaatattcatgtgcaggtttttgtatggatatgttttcaaatcaattgggtaaataccaaggagtgtgattgctgggtagtatgggaagtctgtgtgtattagtctgttctcatgctgcaataaagacatacctgagactgcataatttataaaggaaagaggtttaattgactcacagttccacatggctggggaggcctcacaatcatggtggaagagcaagagacatcttacatggtggcaggcaagagagcttgtgcaagggaactccctttcataaaaccatcagatctggtgaaacttattcactattgtgagaacagcatgggaaagacctgtccccatgattcaattaccagcaccagatccctcccacaacacatgggaattatgggagctacaattcaagatgagatttgggtagggaaatagccaaaccatatcactatgtttagctttgtaataaattgccaaactgtcttccaaagtggctgtaccattttgcattcccatcaccaatgatggattgttgctctgcatccttgttaacattttgtattgtcaacttttaaaaacaaatttagccattctagtaagtatgtactagtatcttgttttaatttggattttcctaaagacaaatgatgctgaacatcttttcatatgcttacatgccatctacatatctcctctggtgagctgtctgttcagatctttgcccatcttttaattaggttgattgtttttattggttagttttaagtgttctttgtatatttaatataagttatttctcagatatgtgatttgcaaataattctaccaatctgtggtttgtctttggaatgttggtttttaaaaaattcttttggtgattctcagcctctggttcaaagccctgcaactgcctgaggtaggagagttggatcacctcttttgaagctatcttctcctctccttttttatttctttctagtcagcctttctgggttgcctcatctataaaataggaatattaagttacttcccagagagccagtatctttcagttttcagttctatgattccatgactacctgaccatttgaaacctttctggaatgctaccaatgtatagttagatctccttacctttctaattgctttcacaaaggaaaagaactgtatggtccataatgacagtctttaatttctttgtggaatttcattactcccactgcctaaaagctcaactgtaatgatggccttccagaatgaaataaatctgtcagtgactttaaaatcacaataggagaaaaatcaaatggatatcagaaatgacctccatgtttaccatgtgttacaaacttttgcacatttgtaggtaggtgaggaaactatttggcatgtagaatttctctacatccttcctccatgtagttattccatcattaaaaagcaggtctcatttctataaaagttgtttttctccgtgcaaaaatgtcccctaaagggcagaacaggaaagctgccacataatattagaaaggttcacaaagtgtacaataccttaaagattatctacagatggaataattttgaaaaagatgttaatgttagcccaataacacaaaaatacagtaataattgctaaaatttcctgatgaaatagaacttgtagagactcttatcctactctacaatgttatcaaataaatccagcatgtgaagtcctttttcagcttcagcaagtataatatgttatgaacttgctcaaaccgcataggtttgacctcttacccgtttagttctgtttctgtgctctacattatgcccagttgtcatgtctcaatgattttgtgggaggagcatagtacaggctatggaatcataaagagagttttaactttattatttactggctggaagatttttggcacattccctaacctccctaaacactgtgtcctcatgtgtaccatgtatgtcttaaccagctcatatatacatatatttgttatatatatgtattttatatctatagttttatattaaatatatttatattataaattatataaattatactatatattttatattatagtaattatattttatatatattatattatatataatataatatataaatatatatagttatatgtttgttttatatatatagatatataaaacaaatatatagagtgggtggtggccgggtgcagtggctcatacctgtaatcccagcacctcaggaggcttaggcaggaggatcacttgaactcaggagtttgaattcagcctgggcaacatagtaagtccttgtctctaaaataaataaatgaataaaattaacattaaaaacaaacaaagggccgggcgtggtggctcatgcctgtaatcccagcactttggaaggccgaggtgggtggatacaaggtcaggagttcgagaccagcctggccaacatggtgaaactccaaccctactaaagatacaaaaaattaactgggtgtggtgacccgcacctgtaatcccagcttctcgggaggctgaggcaggagacttgcttgaacctgagaggcggaggttgcagtgagccgagattgcaccattgcactccagcctgggtaacagggcgagcgactccgtctaaacaaacaaacaaacaaacaaacaaacaaggaagtgtccatagagtaggtggctaaaacaacatgaatttatttcccacagtctgggagctgggaagtgcaagattagggtgctgtcagattcagtgtgtggtgagggctctctttctagttcgtggacagcggtcttcttgcttcctcacagagtggagagagggagagaaggaggaagtgagctctctggtgtaagggtactaatcccatcatgagggctctatcttcatgacctaattacctcccaaagaccccatcttcaaatacaatcacattggggattatgatttcaatatactaatttgcagggggacacaaatattcagctggatttctggtcaatattaggcataccttggttgggagctatgcatttctacatttgtgggagttgttccagcagttcctaccagcttgaataaaggaacatcataatcagatggctgaatctgagctggagggttttcctttttttttttttaagtaacttttttgtggttttgaaatttttcaaaacaaaaagctggaagaacagtacaatgtgctcccctacccccccacttagattcagtaatatagaatgcctacttattttgctgaaccgattgaggttaaactagatttatgattgtttaactacatcagcatttgtctcctaggaacaatgacattctcctacataaccacaggactattattacactcaggaaatttaacattagtacaatattattattcaatgttgagcccatgttcaagtttatccaattgttcaatgtctttatagcatttttttttcctcaagagagtctccctctctcacccaggctggagtgcagtggcgccatatcggctcattgcaacctccgcctcccaggtttgagcaactatcctgcctcagcctcctgggtagctgggattacaggcgcccaccaccatgcctggccaatttttgtatttttagtagagacggtgtttcaccatgttggccaggctgatcttgaactcctgacctcgtgatccacccacttggcctcccaaagtgctgggattacaggcatgagccacagtgcctggcctttatagcattttttaaaaatccagggatcactttagaatgaagtattgcattcagtttagtggttgtaatctcatttaatctggaatctcagcgtttgtctttataacattgatgtttttgcaacatagtctagtttgttgttgttgttgttgttttaaatatagggtctttctctgtaccccaggctggagtatagtggtgcggtcataactcagtgcagccttgatctcctgggctcaagtgatcctcccaccttagcttcccaagttgctggcattacaggcatgagccactatgcctcgctctttattaatgtccctcgactttggttcatctaattattccatcattaagatttaatttgtgcgtctttggcaggaatactacatatgtgatgtgtcttgatcagtatatcacattaggaggtacatgtcaatttgtggcattactggtgatattaactttttttaaagttcttgcagagagaatttagatgttagagtgaacatcacttttaaaaaaattatttttctttaaattgatgaataaaaatgatatattttatggtgtctaacatgtttttatatttgtatgccttgccaaatggctagatcaagctaattaacaaatccctgatgtcacatacttattttttgtggtaagaatacttactaaaatctgcaattttcaagtatacaataaattatattaacgatagtcaccatagtgtacactggaaatcttgaacttattcctccttactgaaactttgtgtcctttgaccaatacccgctaccccatcctctcacccccgccagcccctggtaaccagcattctactctctgtctacttctatgagtttcacttttttatactctacaggtaagaaagatcatgctgtgtttgtctttgtgtctgacttatttcacttaacataatgtcctccaggctcatgcatgttgttgtaaatgataggatttctttctttaacttttttgagactatatagactatataaatatcctattcctcttcaatgttccccgaagtagttttagcatccattgataattcatgtattcattattactctgatggctacaaaatgtaactttttaaaattattccttctgtgctcattcattagtggggctggagctttggagtttggtttggtgcaaggacaggatgtcaagatctggacagtggtgagaaaatgattacaatcttgaaccttgtggtgtaggctggctagggaaggagtggaaacaaggagggaatccagtgaaggagactggagagtcttactgcagtcagagtaaacatcctgtgagtgagagagtgagaaaccaggaagagcaggaagttatgatcagaggtgggaattttggagttgaagatttccaggggagagcagatcctggttgttgaagtctacgggtttgccatggattcagggaactgtttaaatggagaggaggttttccattaggaggaagtgaaggaattctaagactaggctattgaataaatcacccacatggttgtctaattggcccaggatgatggggcaactagcagaggcatttaaccacccaggtgccaaagtcctcccttgagcaggctcgataatgagtacatggaaaaactttatcacgtaaagtaggacattttagtagaggtgccagacttcaccttgtgagtcttctatgttgactaaatgtcagtcagttgaagatagaaatggacattagtcagttttgcttggggaaaacttcaaagatgttatcatgggagcccttgttggggaagtgatacctagatggagaagtcattgcaaatagtggcaagaggagggaagggggcaggaatcctctgagccaagattacagtttcaaaaaaaggagaagagacttgaagtttgaggatggccagcaataagaccagcaagaggtagtttggccagaagcgatgcgctttaaaaaaaaactacatatgtatacaggtttttaagggttatttatattgtgattagagaaaattaaatctaagcatttgttgaatatctgttgagttgaacacactaaaagattttttcgagtttttatggtgcacaatctgtttgaaggactgtaaatgccataatgaggctgttctctgtggctgcttactattataaaagaacactggattaggagtccaagagaaggctctaggtcaggtttcacctctgccactgacaccctcacaggttagaaaacagactgataatgcacaagagagtgctaatgaaaaagctcacaacaaaaaaaacagcagaaggtcaattctaattcaaattgctggtaatagagataaaaccaatctcatgtgatttctcctcatcctatccaaataagaaaggaaataatttaatgacacttactgaagtatgatttgcatgtaatcaagtggatgtattttaggtgtatcattcagtgcagtatgacaaatacatagccccaatgcaatcttcttactaaccaagaggtagaacatttctatcaccttgtaaaattctccaacacctcccctccttccactgtagaaaactattgatctgctttagaaagactataattttgtgtttctaaaatttcctatgaatgggaccatgtgtcgtttacatattatgatggttaatactgactgtcaccttgattggattgaaagatacaaagtattgatcctaggtgtgtctgtgagagtgttaccaaaagagattaatatttgagtcagtggtctggggaaggcagatccacccttaatctggtgggcataatctagtcaggtgccagcgaatgtaaggcaggcagaaaaatgtgaaaaggagagactggcctagcctcccagcctacatctttctcccatgctggatgcttcctgccctctaacatcagactccaagttcttcagttttgggactcggactggctctcctttctcctcagcttgcagacagcctattgtgggaccttgtgatcatgtaagttaatacttaataaactcatatgtatatgtgtgtgtatatatatatatacacatatgtatatctcttattagttctgtccctctagagaaccctgactaatacaatatgatttctttgactccgcacagtgttgttgttgttttgattcatctgtgttgacagtatcagcagtttgcccattttattactgatatttgagttgttttcagtttggagagaatatgaatatttgcatttaagtctttccacagacatgttatcatttctcttggataaaatacctaagactgagattgctgggtcatataataagagtatgtttaactttataagaaactttcaaactgttttccaaagtggctgtatcattttatatttcttctagcaatgtgcgagagttccagtttttccacattgtcaccaacccttggtattttcagtcttttcaactttagcctttccagtgggtatgtagcggtatttcactgtagttttgatttgcattaatcattggggaaatgatgtttaatgtcattcttggacttcttggcccttcacatgtcttatttagtgaagtgtattgtttattgtattattgggttcttcaaatattttagtgcaagtcctatgtcagatatatgcattgtgaagactttttcccatgtggcttagatttttttccttaatggtctcttttaaagatcaggttttattttagtaaaatccaattgccagtttattcttttagggtcattgcttcttgtgtcctgtccagccagtctctgcctatccctaggttttcttctaaaacagtgttgtcaaacagaaatatcatgtaagctagataggtaatttaaaatgttccagtagccacgttttaaaaatagtttaagttactttgaattatatgcaatatatctaaaatattatttcaacatgtaatcaatataaaaattaataggatattttacatttttaaaaaatcccaagtctttgaaagccagagtatattttacacttgtagcacatttcagtttgaactagctacgtcatagccatacatggcttatgggtactgtattgaacaaggtgattccagaagttttatagttcctgctttttatttaggtctgagatttcacttgattcgttttttgtgaatggcgtgaaatgcatgtagaagtttatttttttctctatatagataaccagttcccacaccatttatctctttccaatggaattatgttatacctctgtcaaaataccaatagatctaggctggggacagtggctcacacctgtaatctcagcaccttgggaggccgaggtgctcagatcacttgagtctaggagtttgagaccagcctgggcaacgtggcaaaaccctgtctctactaaaaatacaaaaattagctgggtgccgtggcatctctctgtagtccgagctattctggaggctgaggcagtagaatcacttgaaactgggaggtggaggctgcagtgagccgagatcatgtcacggtactccagcctgggcgacagagccagactgtgtctccaaacaaacaaacaaacaaaacccaatagatcttatgtgtgggtctatttctggactcaatacactattgttttttcttatgtcagtaccctgctgtcttttgtcagtaccctactgtcggtacccttatgtcagtacccgactgtcttttttttatttttatttttttgagacagagtcttgctctgtcgcctaggctggagtgcagtggtgcaatcttggctcactgcaacctccaccttaaggttaaagcaattctcctgccttagcctcctgagtagctgggattacaggtgtgcaccactatgcctggcaaattttgcatttttagtattgatggggttttgccatgttggccaagctggtcttgaactcctgacctcaaatgatctgcccgcctcggcctcccaaattgctgggatacaggtgtgagccaccatgcccagccattaccctattgtcttgattagtctagccttatagtaggcgtaaaaatcagatagcataagccttccaactttgtttttctttttaagattattttttctcttctaggttcttttcatttccatataaagtttagaatcagcttgtcaatttctatagcaaagctgacatggattttgcccatgtcaactttgacatgaggactgactgatgaccctcgaaaatatttgtgtcctaatctctggaatctcagaatgtaacctgagttgaataaaagggtctttgcagatgtgacttaagttacggatcttgaaatgaggagaccaccttcagttatttcagtgagtcctaagtacagtgacatctacccctataagagagatacacacaggagaaagcacatggcacgcacagagaaggcgttgtgaagatggaggcagagattggcatgctgtggccgcaagccaaggaagccgaggaagccagggaatggcagtggtcaccaaaagctggaagttgtgaggaaggaatctccactagagccactagatggcgcctgcggcctttgctgatatcttgatttcagacttctggcctttcggactcagaaaataaatttcatgttttatgccaccagtttgtggtaatttgttatggcagctataggataaaatatagccactatctggctaaggaagttccattccattcctagttgtcatttttttcaggatggggtgtagttgtcaaatgctctttttgcatcaattgaaaataacattttccccctccattattttgttaatgtgggcataatctgtatgattgtctgcccatgtggtattaattttagccccatcatagctgttacccctggtaacacctgttcctgaaagtgttgggtcctgacacattgtatcaacctatagatgtgtcagcatgaattttcttgttctgcatttgctgaagaaatgttaagaagtcattcaatagtctgcagaataaaatggaatctccaaatacttagagaaaaagtgtgattatggaatttgtcctgaggggttctgtctactacagtgaccacgctggcaacccttgggtccagtttgacctggagaaatacttcatgtggcctctgcagtgtttccaaaattagaagattttatattaaaatgttagatagcatacttcccttgaaaattatgcagatgtggcaaccctgccctgagttcaaacatggcagccattggcctgagctgagcatctgccccttacacaaagaatgtccttttcactttaccacagtcccattgttcctcactgttttaaactttgtagagatttgagtttgcaacccctgctccagaagctttgctagggcatgctgtaatgccaaagcatgcgtcattgagggaaagctcaggagaaaaagagtgtgtcacagctaccaggtcaacatagtcatgttcaaagagaccactgtggaaataacctaaagataaaaaaggatttcatatagttcattaccagtgagaaagaaagactgcttgactgacttctggataaagatggcacaaggaagcactaaaaaaatcaaaattaaaatactaaatcatccaggcatggtggctcacgtctgtaatcccagcactttgggagactgagacaggcggatcacctgaggtcaggagtttgagaccagcctggctaacatggcgaacttccccccaacccagcacccccataccagcctctactaaaaatacaaaaattagccggttgtgatggtgcacgcctataatcccagctactcaggaggctgagacaggagaattgcttgaacccgggaggcaggttgcggtgagccaagatcatgccactgtactccagcttgggtgacagagcgagactctgtctcaaaaacaaaacaaaacactaaatcacccaaaggaaagaaagcaacaaaaaacttacatgctgcaaccaaagaagaaaaaagtacaaccttataatgtaaaatttgagaattgatagcaaaaacaaagagaacagaagattctatggaggcgtgctttgtctccagatgaacctatgtctgcccagccctccacccaccgctgcaagacatgttgaggaaaaagatgatcagaccaaatcctaagaattctcacaaacgtcccccaatgtggaaaggcagggcacacctgtgagatgttgaggaacctttgcataccactgttggatcttgccagaggcaggaaagtttcccactttctgggatactgtgctgaactgagcaaatgaactgaaactctgaggcatgggatgttcccttggctagcttgaagtccagctgccagaggacttaaaggaatctcagatgtgaaggttgagttcctccagcaagctttatactctgtctgagctgaattccacacatccccttttcccccacctctccttgtccgaaaaaccttggatcacagaacaagtagatagaaacaacattcagccctgaaaaagcagcgtattcagatatataatatacatgggacattagaaaagaacataatctataaattggaagatcatactgtatgctggggggaaaaattgatctagaataactgacacagaggcatagcccagataagaatactaaagggtatattaatgttaaagaattcttcaggtatccaagcagaaaaatcaagccacctccaaggggaaaattacatgggattaagatctttccacagaaatctttgaagcatttctctaatgaccagtaatgatgagcttttttcatatgtttgttggccacataaatgtcttcttttgagaagtgtctgttcatatcctttgcccactttttgatggagttgtttttttcttataaatttgtttaagtgctttgtagattctggatattagccctttgtcagatggataattgcaaaaattttctcccattctgtaggttgcctgttcagtctgatgatagtttcttttggtgtgcagaagctctttagtttaattagatcccaattgtcaattttggcttttgttgccattgcttttggtgttttagttatgaactctgcccatgcctatgtcctgaatggtattgcctaggttttcttctaggctttttatggttttaggtctgatgttttaagtctttagtccatcttgagttaatttttgtataaggtgtaacgaagcggtccagtttcagttttctgcatatggctaaccagtttttcccaacaccatttattaactagggaatcttttacctattgcttgtttttgtcaggtttgtcacagatcagatggttgtagatgtgtggtgttatttctgaggactctgttctgttccattggtccatatatctgttttggtaccagtaccatgcagttttggttactgtagccttgtagtgtagtttgaagtcaggtagtgtaatgcctccagctttgttctttttgcttaggattgtcttggctatacgggctcttttttggttccatatgaaatttaaagtagtttcttctaattctgtgaagaaagtcaatggtagcttgatggggatagcattgaatctataaattactttgggcagtatggcaattttcatgataattgattcttccaatccatgagcatggaatgtttttccatttgtttgtgtcctctctgatttccttaagcagtggtttgtagttctccttgaagaggtccttcacatctcttgtaagttgtattcctaggtattttattctctttgtcgccattgtgaatcagagttcactcatgtgttggctctcttatttgtctactattggggtataggaatgcttgtgatttttgcacattgattttgtatcctgagactttgctgaagttgcttatcaggtaacatctcatgccagttagaatgataatcattaaaaagtcaggaaacaacagatgctggagaggatgtggagaaataggaacgcttttacgctgttggtgggagtgtaaattggttcaaccatcgtggaagacagtgtggcaattcctcaaggatctagaaccagaaataccatttgacccagcaatctcattactgggtatatacccaaagaattataaatcattctactgtaaagacacatgcacacgtatgtttattgaagcactattcacaatagcaaagacttggaatcaacccaaatggccattggtgatagactggattaagaaaatgtggcacatatacaccatggaatactatgcagccataaaaaaggatgagttcatgtcctttgtagggacatggatgaagctggaaaccatcattctcagcaaactaacacaggaacagaaaactaaacaccgcatgttctcattcataagtgggagttgaacaatgagaacacatggactcagggaggggaacatcacacactggggcctgttggggagtggggggctagtggggtagggatagcattaggagaaatgcctaatgtagatgacgggttgatgagtgcagcaaaccaccatggcatgtgtatacctatgtaacaaacctgcccgttctgcacatgtatcccaaaacttaaagtataataaaaaaataaataaagcaattgccatcttgttctgttaggttttgaaggaaggtgtgaattgaaaatatttacccaactcactttttatttatgtatagagaaaaacaccagatcttctcaaacatggcagcactctataaaccctccttaggaatatgacttgaaaatgaaggaagtccatcaagaactaaataaaaataaaaattcagggatagataagttacagtgaatatcaaattcatttaaagatagaattaagacaacatctggaaaaataaagttgcagagcaattgcaaatgttctcattgctaggaagccgaaagtaacagaactaatggaaattgagaggcagggttaccccctaaaggtaggtggaggtgtatgatgctaattaacctcatctttcagagctatgagactttctaaacccgaacatgtagtgagctccttacacctctcttaatctttttacgtaatgcttataggccttttaaaaagcacgtcttttagggaagaaagcaatagagattcccttcagtttatttttcttaaattccagtaacatgaaaaatttgaaattatatgaagcagacgtagtgtgataccgtaattagaaaattacttctgtctaccctttctgcgtcttcgtttcttcagctgtgagacgggtatttctcccagtgttgctgtgaggattacacgtatttacctgcaaagtgcttaggacagtgcctggctcacggtcagtgctcacgtttgggcagctgcacttgggcgctgctggcacaggaggtaagttagtttggcctattgcagcgtcccagcatctgtcgcgtttctcatgtgtgattgggctctggcggcccatcctggcggagacttcggctagcaggccccgctgcagaccccaggccggctcgggtctacctgcgccagcgctgtacctgggcgaccttggctttgcccccaccggtgacccggcccgcaggacgtgtgggtgccgctcagctccccccgcctcggccgccgacccccagctccccggcggggcctcctcctgccacgtgacgcccccgccaggggccccagcgccctcctcgcggccgcgccgttccggctcccgagccccgcctgcgcgcggcctcctcggcgcagccatcctcttggctgccgcgggcggcaaagcccacggcatctgccatttgtcattcagcccgtcggtaccgccccgagccttgatttagacacggctggggcgtgctctggcctcactctccgggcgggtgctggacggacggacggacggggcagccgtgctcacagctcagcagcgcggggccttggcgcgcggggcgcttccccgggtcgccgtcatggccgcggaggtggcacgcccgagcggcctcgcctgagctccgggggtcgtcgccccgcagggtaggtgtttgggtgctcgcggctgcggcgggcgggctgggggcagcggtggccgtgcattgccgcgctgcgaggacggcgctgggttcgcggccgcgaggagggtgtgcctttgccgcgccgcctacgtgcgggtccgggctccgcggggccgggtgcgggaccccgcagatcgtcacccgcaacccaggcagccccaccgcgagtgccgccggaccccctggacgccgctgccagaggcgttcgcgcctatctggtatgaggtccacagacccgattcttacaacctggcgctctaacctcgccaacgggccaggaaaaaaacagaacaaggaaaagaagaaaaagtctgttccaagtaataatgggactagacagtaactgtttgcactttcgtctcttatggaaaatatgattattttgatgctttagtattacagactgtatcagacatactcttaaaagtatttaaaaacgtggggtcctaaaaatttcctagatcgggacagctgataatgcgacttctgttagtctccgcatccaactttcagggcggaatggggatttctaccttttactgaatatactcctgtaattttgaatattttttctcatcaaatgtgttactttcatgttttaggaaaccaataaaaatcaaaaatagaaacacccagcttaggtcctccttcttccaggaatcctcctctaacccctccctcccaggcaggatcggaggcccctcccgggtgctttctggggcctcactgaggtcctggtcccctaagtcctcccccgcagcccctccgcgtattaacccaccggtctcgctgggctcagagattgcttacttagcacatggtaagtgattaatactgtttaatgaccgagggaaaagataaaatgttctctgatgtttcacgcttttcgctctgaagttaaatagtggtaaatttatatgcgcttagataagaacatttaacagttaaggatctggaaaagttgacgacgtccgatgtccgtgtttcctgatccagcagttgcacgcctgggtattcatccttaagaacaatgtttttcagaatttgaagtccattttagtgggtcgtaaagtcatttaaatggatgatcagaatttgtaaaacacagacggagaatagaacatcagtgtctctcaggtcataggggtgttcgctttatgaatctctctccccctcctcagtttcatacatacacaaatgtgtgtcatgatgtaaaacgtcattccttagtatgagtcatggacaaaaaagtttgaaagccactgccctagataaattttaatacatgtccacaagcagacgtgtacaagaaggttgactgtaatggcagaaaactggatgccgccttcatgcctacctgaaggagaaagataaattatacaccactcataaaaagggcacactgtacagtggccaatgaagtatttttgtgtttcaacacaaatgcctttcagtgttgaaccaaaaaaaaaaaaagttgccggagaatgctgtgtgatatcttctatgtaaaattcagaacctggtggagcaaagctgttgtttagggatgcatgtataggcattaaaagtagtaaagaaaaaaagtcaagctaatggtcatctcctagtggggaggagagggtcaggggctcagagatgctggaaatgctttatcgcctgacctgtgcaatggttacatgggtgtttgctttgtaactctttgttaaatgatacacactgggtttgaatgttacatttccccccaaatatgttaaaatatgggtgttgcaaactgaagaagcctgagtctagggctctccgtctgttattcttatttcctggcttctttttagaaaaaaaaaatcttgctcagggaggagtacctagggaatttatcagtaatgttttatttcataaattccatggtggacataccagtattcattaaattattctttatgtattcttataacttaatttataatatttcaaaaagcatttaggagaaaacatcatttggtgtgtttgctttcccaaaagtcacatttacatgttttgtacacaactggaatattttatatagtaattttagctaaaatcaaattttgttatgaaaaacgaaatactaaaaagtatataaaaatcacagaactttacagactttcagcgttttaaaatgctaacatattgtatttacctcaataatttctgttcctcagttctttcaggccacatttttagtgctcaatagcctcatatgactttaatattttattatattttattatgttatatattttacattatacattatagaacagaatatttccatcattgcagaaatttatattggaaaacattctggatacaaatatttgttatatacttgcagatattaaactgtagacattaatccttatgctttttgtcttaagatactctactattaatgaaatgtattctgaatatttttctaagaatttttaagtttatgttttgtccacattttgttctttaatttacctgagacatgtatatattgagatgtatatattttatgttatgagatcaagcttaattaattttcagattcccacatgaaaaggtaattgtcccaatatcagtgattagcagtgccacttctgtcacatacagtacccagatatgtttgggcttatttccaggctgttaatcctggtttatttgtcatttgaaaatactgcagattttcatttactgctgctttctatgtagtatattgttcagttctaagaatttaagattttttcattgtgatattttttcttcccctaagagatttgtagaaagtagtctagttccaatgtggaaggttttgtgagttatccttttgttactgatttctaatttgcactgtagttagcatacgtgtcaaggccaacaattctttgaaattcgagaattgctttatggttttaactgctccttgtatcatcaagaataatttgtactcacagacttttgaggcaatgtatgtaggtgtgtgtatatatataatatatacacatacactttatatatagattatatataatctctctgtagagtttatataaaaattaaatatatttatataaatgtatatatatatatgaataaaatctcctgtctctaaggtttatgtttcattaattcaggaaagttttgtcttttatctctttattttcacacatttttgtcctattctttaggagctatgattagacttctgttagacttcctcactctatcacccacatcttttaaggtagatttaatgtatttaatatattttttatccatgttgaattctacatatgttttttagttctataatttatgtacaacaaaaaaaagtgtgtagcttggtgaaatttacatatgtgtatacctttgtgattactacccagataaacatataaaacattttcattccttctgccccttcctatcaatggagccactcgcttcccccagtcaactactgtcccgatttctatgaccatgtattattttcaaatgtttttaaacttcatataaacggagtcatacagtttattcttttgttcacattgtattcatccatgttgcatgtataagaatttttgtttgttttttatttttgctttgtatcaagggttggcaaactatggcctgtgggccaattccaacccactgcatgtttctgtttataaaattttattgggctgtgttccatggctcctgtctataattccagccagtcaagaggctgaggcaggagaatctcttgagctcaggagttcgagcttacagtgaactacgatcatgccactgcactgcagcctgggtgacagtgagatgaccccatcttaaaaaaaaaaaaaattactggaacatagttatccccatttggcagagttgagtagttgttatagaggccatatggcccacaaagcctaaactatttaccacgtggccatttacagaaaaaaatttattgacacctcttctacggtattacattatgtggatatataatatgagcaatttacttattcattttcttgtcgattaacatttgagttgttttcattgttgggccattaagaattgaattgtgaggaatgttcttccaacttccgttggtagacatatatctctcagctatataccaaggagttgaattgatggtttttggtaggttggttgcatttccataaacactaataatgttgaacatcttaaaatatcttaatcagctatttagatttcctttatcacctgcctattgaaatattttgcccattttttaaaaattaggttacctttttgttaatgatttttagttcctaatataatctggatagggaatctttcttgggtatatgtttgcaggaattttctaccctgaagtttgcctatttattctcttttttttttttttttgagatggagtctcactttatcacccaggctggagtgcagtggcacgacctcggctcactgcaaactccgcctcccaggttcatgccattctcctgcctcagcctcccgagtagctgggactacaggcacccaccactatgcctggataattttttgtatttttagtacagacggggtttcaccgcgttggccaggatggtcttgatctcctgacctcgtgatccacccgccttggcctcccaaagtgctgggattacaggtgtgagccaccgcgcccagcccactctcaagattttgaagacatttgcctttgttttcctccagaaactttatagttttagctgttggatctgtgattatcaccagttgatttttgtgtatggtgtgagggggggatcaagatttattttgtatatggacatccatctactctacacatttattgaaaaaaacaacacctttcttttcccattgaattgcgtggggactttgttaataaatgaatggtcatatatttgggtctgtttctggactctgttctttccacttggactaattatccattcttgcatcagtaccatacttttttaattactgtagtttatggtaagtcttgacatggtattgtaaaccctccagttttgttcttttaaacaaatgttttgactatttaagtgctttacatttccatataaattttcaaatgtgcttgtcaatgtccattaaaaaaaaaaaaaaaagcctaccagaattttgattgggattgcattgactctacagagcaactttgggaaagtgaacattttaacagaattgagtctttcccttcattgcataagttcttctacagttactttcaacattgttttgtatattcagtatagaggacttacacattgttcaatttatttctagacatttaatgtttttttgatgctgttgtaagtggtggagttttttttttcccccagttttattttccaaacatcttgcctagtgtatggaaacaaaatttatttttatatattgatcttgtattttgtgcgcttgctaaattcacttatagttttggcagtatgcagatttgtttttgtttttgtttttgtttttaatgtgctgtcatgccatctggaaaaaaaatggtttaaatatgcctttacaattctattctctttttcgccttttcttgccttattgcactggctgggacctctagaacaatatttaacagaagtattaacaaaggatatccttgccttttcctcatcttaaggggagaatacctcaatatttcactattaagggtgatgtttactgtactttttttgtagatgttctttaccagattgaggaaattttcttctgtttctagttcactgagaattgctttcgcaaatgagtattgaattttcaaattcattttattctgaaataattttaaatttacaagaattgcaaagatagtgcagtgtttttgtatacccttcacccagcttcctctcatgttaacatcttacataacccttgtaaagtaccaaagttaagaaattaacattggcacaatagtattaatgaaactatacactttattcagattaccacagttttccctctaatgttctttttttttaatttcaggatccaccccatataccacatggtgtttagttttcatgcctccctcgtttactccaatctgtgacagtttctcagtctttcatatcttgtcacttttgaagagtactggttatgtgttttgtaaaatgcatctcaatttggatttatctgatgttttctcacaattagactgagattatggattttgagagaagaatatcgcagagctgttgtgcccttctcattgtatcacatatggcagcatatgatagccacatcaactgatgataactttgatcacatggcaagatggtgtctggcaaggtttcttattgtaatgttactttttccccctttccatggtctatttgttaggagaaagtccacagtcaaaggaagggagggatatcaaataatttgtggtcatatgttaaaaccaccacagtgattaataaatatttttgaggtagtacaaatattctatttctctttaaagttttgtccaataattttagtgttcaatggatcttgcctgcagcaattattattgtggtattctaatggtgattttccatttccttccttctttctacatttattaatagaaattcttctctaagaaagattggtcccttttttcccattgatttattattgagtcagttatttatatccatgtatattgatggatatttatttagtctttgagctattatctaataccatttttatattgcttaaattgttccagctttggcattgggattttttcaggttggtacttttgtccttttgaaatgtccccattaaaaatttttatttttttttttttatcatttccttactgtctggcactatgagatgctccaggctcatttagtattttcccttccccaaccttagaatcagccatttctccaaaatgtcttgattccttttattggaggatggtattagaaaccaaaatctgtgtgctaggtgtccttgcttctattgagatgatactgtttcttggccctctgtggacagagctaggagttatatgtacgtatactctatttttaattttgtcaaatgctttttctgcatctattgagattatgacttttcttagtttgatgacatgaagaattacaaatatctgacattttaaaggatgtttttccagtatttcttagaactttgcaagtattaaaaggtttgttttagaatgtctagctctccatatttcctgaacaaatcttcctaagataactctaatgattttgatatgtcatagagcagaagccttcttttgtttttctgctgaattgtttggcaattttagacctttcccattccatatgagttttagtacctgtttatgaagtttcttgaaaagtcctgttgggatttttatagaaatggctttgaatttatagatcaatatgagaagaatgggtatatttgcaatactcaattttttcatttatctcacatgtcctttttgtgtccttcaatgatatgatataaataaaggacttgtacatattttgttacatttatttctagatcctgatgatttttgttgctactgtgaatagtttctcttagtttcttattttctaaccagctagttactacttcataaataacattatatttccatttacataaatacataatttgcaagaaatgatttttttcttttccttctgatcttcaaatctcttattcttttgtttatgtctaatttcactggctaggacaaccagtacaatgaagaatagtggtactgatcatgggcattcttattttgcttctgacttacataagaatgcttttgtagcactgaagcttagtgtgatgttgttgcgggatatttaaagttctcttcttctagttctctaagagttttatatcatgaattgtattggattttattaagtattttttctgaatctattggactgtgaagccagattgcttgcattcaattcctagttctgctcctctgctgccatgtagtataatcttgggcagttacttctctgtatctcaattttctcatctttaaatttaggtacaactgtctaccatataaggttgttgagaggattaaatgagttaatacataaaaaggggtaagaattgtgcttagccctaggaagtactcgtttttttcttcattacttagtgttaggttattttaatttaaattatcataataagtaaattaattactaaatcatcttgcactcgaaagtaaccttacacatatttattcacatgatttggatttaatttactgttttaattttttcatgtaatattcatgagtcataaagtgactgttcttttgctatagcaaagaatgatggattcctagaacaacattacacaagagcttagcaactgaggtggcaacattcccaactttctggagcgatttatatctgagtcttttgataagctggagatagagatagctcttgcatgagcaaattcagaacttggcatattgtggaaaatggtcactaaacaaaaaggaaaagtgattttagcttttctgcgtgttttatattgcatcattaatacattgtattatttgtgtatggagatttccatatttggaatatttggagagtcattcaccaatgatgtactgagcactttctatgtgccaggcaatgtgttttgttggcttgggggcttatgtttgctctcgaggaacttaggggtcaattaggatcaatcctgaagttgaaggcaggcctatttatatcattcagggaaactcagtgatcattttttttaaattaataaaattgaactttctcttccatttgcattctgaaatacaggaaaaaaatttgaactttctaatatctttccttcctgcttctttcactcccctcagcaccttggtttaggcccttgtcaccctatgctatttttccctgtattgacttttcttcccttcctatcatgtgtagtgaccactggggtcagttccctgaaaaagtcctttagtggcatcccaatacttacaagattcttggcttcttagcatgacaatggtccttttttttgtctggtcctaacttactttactggccttctccgatttctcaaaactaatccagtggcacaggtggtcctaaccacgcatcagcccctaaaggtttcactctcctgcttttgcagctgtgttcttatttgtgccatttcccctgccttaaatgttttctccccaactaattttcaaccattttttttcaagctctgttcagagaatactcactctacaaccctactagctacatagaaaccctataatttataatctatagcccttgttaaattcttacctttcgtcaccaatctttatatctaaatgtcttttccagatggtcaggttcttagatagggttcaagtggctgacatgatactttgcatacaaagagctattgccaaatagctaccactactaagtacctactataattgtgctacaattttgcaaagtaagtattattatctcttttaaattgtgaagaaacttagtatcaaagagattaggaaactttcctaacaccatatagttagtaagtggcaaaactggtttgtctgaatcaaagctcttgctctttcttctatgccatactgcccttgtgctaaaaatgaagaaataattaaataaaattatgaacagaagcatttatggtaaaacacacactgaaaatgacatacacagtgaaagctttgctttcattgccaatatactatagaatcttcactttggtgaccatgatagttgctatggattaactggtgtactcctattttctttggactttccttccaagtttttgttgatactaatgaataaggtttgaatattctaattttggcttatttgggggtaagaaaaactgtaaagtttagccacactttgcttggtgtttgttttattttaagtagaaaattttacatttgcctaataacctttgctgggcaatggataaggtaaaaagagtctaattatctttcataaagtactttttctctgcttctgttgaggcctaaaatacatggggaagaaaaacatatgaaatctgccattcttaagtatatagcttgatgagtttatacacacacacacatacgcacacctgtgtaaccacattcaagagcaagctagacaatattacatccatcgaggataaaattctctcatttacctcctggtcaacacctcccctatggatcacactcttctgatgtccatcactgtagattagttttatctattccttccccgccagccccctccgccccaagatggtatctcactctgccacccaggctggagtgtgattgcatgatgacaggatgacagttcacagcagcctcaacctcccaggctcaagcgatcctcccacctgagcctccctgttttgtctattcttgaattttaagtataaccaaacaggatgtactcttttgtgtctggcttttattcagcgtaaattttttagagtcatctgtgttgatgcatctatcaataggtagttctttttgtattttttctgagtaggactccattaccacaatttgtttatccattttgtaaatagctatgtgggtgtgttctagtttgggttcttacaaatagacctgctgtgaatactcattcacaagtcttttggtggacatttgcagtattttgccaaggaacaaatctgagactagaattgttaggccataggggagccaaacagtttacaaaactgaatgcatatgtgtacacttttgctagcaatagagttgtagttggagtgcacattttcatcagcacttgatattagtctttttcgctttaagccctctggtgggtttgaggtgatatctcatggcttcatggtctcatggttttcatgtgcatttccttgatgatttcatgacttttctatgtatcttttaatgctgtcttttggtgtcttaatgaaatccagtttatcgggtttttagtggtttgtcttttgtcctgtttaagaaatctttgtctatccctcaatcatgaagatatcaattttatttttacatttagatctgtgacccattccatcatctatctcaaattaatttctgtatgatgtgagataagggtcaaggttaatttttttcaggatcgagatttaattgctctagaatcttttgaggaatttttctttccctccattgaattgcatggtgcccttgttgaaaatcaagtgcctgagtatgtgtgtctgtttttgaactctaagttctatatccttgttctgttcgtctacctcatgatcgaagatggctagccaagttctagctatgatgtctgtatttcagtcagaaaaaaaaaaaaaaaaaagggaataaataagactctgctcctgcttcaaggacaattcccagaatttgcacatgacatttctgcctacatcttgtcagtaacgtgacaacctttatcttcaagggacattggaaaatgttttcattctggggagtcatgtgcccatttaaaattcagagattatattacaaagaaagaaaggaagaatggatatcagagaaaattggcagtctttgccatactttctgtttacaagcgctttgtaggtgcttaataaacgttcatttgattcaatttcatctacttctcattgaagccttcttggtcaacttttgcttgtaatcatacatgcagacatcgcagctctgtgataggattctcccagatccacctaataagaagcgtgccctgtagtaatggggtcagctacttcctagtgagagaaatgtccagaccttgttaaagttctctcaaatcaccccatgtttcttctttatgtgacaccattgtgatcataacagttcagagaaaatgagaccctaaatcaagaaaatttaaagcacgatgtggctcagcaggtcacaaaatagagtggacgatggtgggagggtgaccaggttaaaccgtttttggttttggttgagctcctgaccatcctttatccttgatatttttggaaaaaagattagaggtctagatttcagttcttctctttgctttaactttatggctggccaccattaatatagccagtaatgtaggtattttatggaaatacttattattactgggctttgaaacaaaaacctctgttttataattaagatttgagcccatcaagtgttaaattttctctttcatccctggaaaatatattatgaaacatgtagaaagggtgatctttcttcctttagtcttcaggaaaaaaaaaatccttatatttcagatttgaaacattttatataagcatatatatcataatagtgtttgaattttaagtggtatgagtatcttatgacagtatagcttttaaagctatttaacttagaaaacattcataaatttattcaacaaatatttataggaggtaaacataatttcaaactttgactaaaatggttcgcacctaaatacaaagtatagaaatctgtttaaattatgtagtttagaatcatgtttccttggcttaacttattcctcaaattagtttaacatttatcccctttccaaagcaaagcaaaaaaacccccaaaaaaccataacaacaaaacaacaaaagccaaaaattatgcatcatttattgaatgatatgaaaagggtagcttgatacgtgcatacaaataatctgcataatactgaagtttaagctttttattaattaactttaaggataaattgaaagggaccttgctttattgtgaatattttctgtgttgaccacttgttgtgaatcattttatttaattgttccaacaacctgagaatagttttatctcctttgtacaaataagaaaattttggctgagaaagaatgaagcctttcccaatatcagacagttaataagtaatacagcaagcatttgacctctgattacttggattctgagcacagggtgcctgctctttgtgatggttctatcttattgtctcttaattgttcccattagatgatgacaagatagaggcatcactgagagatgtgacatagtccaattacctccgtgagttcagaaaatctgaaattaatgcaaatttgctaagagcaaacacatcagaaactgacatgtattataatgagaattttaattggattaaagccccactcttaagacatcatttaaccttaattacctccctgatggccctatctccaaatacagtcacattagggtttgggttttcaacatttgaattttgaggacacatttgaatctgtaacagtggattttccagaaacgcaagcaggaataaaatgttgggaccgaatatgagctgctccagtggtcacactgctgtctctcatcatcttccatacatttttttgcgaataatagtagtatttataatgccattagtttcatttcgttcctacttgagatttcaagagctactgtgaagtagggctgccttgttaaatctgtccgcacttctgcagagtgtaaaatcagtgtcatacgctttaatggtaataccttgtcacattcagagatgtttaaaactgcaatctagaaaattgcttttaaacagcggaggaaagatgttcatattctcagatgacacagtgcagaacatgtggacatcccatgcactgtgaagtcttaaaatttacaatatataggaaaattcctcgtttttctgacacctttctgagattattaaaataatacagatccaaacctagtatttcccacattgtaagttataaatttcacgagtatactttagggagtccctggtccataacaattttgaaatccttcaaaacctggagagtaaaatgcttcttgattaggccctgattctaccttcttgttcatcattttcagaagtactggccttgcccctagggagttcttttctttttttttttttccttagccatatatgaagtgaacatttgagaatttgccctagttgggaactgagcaaacctttctatcctgcatatagagtactgggggccaaaggatcgttttaagacttcagctgatagtcttattcttttcggcagcacagtgctctccaaaatttggaagctttcttatctgtttgtctccagtcaattctgtgtgctagtaaacacagccctagaattttcttttgtcatgcatgagtcctggttttcagatttgctacattgatttgcattctcactcccatagctgtctttctggtcctaaaggaagttatcttgggactggctggcttctattggaaagctttacttttaatctgatctattctctcagtcattttatccacatgaaaagatttaacggatatattatctatccttgtcctgagacaatttagtttttttaaaaaaaagttttccttggctaatgatcttcaaagtcttacctttaactgttagtgtaggggtggagaagaagttagtttttgtagttgcaaaatctgaaatgtctgccgtctcctcactccctttcacttcctggaaaccggatagttcttttctaagctcagctctttcttgaaatactttgtcaaatgaagccaataataaccaatacacatgtcaattgtgtgtgtgtgtgtgtgtgtgtgtgtgtgtgtgtgtgttttgttttgttttttgtttttttgttttcagacagagtctagctctgtcacctaggctggagtgcagtggcgcgatcttggctcactgcaaactctgcctccctggtccaagcaattctcctgccccagcctcctgagtagctgggattacaggcacccaccacacccagctaatttttctatttttagtagaggtggggtttcactgtgttggccaggctggactcgaactcctgacctcatgatcctcccgccttggcctcccaaagtgctgggattacaagcgtgagccaccgcacccggccgttttctgtttttttctgtgtgtgtgtttgtttgtttgtttttttgagatggagtctcactcactctgtcacccaggctggagtgcggtggcaggatctcggctcactgcaacctccacctcccaggttcaagtgattcttctgcctcagcttcccgagtagctgggattacaggcacgcgccaccacacccagctaatttttgtgtttttagtagagatgaggtttcaccatgttggccaggctggtcttgaactcctgacctcaagtgatccacctgccttggcctcccaaggtgctatgagccacctcgcccaaccatatttcaattgttttttcttacctcttctcctagagctacaagtaaatttgacaggagatctgcctcctgaactagcagaggcaaatgttttaccagatatgttgccactgtataaaacacatcactatctttctggcccttgagatcactttccttgctacctgctgaccgctaaaccaaggtcatatattttaggtttttgctaaaacatcctacttctggtaccaatttctatgtagtcaggatgggctaacattatgttgtgctaacaagccatccccaaacctcagtggcttcattcaaaaacagtttattttttgcttacaataaacatccactgtggacttgcagaagactatgcttcacacagaaagactcaagcctgtgattgtaccacctttgtcattgtacactttctggaacacttggccttctcagccactgtggttcaaaaaaagaatattcaatggtttttcctcagtaatcaactttttattaaagtctagaactaatctcatgcccctcctaactatacgggggtagagttcaagccaggatataaatagaaacacttttaccatacatctaaatatttataagttataagttatgcagaccaactaagttcaaagctaaccaacgaagtccaaaatatatctttccttgaccactttacctcatatttcctggaaaaccatgtttgaatgtggactttttggagcctgtacctctagaacatggcactggagagcaagctggctactaggccctggcctgtcttcccttctcttaatgttctgggatcactctgcccactatgtccacatctcctgcaaacagacaccccttggccaccccttgggtctaggtactgcatataacagggcacagtctgcccttaaaaacacagatctaggaaagagcctgtgcagttcctggttagcaggcttgaagctctttggacaaggaatgccatggttctgggaaccaggagcatagcctaggagagggagtgtaggcctgggtgggcaccttccccttaggcctttggactcctcatgataaaggaaatggtgcagctagagaaaggccagaatggaacatggatcctaaggcagagctccactcacctgggttaagggcagtgctgagcgagtgcaatgtctgaatacctagaaaaccagacaggttatgggataagcacataactctgttccgcacctcatgctcaccaatttggcttccatggtagaactagggagggaagatgccctaatcaccaaaattcagtatcacggccccccagtgccatgttctagaggtacagactccaagaagtccacattcaaacatggttttccaggaaatatgaggtaaattggtcaaggaaagatatattttggacttggttggttagctttgaacttagttggtctgcataatttataacataaatatttagatgtatggtaaattaaaatcctcatcataaagttccattatgatatataagtcagtttctgaggtgtttcttcatagcaaatttgcatcagttctaggttttccaaccttgtggacataatgggacaatgtcacatctgtcagagtgatgcccctatcttgccatcatctaatggaaacaactaagaaacaatgaaatgcttattatctgtctgatgttgggaaaggttttattctttctccgccacaattttcttatttgtacaaaggggctaaagccacctattctcatgtggttggaacaattaaataattgacaccaagtggtcaacacagaaaacattcataggcaaagcaaggtcctttttctcaattaaaaataatgaaaaacaatgagatattctaaggaatgtgtctgatatataatgcagcggcatgacacaagggaggaaagaggggttgggtcccgggaagatgaagtctttaatatcctgaaaagagtgccttggggcagctctgggctcttgcatatcttgaagggaaggtacgtttttactatctcaacctagtaatctctcttgagcctcagtgtcctggtttttaaaatgaggataataagaattgctttgatgaccttgataaagatcttttgatagagtggtagagataagagcctggggaatgggttggaaagtgagtgggaggtaaggaaatggggattatctaagttttctgttcttttcagaagtttgtctgagaaagggtgggagtatagtgggaccaggaggtcaatgaaggttttgttctttaaaaattgaggaatatcagccgggcacgatggctcacacctgtaatccctgcactttgggaggccaaggcgggcggatcccgaggtcaggggatggagaccatcctggccaacatgttgaaaccccgtctctaataaaaatacaaaaattagctgggcatggtggcacatgcctgtaatcccagctacttgggaagctgaagcaagataatcgcttgaacccggtaggcggaggttgcagtgagctgagatcatgccactgcactccagtctggcaacagagcgagactccatctcaaaaaagaaaaaaaaaaaaattggggaatatcagagcatagtatgtgtcgatgacaagtatctttagtaaaaagggagaagataatgtataagaaattttgaatagagaggtggagttggcctctggttttagggagggtgcatcctcctgtggatatggggaagtttctgagtttagagatagaaggcagagatgccctatccaacagcttttgttttctcacagaagcattaagtagggatgttaacagagagatgttatgtgttaagtattaggagtggggaaggcaattggaagataggagagaaggtgtgaaatgaaatgaccaaagattagggaaatgttgcataattgttgggcagtttctagaacccaagtgaatttgagttggcagagttagagtgtatgtatgtttacccatggatacatatatggagagagaaagagagattgattacaaagaattgaccctgatgattatgaaggctgagaaatcccacagtcaactgtctgcaagctggagactcgggaaagctggtggtgtgattctggtccaaggctgaacgcctgagaagcagaggaaccaggggtataaatcccagtccaaggacaggaggagactgatgtcccagctcaggcaggcaggaagaaaagggggtgaattcctcctccttccacctttttgttctattcgggccctcagtggattggatgatgccagcccatatttgggagggtggtatgctccgaactccaccaacacaagtgttgatttcatccagaaatacctgcatggacgtagccagaaataatgtttaacctggcacttgtggcacagtcacgttgacacaattcactgtcatatcacactctccagggatgagaactcatctctgagtcctccctgcatttctactgtagtagcctttccactctattgtttctgtgcgtttttaatgtcccctggggcacccccagacacactgagctgcctatctgggctttccaagttatccctgaggtatgcattattatttggttagcgctgtgattacaaaagtgcataggttttgagtggtctactctgaatttttctccctctgttatttttggtgtgagattttgcagaccatgagttatttcaaacatacgtgacctgtcttcatgtctatgtaagggcattgcaatgaactgaatgtgtgtgtccccccaaaagccatgtgttgaaaccctaatcctaatgaaatggtatttgaaggtggggccttagggaagaaattgggccataagggtggagccctcaggaatgggattagtgcctttataagaaaaggacagagaactagctggcttttcttcctaccttgtgaggataggagagccagcagtagacagttggaggaggttcctcaccaaaacctgcccatgctggcaccatgatctcagacttctcccctccagaactgtgaaaaataaatgtgtcagccatccagtctatggcactttgttattacaacctgaactgaccaaggcaggcatggtcagtttttagaattttcaaatgctttcatgtaaaacaataaaggatatcatcttcctggcagataaatgcaattcaaaggaaagtgcccacagtagcccctgatgccaggtcttgcctttcagggaagatcttggtttcctcctccagaacctctgatgaagtggagccaacctaccattaactctgctgtgattgtactcatcactgccaagggcatttatgggatgttcgtgcatggctattatttgtaaactaagttatacagatatagtctttatcctctaagaatttaacaacttaaaaacagtgacataaacataaatgttacagctgaggtgatacacaaacttgaaaaatttagttaatcttgtaggatgttctagaatggtgaaccactgaggaaccatacaggtcataccgtacaccaccagatgactgtgtttagccgcagaggaagagtgatgttagtttaggcataatcgttattacttaccaagacttactggacaaacatcactgggaatggaaaagtgtttctcagtttttatcttatatgtatgggaaaagcttggcagacaagatagaaaggttattctaaataaacaatatgcttttagaaagatatgagaaacaagtcatgttaaacttcaaggaggctttgtatatgtatttccctgggagaagaattggagataaatgaggaattctgatttttcttcattcttagaacgttgacatctattttgtcccatgttttagacagagttttcagagaaaattaaggttaccatctgccttgtatttacttaagaagaccaggacacagtgttttcttgaaataataatgcttataaaagtcttaactctaggagccattgaaaagagagctgtatccaatgtcccctgagtctgtcacgctggcccagccacggacagctggcttcttggtgaagaagggcaaacaggcatcgtagggtggtgtctgaaaaggagagggtttccttcaccctgatcttttgcttacccacctttaagaaaatgtgagtttttactttgggaggccaaggtgggagaatctcttgggcccaggaattcaagactagcctgggcaatatagtgacaccttgtctctaccaaaaaaaaaaaaaaaaaaaaaaagccagtgtggtggcacatgccagatcttgcctttcagggaagatcttggtttcctcctccagaacctctgatgaagtagagccaacctgccattaactctgctgtgttcggaggctgaggtgggaggatcaattaagcccacgagatcaaggttgcagtgaaccttgatcacgtcaccacacttcagtctgggtgacagagaccctgtctctaaataaataaataaataaataaaagccttgagtaactgggggagattataaagctagttaaaatcaattaatagtgatttctagaaatctcgtaagatgtaagcattttaatttaaaggtttctttttagctaccttttaactgaaaatgtttttaatatatttcagtgttaacgaagtaatgaattaacttccctcccagaaagtcaagaataatagcatgtatcttcctgtggaagatgaacttcagagctccatttccctagttcctatgtataacttggttatacgcacaccaaaccatgctaataatgcattctcctcccctggctgcctcttgaacttagatcatccaggagacgtctgtaaaattagcactgtaaagaaagcctcgccagggtatttggggcagcatatcaatggcttattgagcaggcgccttttaagcactgttgaatgataggcaaaactgtcacagctatgcataaatgtgctgtgtagtttcacagaagagaatattagtcctcagtaataatgctatattattaagctaataaacctacagaaagtttgtcacaataggtgtctgtcaaattactataatctgaacatgatctttggagttttagatgtctctattggctgaagagcctaattttgaagcttttatctgttcaaaaatttcagttctcccatcatcatctctgctcaattgaatatgtctttttcaagagtaatcttgactatgtataaactgctgcctgtcaatccccaacgaatgttaagactatctttttagggctggtgaacagtttgttgctataatataaagtcttttctgcatgtcccaacctttgtttttggcaatttcctatgatttcatgcttgaataaaatactccttccattttacacatcattgctttggacattttccttgttgaattctggtatgttaaaatgaagcttaccaataattaggtgatttatttgtcatagcaatgaatgatgacatcaaaacatcttgactttatcatgggtttccttgagggatggtagagtctgggtgcccagagtctggtcccaggttccaggatttgccacttgctagttgtttgacttcaggcaacttgtaaacctcttggtgcctcaattttctcctgggccaaacagggtcaatgtgcatacatcaaaggtttggtaaaaggattaaatgatatatatatatatatatatatatatataattttatatatatataatttgatatatatgtgtatatatatcttttatatatatgtgtgtgtatacacacacacacacacacacataataatatataatatgtagcttggccgatggtaagcactcagaggtttcttgttagtaatatattgaaaatatggaatctgtgagtgcagacaacatttctgactcccttactttttgcgttttgatttttgaaatgagtgatctatgccatgctaacaatgagaaaaacttctccctggagaaggtattccttaaactaaacctttaatgcagaaaactaaaagtattcattcaagatttgacatataggaagtagtagtagtagtagtagacatagaactatggacaaggaatgaaatactttttgtaaatggctgttattattttagtgttaaaaatagatgtgcaatgggtcaggggcagaaagagattttggcaaaggaggtggtgtgtgattgtaaaagggcaacatgatggatccttgtgatggaactgttcaatattttgactagtggtagatatgtgagcctacacatgtgataaaactataaaacacactaatacaattaaatgggaaatcgcgatagactagtagatggtattaatataaacatatcggttgtgatattgtactgttgttttgtgaaatgttactattgtgggagactgagtaaagcctcttttaaaattgcatatgaacctacagtgatctcaaaattataattaacaaatgcatgtgcaaatattatacaaaactagtaatttttatttttgtttgcagattgttcctgcctgattcataaacatcgtgattggcttttgtaagctgatatttcagtttcttttatcctcttcccccaataccttgtcttctctaataacttgataatggttttttagagctcctagagcaaaaattggagcaaaacttttttgttatttggttcttaaattattttaaagtctgtctcactttttctggtactcttagataatagttattttgataatgatttttgaagtacatgtcttggcctaggggcatttgtttccttatagtgacttcttatcagagttatggttagtgggagcaaagggcagagctgaggttgtatatagatgcagacgtcctgttgggcattagtcttcctccaaaacatatttatgtatctttgtttttaaatagtctatgaagtgtcatttttacggaggagaattgaaatatactaaaccaattttaaatacatctttgagaagttattttctgagatggttttgtttttcatcatcttagcaggagaggagaatattgttacaaagtaacttaacaaggatttgcattctctgacagattctaagtctgtatcttgaatcttgttctagcaggttctgtttcacctcttttgaagccaccaagaagacacgcacctctaatacagtcttcccgatagtacctaccttggcatactcattccttaggatgttaactgatattatatggaaaatgagcatatggtcatttaaatttgggaaaaaagctgagttaaaatcaaattagacttgtttgtttccaacaagtgattatcgatggcctttggtctgtggtgtttctccagcatatttcaccatacaacccctacctcaccaaatataccattgaactggtgctccacagaaaagtttgagaaattttgctttagaatttaggaaactgatataaatgacagaattaattgtacatttttcagaatgatagtgaaagagaagaaggacatttgagcagaacgcaagttggaccataaaaggacagttggattagcttaaaacagctgacttggagttaggcctaaatcattattataaatatagttataagacaacataaaaatttaaaatctggaaagtaaaaatacatcattgttccttattccttgaagattcaggagctgtccttccctgtaagactaatgtgtcctaattcttggtgattttcaggcttcgtagagtcttaacagcctggcttctcggtttcttgatttcctctccttcaatgaccttgtcttccaaaccacattagcaactttctcccatagtcatactgtgggcctagtcattaataagaactgctctcactccatgatcttgagtcccagcaccccattctccatctgtcctcccactccaacacatttttaactccacctagacatacaacttttacactgcagcacacttccttcatatctcacatcctcccttactcaacgtcaatagcctaccctctcattaaaatcactcatccactcatcttctctgtccctcccctttgctttgttgtacttagccatctatatcccagtgcctttgtttgctgattccatgcctgcagcagtgcagctgaacgtagctggagaaagatacccagccatgctcaatttaaagcttacccttgtacttatattcttagtcccatctcctctcacctgctcaaggatatagctacagtagttgtcccttctctctcctgcatcatgcattcccacctccctgctttacttaaaaaaattatttaactcccattcctctctacttactaccccatttaatgtccctgcttccttttacacaatttctcagttctgtctgggcattccaccaaagttctcaagtgtcaccagcgaccttcatattgcaaactcaaccattaattctcagtctgtatcttccttgacctgtcagaagcactgaccccactgatcatgctgctctgtgaagtatgttcttctcttgtcttctgagtctgcacactttcccaactgccttcctattgcatgtgactactcttatctttcttgcagttacatcctcattgtcctgacctccaaacattggctgtccctgagcacagtctctgtacttgtcctctgtcgattctcactccctagctgctcccattcatttttatggctttaaatacatatatgctggcagctactaaattgtctccagtatggacctcttctctaaactccagattaaaatatccaattgctggatgtctaataggcatatcaaacctaacatgtctgcacctgagctcctgagttcttctctgttcccaaccaaacttccttcatcctaagtagccatttaccgagatgaggaagactcttcttccagttgcacaggccaggtgcctttgcagcatcctcatttcgtctctctcaccctctacacattcagctgtcaggagatactgtcagccccaccttccataaatccagaaggtgaccacttctccccagctcttctgctactgcactggtgcacgccttcatcatctctttataagagtagccttctaactggtctccctggtttcatactttctcccctagaattcactctccacacaacagcccgataaattatttaaaactgttaagtctgatcgtgttacttttctgctccagtgtctccagtccttcccatctcgcttacggaggcttatcatctcctatgtgctatgggtcccattacttctggcctaatcttttaccgcttcccttcactgactgctttagccataccagttttcttgtttctgcatcgagttttgcaattattgtacccagaaatagccacatgacttacatccttacctccttcagatcctccctaaattgtcatcctctcacccatgcctttttccctgaccagcctgttttaaattgacactgttttcactgctaaatctcttagcacttcctgtctcttcattacttttttttttaaaatcaccatctgatacatattttacttgagctttgttatgggatacagttaagctactagaaacaattaattcaaagataagcttaattcattggtgcgcttcacaagggtaggaatttttgcgtgttttgttcacagtggtgaatccccagcacctagaacaatgccaggaaaaacaaccactcaataaatgctggtttaatgaaaaagaaaaatcttaaaaaccaagtccaccatatatatcccacaaagataggaaagtgggattggggaaagggatgctatagtagtttgactttgcttattacacccttctctagttgctgactgatcatagaattgggtaaatggcttgagctgggacaatttattgtaaatataaagcactaaggcaaatataaaggattggaacttcgtactgagaggacctctgcttccagccatcttgtaataacaggaactggagttattctctcgcctaaaatagcctaacaaaccgacacacacaaaaagcccataaaacatatgaaacaaaggcattccgacattggacaagtggcacgagacagtgaaccctgagagaaggaaaaaacaaatgatttgccccaggctgcagtgcaggaaggcagaacccaaacacagcttatcctaggttgagatgatggagttaggaattctgggaggctgaggcagctagaatttgaaggacagagtaccagagaagagagagttagttacacagagagtgagctccagagatcttcagagggctctcctggaggcttcagccgagtgctgattagtgcatatgcataagagaactacccatggatgaggaaagaggcactgggaagaagaaagtagctcatataaggcagtgaagagtgtgtcccccccaccccacccccaccattcagagtggaaaaaccttgtatataagtgggattagatggtgtactcagaagactaatgcttcagcgatgaggcaaaattagccctagactagtctaatctgatcctgcctaaaaaatcttaaaagtaagccattcaagacaggtcataaaactgttttgtaaagggccagatggaaaatattttaggatatgtgggccatgtagtctctgttttaactactcacttctgcccttctagtgttaaaacagccataaacaatttgtaagcaaatgtatttacatgtatcagaatgtattccaataaaattttatttatagaaataggcagtggtccagatttggcctgtgggcctagtttgcagacacttggtttgaaggatcaaattgtttgaagtagcttaactgtatcccagaacaaagctcaaggatatttaaggaaatacaaaatatccagcacccattaataaagtatgcaatatgtagcattcagtcagaatttaccagatgtgcagagaagcaggaaaattcaacagtgaagagaaaactcaatcaatagaaacagacccagaagtgacacacatctaataagtggaggtactaaaataaattaaatagatttaataaggatattcaaatagttattgttactatgttccatatactcaagatggtagtggaaagcataaggtggttaagaaaagatggaagctataaaaagacctaaattgaacttctagacctctagacattttataaacacctgagttgaaaaatacactggataggattaaaatcccaaaatacactgcatagcaattatacaaaatgagatactgaatggaaaaaaaaaaaaaaaaactagaaaaaagtgaatagcacatcagtgagctgtgggacaacttgaaatgaccaaatatgtatgtaattggagtccccaaaggagggagaggacagaaaataaagatataatggctgaagccttgccaaatttgatgaaaacaataaatccacaaatctaagttaaataaatatcaagcaagcacaaaaacatgaagaaaactacaccaagggacaccgtaatcaaatagtttaaaaccagtagtaaagacagattttaaagcagagaagaaaaaactatacattcagaggaacaaacatgacagaaggcttcctgtcagaaggaatgtaatccagaagacagtggaaagacaccttccaagtagtgaaagctaaaactgttaatctagaaatctatagttgtgacaatatctttcaaaaaaggtgaaacatgcaagcactttctttggtaggaaaataacaggtgaaataaagactttttcagatgtactaaagctgaaagaattaatcaccagtagacccacagtgtaagaaatactaaaggaaatctttttttttaaactctcacatttattgtcagttgatttaataaagaaggaaaataatgccagatagcagtaaagagcaccagaaatggcaaccacctaggtaaataaatacatacgatgatgattattattaatattttttaaaagatggtttaaacaaaaatagcaaatggggtatataacatataaaagcaaaagttacaacaataattgcacaaaggtcaggtgaggaaaaatataactataaagtttttatactctacatgaactggtatatcccttggaagtacaccatggtaagttaaagatataactataaactctacagcaaccacgaagatatcaaaacatagttataagccaaaggagataaaactagagaaaaataatcaattcaaaagaagaaagaaaaggaacaaagaataattgaggcaattagacaacaaataacaagatcgtacatttcagcctaatcatgtcagtaagcatgttaagcataaatggtctaactgtcataattaaaaggcaaagaatgtcagatttaatacacatattggccagtctgaaggtaatgagttacctcaattgattgttcacagtcagatttaatacatacaaaacgctttgagaactaactatatgctgcctacaaaaaaatgcacttcatgtgtaaagacacaaatagattataagctaacggatgaaaaaaatatcatttttagcactgattttttaaaactgtggtgactgtattcatattagacaaagtagaaattagaacaaagaatattaccagggataaatagagttgtttcataatgataaagtggtgaactcatcaagaataaatgatcttaaatgtttatgcacctagtaaaataatttcagtatacatgggaagaaatagacaaattcacaattgtggtcagatttcagcacccttccttcaatagataatagatcaagtagttggaaaaccaagaaggctatagaagacttgaacagtgctatcaaccacattgacttaattggcgtttatagaacgctactcaacagcaaactgcacactttttccaagcatagccagaacatttttcaagatagaccatattctgggtgggaaaataagtcaattaattctgaaggatttaaatcatacaaagagtgttcactgaccataatggaattaaattagaaaggaatctggaaaaatatcttgtaactgaacatcacacttccaaataacccaggggcacatcctgagacattgaaaacatcttaacaaatttaaaagaatagaaaccatacaaaatactttctgagactacagaattaaactaaaagttaatactgaaaaaagtgctggaaattttccaaatatttggaaattaaacagtatgcttctaaataacccatggatcaaagaaaaatctcaagaaaaatgtttaaatatttttaattttaatgaaaatacagtttatgaaaccatgtgggatacagctgaaacagtgcttcaaaatttgtagcattaaatgatgtattagaaaagaaaaagaacctaaaatcaataacctcagtttccacctttggaaactagaaaaagagaaacaaattaaacctgcagtgagcagaagaaagtaaatactgaaaattagagcggaaatcaacaaagttgaaaacaggaaaacaatggagaaaatcaacaaaataaaaagctggttctttgaaaagatcagtaaaatgataaatctctagccaggcaaccaaggaaaaatgagtacaccaattgccaatattaggaatgaaagaggtgttattctgctaatcccatggataaaatacaggattagtaagagaatagtataaataagctctcactcacatatttgataaattagataaaatagactagttccttgaaatacacatataaacttaaaacagcttctagacagcagacccagatggttgtactggtgaattctaccagccagccagtgtgacacaaacgaaatcaatcagcaccaaaaagaaatgagctggccgggtgcagtggctcacacctataaccccagcacctttggaggccgagatgggtggatcactgaaagttgggagttcgagaccagcctggccaacatggtgaaactgtgtctctactaaaaatacaaaaattagcctggcatgatggtgggcgcctgtaatctcaggtatacagactatacctgtagtcccagctactcgggaggctgaggtggagaattgctttaacctgggaggtggaggttacagtgagccgagattgccctactgcaccccagtctgggcgattgagccagactccatctcaaaaaaaaaaaaaaaaaaaaagaagaagaagaagaaaaaaataaaaaaaaaagaagtgagctatcaagccatgaaaaggcatggaagaaaattaaatgtgtattactaaagtaaaagaagccagtctcaaaaggctgcatactatataatttcaactatatgacattttagaaaatgcaaaactagacagtaaaaagatcggcaaaacttctctgtatgatgttataatgatggagaactgtcataaattttttcaaacccatagaatgtacaacaccaagagtgaactctaaaccatggattctgggtgataatgatgtgtcaatggaagtttatcagttgtaacaaatgtaccactctagtgggggatgtcgataatggagaaggctaagtgtgttggggggggggaagggagtatatgggaaattgctgtaacaggctcaattttgctgtgaacataaacttctctaaaaagtagcctattttaaaaaaatcgaacaggaaattagaaaatattttgaactgaatgaaaatgaaaccatattttcaagtgactaagatgcaacttatagcaatgcttagacaggaatttgtagcactacatgtctatgttagaagagaagaatggtctcaaattaataactcatcagagattgtcataatcatcttcaaaatgtctgaacatctttcattaaaaaatgtgtttctttcatgttgtgagagaagatagaattaggggtggttacttacaaaaaggaacccggctcttaggatagaaacaattgtcatacttcaccagctctaggctgagtttctttagcaagacatattcctttagatattcataagagttcttttaaactgtttctgatataaatggtaatgaagaaaatattttaaaatattaacaggaagtaaattgcacatttcaagtgatgtgttgtatagtaggtaatgcaatataagaataagcagtaattttaaaagtcacagaactgtagaatgagaaggtgccttaggtattgatattattaagtcaaacaagagtggcttcagctcctgcctctttaatatcaaggccttggatgaaatttttaaaaggaggtgaggacatccatttaggttttcaagtgaacaaaaagcagtataaggagaactaaatcactaagtgagatattcagaattcaccaaaaaaaaaaaaaaaaagaaaagaaatctcaggctcaagggcgaccaggaatattccagaagtacgtctgtactagataaaaggttggataaatgtcaccttctctgcaaagccttttctggttctctcagtcttagtggcctctgtcttcccacagtattctgtacactctgtactgtggcatctctatgccaccgcccagtaatagggtgtcatgaaaaaatgagacaaggaataaaaaataaggtttgctgtttaccactggcagtcttctcttgtgctacataattaatctgttttctcttagtaatgtgagggtcaacgaagtaagatatgtgttagttctttgaaaacatgaaagcactatctacagacaacagatatccctgtgtgtatttttctcttcaagtggtaacagtctgtgaatttcttcttttaccaatacatttctactcgaaatggctaagtggcaagaagtaaagctgaattgtgcagaaaaaccacactgctgctttatagtagcaaggatttgcctcaattagccttttaaaacgacacttcaattagtgtttctgttttgtaaagtagcttctttctcttttataatagtttgatcttggttcattagttgtcccccataaaatcctagatttgaaggctaaacttttaatgcaaggaatcatgcaatctagagactgaatgttaaattttatgtctttttctttaaaagaaatttttccttttaacaagtttacactgttttgattttcagcattgataatagctataattattgatctttcactgtatgccaatgctgttttaggagctttatattagttatctaatttgatcctccacaaaccctgtgaggttattattcctcttttacaaatagggaaactaaggttccaaaaatattgttaattgcttaatttataaaattattacaaagtgacactaaaatttaaatacagatctgactccagagtccatactcttaagcaactacctcattgaatggaagtggtacaacccattggcctcaaaaactaggatgacttatttaatataaccttggtgagagaactccagtgaatgattatatccccagtacatggtagctggtgtaatggaaacagcatgagactcaaagatagaatacttgaatttaaagttttaactgctgattattagttctatgactttggcaagtcaatttacctctcttgagcctattatctcctcattcaaaaatagattaataaaaccatctctctcaggtggttgtggcagagatccaatggataatgtttctcagtgttttgtaaatgcttttgaaagatacgtaaatggattgataagtgtttttggtcatttgccaaagactttctttcagtagtatttttcctgagtgcttttaaaaaacaatttgatttatagaaatgtagcaagtttccagagaacctctactgagttacagggtgatcattatataaggaagttctactcataagcctaggtttctttgatgagatacatagtttttgaggaatggttatttcatagtactgcgtcaaggaattcacagatatttctgtcgtgattttggaagagtgggaagacagaggggttaaatgtgtcccctaggcccaaagcaagtcaatgccagagttagctttaaggttcctaattaattgtcacaccatttttgtcacaagctacctttcctgtgcagttgagagttctgtatatgcaaagtccatttctgtcctaatttgaatataagggaatgtcttttctccttgagggctgttcagctctctatacaaaatagcatctttgacagtccaaggtgagtaattggtgaatagatggccctggaggtcactggtgacctcccccgcaaccccaccaccgagatcagtactgatgcctgtgggcacgtgggaaggttgtgttctgcctcaccgagtgggttcatacctttcgttccaatattgtttattttctttttggtttcacaattttgaaacttaacccatcgattcccatgtgtactcaggattagtgacaaatggaacggagcacaatgaaatgaaggcattttgttatagggttccatgaaggtgtgaaataagcaattcagaattcaatggtgaatttggaaacctcttagttatatttgttccgtgtaggtaaccagtcagagtaattcattttctttcatagtccctcttgctctctcctctctccttgactaaccatcctcaccccaacaaacacacaactcatttatacacaggagcttggattacccagtttgggtgattacctggatccaaaaaaacctgttatatctctgttcacacttttgttgtacaaacagaatttatgcaaactaactccatctttaagttgtgttgctttctctggagatcaccccttagggtaaccctagaaactgcagctctggagatcaccccttactaaggtaaccctagaaactgcagctctgaattcatcacgttgtagtagcttattgggtgtagccgactggctttagcacagcagtgaactaatagaggctgcgtgtatagccatcttcctctggctattagaacgaaccattcgattgagaataaagtttccatatagtttgggtacggtgacatgaaagaagttgcagattgttcagtgagactatcgcttgtagggttgtaggatggaggaagaaagggagagtgagagggagaagtttatttatggaatgtcagggggccattgaagctcagcaggccctagaagcagaggacttccccccgtgcttgttttctccctctgaccttggatgaactagcgagcagtatattatgctgggtgattgtgctggtttgtcatggttagcattctgaactgtcactggaatgtaggaaacggatgaatttgaattaaaccatgaggtggtctgctgagccctctccttgtctcaaggaaacctgtcgctgtttgtctgggctgggcctaatgaaagcaatggagggaaagagaggtgggcctttgatctctttgttgcagctgctccctgggaactcgctgaaatcaatgccctgttttcctgaaggaatgaatggctctgcctaactagctttgtgaagccgtggggaattcactgcctctgtttattgacagctgaaaaggagcacatggggtggaatggaccttcttgtgaaaaccaggcacagggaaaattagacctcaatttaacacagaggaattgggaaattcaccccaaaggagacgggagtttctcatgcttacattagaattactcaagtttggggctagtgtgtaatgaacaatggaggttttgtcacaactatgttataagtaggaatatggtctgcataataaatgatgttaagtagaagttgattctccacccgccctctttttttaaacacagaagtagagtaaaacaaatattaaccatgatacaatcaggtgattcttttatttttgccttgagaggaaagaaaacagtgatacagtaagcattattgatattatatgaaactctctaaaatccatctttcattcattatattttaaaacatctttgaacttggaagctacgttccactcaagccagtgattcatgccattctggattgtgtgtattgcatgggaatattacaataatatatttattttaaaatatttatattcttgggatattgtaactggaagtgtgtgtcaaacagaaactggctagcagaccaagattagcgcctgacattataatagttgataaatcttaaaattaccacctttttagaacacactaaagaaaaagtcttgagattatcacaaggaaacatctctgagataccttctttcacatctcccctcacttgcttgatttcccaggaagaatttatggcttcttcctttggcccccagccctttgtgtacacctctattatggcacttaacacatggccctgtagctctttatttaggtgtattcttttagctggaagtaaagcagctgtgttgtattcatttttatatctcaagcctagcagagctcttggctcggtaaatgcgagctgaatgaatggggattgatggctctgtctacattcctttgaaagtaattacttatcacagtttcaactgcaaatactaaattttgggagaacctgattggtctgctgttacctgattgttgctattgctttttaaaattcttcctctgcagagaactattatgcccttttttgctttagcaagtttgtcaggcagtccacagcctctagaaggaagcatcaccagtgtgtggcatttttcttttcagatccaagctctcttctctgttattctttcctaaaaataaaccacaacgtaatgtttagatatttccattaatgagatgaaaaaacttttcatttagaattttgtagacttttacttgaccgaatttagtgattgagatggataaggctgccattttacatgatttaattctatgatgtaatgttaaataatagcaaaagtcaaaacctcccttgacaatttctttaaccagatttactaccattgcatgttttgaattccttatcagaaaaggcaaacaaacagctttgcttcttagtgaaaagtctaagggaaattttgattctgaagcactgactagtctgatttcacagaacactgggacaaacccaatttcttagctattctcaacttataacctatttctttttaaagccagagctggaagtgggaaattgttgtcaacatttattgggaaaataacatcttaaaatcataatggaaatttttagaaagtgttgtaggagggagtaagtaagcagacaagtacaggaacgggctaatactttactctccatgttatttttgttttatgttcactaccaagattatttttaaggaaacttatttgcacttctgttttgattaatggtagaggtaaaatttaaaatagaggtttacacatttgtgaattgcgggaggaatctcgtagaggaaggggcatttgtatgggttgtacaaataacgtcgggtcagcgggatgtgattctgagattttagatttctcatgaaacagaaaaattaccatgactttgatcattggtagactctcaccctcataagtattaacttgaagataaaaaaaaaaagcattaagcatagcacttagatttcataacttggctgctcaaccctcccagtttctggaagtaattttgtgtgacataataccaaagtagggagaggcagagagtggagggaaatgtaggaaatcaaactgcacttttccatttgatgtttcagctttcagcagtgaggcatatctttgtctacattaataaaaaagaactacagacaggccagggaagtaactgcagttaaaaattgtggtcttgctatgcttatagaatcagataacttcaactatgtgattcttcagaaaagagcctttttcttcagactgaagactgctgtaatatccaagaagaagaatttcaagtaacttaagagaaaccctcaaaataggtttggggatggacatatgttatgtctctgtgtttacatgtgtgttaatctacgtaagctaacttcctagtagaaaaataccagatatttccctcttagacagtttcccgtccacccagactgaccaaataaagcagccctaataaacgtttatctagccgttgaaaacaagacatcctccttacccactagatttagttgcaagaaagctattctgaaatacagaactatctaaaattaaataatgtgtcagttgtataagatcagatatgactattataaagatcatctgtaataattagatacctaatcatttgtagttaatcatttgtatgttaatgaggttgttaaaatacttagtatattttcagtagtttaaatgtttactttgcaacattacatattgccttctttagtgagacatttttctgcaaggaaaaacctcaattcaggaggaaaaacccaaactcagcttatacctaaaagtttatgccttttgcattagtaagattcaaattgatatggtttcgttattttaaaaacacatacaacagcagcctttttggtcaaggcacaaatgtgggctactcagagaaggaggttacttagggttggtgctcaagtattcatccaattggattgcactgctaatcagtaatgaatttatatctgtggaggtgagggttgatgggtttaagttattgatctatttcctgtcttcattattttcactgaaagctatatttccatctcttttcagtctgtaaacattttgctgctgccctctcatcatttgctgtccagtttctgtccttttccttatctcaaggtgaatgattgggtctgcacagcaaattcttttctccaggcctctgctgataatagtggtcttgactttaaaaaaaaaaaattgaagttaagccaaagtggggtgtttttttcccccatattttgccttttagtggctttttcttccctccccctcttcaccctcatccctgctgaggttcttgtttcccttacccaaaggaatagtgttcttcttagttgacgctcttaaaaaggttctgacttaaaaaaaaaatttttttttttttggtagagattgagtcctgctatgttgcccaggctggtctcaaactcctgccctcaagcattcctcttgccttggcctctcaaaatgctgggattacaagtgtgagccactgtgcccagccatgagtattttgtaatttctgcttgaggctgtatttttacttggggtctctgaaaaataaatacaaatacatgaatactccctgcttaccagacagtgtcaagcatttatctcaaattagtttatttaattctcaaaagggtcttgtgatgtgggtgtaatcgttatctccattttacaggacaggaagctgaggtagagagagaaaaccaattgcatgaggtctctaagtggctccaggtggcaccaagattggaatctaagctttctggcaccatactgtggtcttaaccacatcactgtatagcctctctaaaactaaagatcccttaaggactcaaatgggtgcctctggaatgctgggatatggcattatagcatagcatgtcgatggagagagatttttgacccctggtatccttgaactcatattctgattaggtaaatgtcagcattcatagtaccaatgtgttttttcttgatgctttttttttttttaaacttttgatattgtttttcctttaggattgctgtcacgtctaatgtggctgctgcctcgtgtcacatctgaaactcatctgtacctcacttagaaaggtaaatacgtctatgcggaaccctccaactcctgccccccagtgctcctgccatcagtcatggctctgtattcttattctctcctcgcattacagcacaaaccagagccttcgcctcctccatggtagaggggcttatgtcccagaaaagactttgtgagagaatttacatttgaggaacttcaggccttgagggggaaaataaggttgggggattaagatgtggacttaatgaaagcctgtttttcactctaaaaattcaagaggacacgctaagaacgatcattgctatttatctgtcttaaattagaaatcatgggcattgtacagttgatttttacttatcatgacttgctcactagaaacttcgtgatctctttctgttatattttaaaaagatgtttttaaatggttttatcttaaagaaatattaggaaaaaaaaaactgaggtagggtccaccatttagaatcagatatctagaatgtaacgtatgttacaattcagagtctctaaaccactctcctaaaatcataatatgagatgattctcagcttgccaaattttctagagttgtgaaataggttatgtcactcaaccagtgtttatttgagggaattcatggttggcagggtccccattatacatcagaagtttttatttcttattttctatcactcatgtaaagattaggatttgtttgaactgcctatttcaagataatgattccaaatcccagccttaaatttcatatctaacatgtttgttgtttttccctgtcccatacattaattctaggttcaaggccatgtcaccctaaagcagccctcacttcttttgcagctgcagtgctgttgcttaaccataactcttggcctctctccagactgtttttttttttttttttttttgcaaaatgtccttgatggtcataatggtgtattttttaaaaattccagttgtttttgtaagttttcttatatcccatcttacattcaattccccctgcaaacctcccactagataaaccacttcccgctctattctttgtcttgagactgacttctaggaaggctgtccacagctgcctcaggccgaaggctaactaggagaatattaggtcgtgtgcttggattcctgttctccaaacgattctaattaaaactagtccactacccccaccaacacgttcagaaggaaaaaaatgtagcagaatccccaaatgccctcatcacttcattataccatttgggtagctttatggcacctgtaggactagttcatgccaggcccatttgtaactgttttctctagttaaacatgatattgccattaacagcacattaaataggattacactgcttaagaatctaggaatttctcaaatatatgagaaaatgtgaaagcacagggataatagaaatttattttataaacacatgctaggagatggaattgtgtcatgatgatccacattaaagaaacatgattgaagtgaatccattatttatactctgactttccattatatatatatattactccaaaagaagttattcatgtttcctaattgtgagcttacccatcgtgtaaaattggccctaacacttattcacaggccacatctacttcgtacatgtactttgcctctgtatgtacacgtgtaacgcataaccgtatatcagctctgcaagatacatagatatccccattttatggtgacggagactgaggcttagagaagttatgcaacttacctaaagttacacaccttccaagcagcagagccagcattcgaacttagacccatctgactccaaagccagtgccctctacactagaccacactgtctttcttaggttggatctaaaaaaatactaccagctggttggttttttaactaactgtaggaacacaacctagtattaagtagagtatgcatgctgcatagtggactgaggtagagtaaaacccattattgtaccacttttaggtaagaaaatgtattatctaaggaatatcattaaaatttccttacttccctccatgaacaaacaaaaaattaaaatgaaagcagtgggggatgaagggaggcggggatcataacataggagtgttaaatattaaaattagaaaagaaaataatttctctatcaatgtttaaaatgctagaaattatgcatgcttatactataacaaagaatactttatttggggaataacttaattgatccatgatgtggcatttaccaaggtaatttttccctttttgttccagcagtaggaattagaggtggttcataaaacacacaatcaccatgtaaattgaaaccgcattaagatcatagtcatcttatgttgtttccctaaaatggttctcatttgccccacatattcaaatcagagtgcacaaagatgttgtgctgagtcagggaagatttagaatgctctgtgaacagttttatactgaacttcagagttcagttattgtacttattttttggtgtgtgtgtgtgcacagttgggttttttgtttgttttgctatttgaattactgtttggccattttaatgtatataactgataaatccaggaggataatctgtatgtctgctctctcagtttctttctataacacaagcctgaacatattgctctcctgattaacaactttcagtggttctgattagacaagacttttcgttgcagtcgacagaaacctaatgggaccattgaagaattccaaacaggcaagtgacaggaacatatttgcatgttagaagaatcagcctggcagcagcattgtgattagaatgaaggggaaccgtccaaaaacagactggggaaccaatatggatctgcctctagcatgcggaaatatctctctacactgacctaactgactcactaagcttgtggtttgtttaaaggaagccacatgaaaattgagtttgggccaatagagtgaactcgttctccattctctagcatccctccccatgcaaccaccctatccctgccaagtttctgggcaccacagattggaaagtagcctcctgtaggtatttgcccatgttaagtggtggggtctctttctgtcttcccttcttggtctcacctgtctggtgtgacaagggaagcatgtgccaaccaaggctagacccttgtgagaccagagcagccccactttcggtaaagcaagcaacctctgcttacttgcccaacacaccctagcttccgtgttccttgccttgtgagttatcttcttgggtacaatttaacacagcgttcccacctccttataactaaaatagctagagggggctttgtgcctcaaaccccaaggagaccatcttggcaatctctgcctctgcaacagggcacttgctccctgggcaactcctttcccaggtcatcttctcccttgacatgcccatcagatttaatagtgtgcctatttggcagaaaaatggggtcccttggttgctgattcttaggaatgtgaggttctcccagccagagctctcagcactaaaagttctagtctctgcgtaatggccggcatatctttggcgtatctaaaatcctcttcagtttccagcagggtctttataagcttcttctgaaggtctcagacattcagccacggaactcaagtggaatttgtttggataacgtgactgatttcaaagcccggaccccttagacgtgcccatttggtgctgcaagtactgaccattactacaacatcttacagtcaacaaatttgacacattaaagatttatatcctttcttttgggttaggatcttctctcccctaaagcatctcagtttccagcatgcaatcatttccatcttatggaaatcagccatcccgctccgtgccagcatgctaccctgggaggcacatccaggcttgggaaacgggggtgtcctggatctcatgactccagcagcaccagctgctctctttcctcttccaagtagacttccgttccccccccacttgggtgtttttgtttgttttagcaattcagagctcaagataaagaccttaaagataactttgtgtgtctctccctttctaggtatttgcataggaatcagaggagttaatcttgtgagtatactctaacatctgcccttgtttccttccttccttctctatctgcctcaggggtttaaagcataagcctgctgccctccccgccaccccgcccctccaccctaggtcaccagagcgtatgcagagtccatggtcctctctctaacgaagcggtggccttttttgaaaactagattggctccagttccagcagttgtagctagtctatagcacagatgtgcactgttctaagattctgcactttattgaggtgccccacaagtctgcatttcacctcagagtgtcaactatgcaagaagcattactgttttcattccccataatgaaaacggactccagtccccattctgccaacctagaggaaaatttcatgtcagtaagatttaggtgcttccccttcccccatggagtgtgtcctaggacctggagattttcatggcctctggaagatgaggaacccacctctgaccttcagtttatcaaagtagtgatttattgaatccttgtagctgtctgccccagggccgccagtgagggctggaaacctcctgcctcaggtctggcctcccgaggcacactcttcacgtagctgtcttctcaaggattctactcattgccttagggaacagaggggtgccagggcctctattgctggggactgacatacctccttatcaggccctgggatggggggttggccatggggggatggaagggagagtgtcattttggcagcttctcctctgcttctccttctcgcctcccagaagtccagcagaatttcttctctgggtttagatattgttaacaaagacagacttcttcagaatgcttctgtcttcagctggatgaaaatacaagggattacaaagcctgccacctgttttaaatgagctagaaaggagaatcattgggaattcaaacaaagtaaaattctggagttgttgtgctatgctgatttggaggccctaataaaagcaaaacatcacccaaacagcaggtagctatgggaattaagagaaggaaatagatttgagagacaataaagttgtaaagcttaatctctgagaacaatctagactgcagagcttctaagtttggagaggctgggaagtgacatgggaagaggttgacttttgacacgcaccctggattctacagcaagcttaactgcttgctggctgtaggatcatgggcaaatcagcataacttctaagccttactttccccattaatcaaatagggttaatgctacctactcatgcggttgttgaaggtattaggtaaagttcttaaaacagtagccatcacctggtgaggatccgggagctctgatggctattgcatagcggtgccattagctagaacaggcagtgctggaggaggagcaagtctgtgggttaacgtttgaagccccaccatgtgaccttgaaggggcactgcaaggtatcccgagagctgcgggagggaggtagatgtattagtctggaatttgaaagaaagttcaggattgaagatagagatttgggaggcttctgacttcaaggagtaattgtaaccttgggttgtgcatggggtcccccagggagatcatgtattaatgtgagaaggtagaagaccagctgccaggcccacaaatctattccaacttccagcaaccccttcataccatgccccccagtgtcacctttaaaatgacatcattgcctggaggtgaatctgaatatcccactcaggcttcatttcaaagaaataatctcattgttcaccatgatccatcttgctgaaataagatttagttgtctgtaatctaccaaatcaggtgggctcctttccatctggaaaataaaataaaacatattcgagaggcttttcaaaaacaaaccttgtacatcttcagcctagaggattctttcactgaaaaccagggcagacttcccagtgtttgagggttgcccaattctttcccactcaaatcattagaaataaaaaagtcagtttggagaatttgcttaagtaaaaccaggagtcgctagaagtgaatgagctgaaactggaaggaaatccctttgttcaatgtgggtttcagtgaatgcccagcaggcggctaaaccagttcattaagagagaaaaagacgggttcttaaatgctgttctcagaagcaaatgcctagaaaaacatattgtgacagcaaaaacacatcctggaactcatacactctatgaaactttggtttttgtcatcaacgaataaacaaactttccaaaaaatatttcccccttcatttaaaacaattaactaatctgtttaccatctgccagtcttcactcccacaaaaatgtgattcttcttgttactctggaactcggaaacatttatctttaggattgtttaattttatagggtcatttttaaccacatacttaaaaaagaataattgacgtatgaaaacccttttttccctctgctttagaaatctaaattctgacctgaaaagcaatctgcaagtagcatcctgtcaaactgagatgtgttatttttcctgtctgttctctgctttattaaatcgtcatatactgcacatgattttccccccagaccaggcctgccttgggctctctgttgcattgttaactatttaagcattagactggcgcagagatggcaggtgggaaaagctgagggatttgatctcctccctgccagagttctcctctttcacgagtgctgcttacattgaacagcttaagaataagctcctgtgtgagcccttggaggccaaggagtattgttgaattcagaaaggaatcgctttctttttgtgataatttgaatattttgacaatgaagctaagctacttcactgcctggtttgcgtacctcacgttatgtgcaccctttcctgggaagcagaagaacccctgcctctttgaatacataaattggtattgtccgtttgtgagatgggtaggtgcaaaggaagaatcatccggaagaattttactcttttgctttaatgtctttttaaagctctttcaaaaaaaattttatacaagcctttggagaccacccaattaaaccagcacaataaatgttgagcattttgaggaaagagatggaccataaagatgatttgtaaagtgtttatacaagcaaaacaaggaatatgttggaaacaatttccctaaatgactcaggcaaataacctgctcacctccagtattttcctgtattgtgatgcattaacgttaaaaacagttgtcccaaaatggccttggtttttccatttttaacttaaaaggatgttctcatacaaaataaatggacatagcctttttgatcaaattcacagaagaaaataggcaagtgaataaatcacttaggcgagatataaattggctttgttccatagcagatttgcctttgtactagttaagaaaatcctgaaaagctttccctgtaagaggatcagttggttggaatagccttggtaggaagaagccaagtttgataattacttggtgaacggaaatgctggtttccaaatgctcatcagggttcagtggcacaaagctggctgtagacttggcttctgtagatttggtaaaaacgtaaattcctggggtcccagtgatgctgttttagtctgtactgatttgccctgtggccacccaggaatctgtatttttaaaagttttccatgctgattctaatgcatagccaggtttagtaaccatttaattcagtattcaacttagagacttcaaccttcttgcactgcaaatttgataaatctttgtttatatgaatctcctttgttgagtgccaactggttatttgctgactttctttcaattcagaatttgttttaggttctgttattgcatagatttgcatacctgttttatggtattttaatactgttggttttaaaaaataccatttcctctgagtgctgttctgaatatattatgtaagcaattttgtgtgttcttttttttccacttgcataaagcaggggaaaagttgagagtttttcttaatccagttgcaagtaggacaaaggatatgagtgtttaaagatcatctattaaaatgcatgaaaaaacactagaaaatctcctgtgcacatcgccagtcgtgtgtgtgctctagaagtgaagttcagggggtaacataatggaggaatgttttcctagcttcattccctgacgatgtacaaggtctcttctcacaggtttgaatcttcagacaaacttctgggaggactcggtccctgcctcgcagcagatgttccctgtcactcagtaggtgcgcatgttttaagattatttctagttgggcatgtttattaacgattgcttggaaacacatcataggcaagaacatgctggaggttcagggtacttcaaaaaggttctagtggaaaataaacacatttcctccacaaactgcagaatacccgagaacagggttcttttagccctttcattttttaaagctcagtgcacatgtgtttcagggaattggatgatgcagttagcaacttttcatgacctctgctgtcccacatccacagcctagtaatacacatagatctatggaattttctgctgacaaccctgtcagttcaaaagaagaaagctgcccctgccaacactcctaacttgtgtacataagatgtgtaagaggttgtcctgtctttgtggcagatgtcgactgaaagataagcctgggaaagatgctggtcgcatcccagccacatgaggcaatccagccatacttcctgaggctttatttgaaaacgctgttgtaaagcagttgctgaacttcactgctcatgtagacagtgtggctagaagggatggcaaagcgtaggttgaaagagcacttggcttagttcagaacacctgggagcaacctctgttcatcatcattatcatcatcaccagtaatgatattaatagaagctaatgcctttggggcactcactctgtgctaggcgttttgcttaggacagtgtattacttgcagtatgtcattagtccatgctgatgggcagtaaacttaaatcctctgagcctcagtttcctcatttgtgaaatggggacaatgatgcccttctacctatctcttagggctatgagatggaaattattggaatagcatgagagagctttatgagctcaactgaaatagtttattaaatagtattccgactcctactgaaatacaatattgtcactaaatatttggatttattgaccaagaaattgaaattaatcccaacagggccaacatatctactaggacctagcagttctagttagggctgggagttggggtggggtgggggagcgtcttgcctgtatcttctgtttacagtgtgcctgacattagaagactaggagtgctagccaggaagatcctggaatgtgtctgccgaagtattcagtggcgagtccatgggctgcgaacaggtggggtgtggctaacacagcaggccttgtctgtctcaggagctgaagggggccagccaaagcagggtggacagtatgattgcaaggcaagcaggggaggaagagccacttgagacattgctctcagctgctggggaggagctgcgagcaggcagcggtgggaaattgaggcttattgtgagcaaggtgccggcctccggggcgacggggagcgcagagcagcacatgaaagctgcctgcggatgagctgggggatggaccacacatgtggattgcaaggacagctactcagagagttcacattcctcccccattgaactgggtatgattgtaatggtttgttaaacaaacaaaggacctaaagctgtgaatgggagagaaaaaagacttaaggtgaaaaggagaagaggccctgcttgctagtgttccactctttttaagctttctcccccatttccttaacattcctttcccctttcagaaaagccagtgttgtcgcttggaaaacttgccttgtctcttcagtgccattttcttttaaaatggaaacctgatgaaatgttaatcagtttaaaaagaaaaaatcaagaatcaggataatcttaaaggaccagtgataaatatttttatttctcaaattaactattcctggatgaacaatttgctttgcatcctttgaatttattggacatgacatggaaaggcaaagagaaaattctcaagcttcttgaaataattgtgtctaataaagtacggcctgtgtcccgagaggcagacaggcatgcttctggaggaagtggagtgagcttgggaacaggtgcagcagcttcacttttctcacataaccatgcatgtacacagtttactataagttctggatatttctacatcgagcttgaaaagttactgcacgttactttaaaactgcccatcaaatttgtgtctagggtaatccgatttggtcttgggttcatctcatgtaaaaagaaccagttagcatttcagaacagtacctttcaatctgctgttctctccaggtaactgagttacccatgggggagggataagtgattatatgtaactttttcctctctgcaattcatctgtagatgggacatcctcactttcactggctcccagttccctgtaggataaacccagtgtcccctgccaggtgcactatccctgttattggttttctgacacaggcccctctcctgcccatcccagccaggctgcaccacgtgttccacattgccctatgctgcttcatgactccgagctcttctctgttctcccctctgcctctgcaatatgcctcctccatttgtcaaccgggtatactcctagactcagcctaagtagtcattatcaaactttagaaagtgcagatattcaaaaaataaacaatgaggtcatctataaatccagtgtcaagataccctgctcccatgtagttatctgtacttcaaggcctttttctgtttatttagtgatatgttattttaggatcaaacagtccacccaagtcttgagcatcctttctagatctcagatccttcaaggtcattccggtgattttcactcacaaaccaggcatcccatggtcaatgtaactaatatgcttttcacatttctcttctcaatgtgagcctatatcctcacacacttcctgagaaagaaagaggcttttctttcccttgaatgttaaccttattggaaaaataataggtcctgctgctaattagagttctggttcctccatgtcctacacttaagagtcccaggaaaagagatcaccgccatcagctatagaagcagaccctaaaagggcctaaaggcgagactcaagggtttctagggagtgaggagggggatgtattttcagctatcataaaggaatgatccccattcctgactgtaacaattagaaaatcttcccctaataccaaaggctcttgtctggattttgggagttgctctccacccctcacccccccaccagactcctgagagtcttcattcataaatagtcctcttcaaacaaggcagtcccatctcagcttgagaaccaggcctggacttaacccttgcctttctcaatgcacacatctattttacttgtagacatttgtctatttttttgtgactgtttctatttaaaaatacaatgcatatggtggggagaggtgaggaggcctgtcaaagatccaagagtctgcaacaatatttcttttcctccgttccccctggtgggtactatactggatgacccatctggaagaaggcctttggccctttcgtggggatcctggctgtcccagccccttgcttccgtgctatatggatgaggaaggccagtggtggaaggggccccagacctgtgagagatgaagcacttctggggtgacagatcccagctccctgctcatcagagtcatcccttcccccttggtagttcagcatctctcagtcctctgtggctctccaaggctcacattcattggcttttgccttttccatagcttctctggacttcttcctgtttcagttgagaacgttttattggcatcctctacctctaccacctcactccatctccatgtagatgcagtcaggggctaggcttgactcaataggttagatatcttcaatctgctaaatatagcaaagaaaagctcccatctataaaaagcctaccttcttctagtagaagagataaccaaaagatttttgttttgggtttgtttgtttgtttgtttattaggatcttgtttgtactatcaccatctagaagttatttaccaacatcaagtttttgaactcagacttaattctcattttgctcatttttatcaccataggcctatcagtagaccatcttatccaagaggagctggggggattttgaggcagaaggctgcttctgtctttggagctctgagaattccatgcccccacaaggctgcttccatccgggctacagtgcagagtagatgacctaagggagtctcagtctagctgcagcctgccataaagaaaacaaattcctccttacccccagggctagcccacttgaccaaaccactctaggaggaaaacattggtgatcaaggttgaacacgtgagtcactgacaggatatgaggccacccatggaaagctcagagtaacttataaaatcgcctgtataagttaggttcagaaaggcatccgcttccctagactagaagagctcctgagccactccacgcttcacgtctccttgctggcccgaatgcccattaggcaccattaagcccagcatgtctaaaaatgaactcctaacgcttattttttgctgagtttttcttctgggatgcagaagaaaacctctctctgccaccaccattccctctttcccctaacctcagtcctaatccagttattctgtttacagagtgtcactggaacctgccctctctccttgtgcaggcctgtgttctctcttctgagatctggcagaagcctaaatgatctcattatccagcccaccaccctccagcatgtcttatacgtccctgccagagttaccatcaaaaagtgaaatctggtggcaagtccactgcttctgatcggtccccattgcccagctccctggtggtgagcgcctgggtcgtcctttccccttggtagtttggttttgtcagttttctgtggccctttgaggctcacaatcacaggctgaggctttccccactgcctcttcccattcctcacagcattttattggcattctctacctatttctacctcttctcttcccgccctcctcactgcatctccacataaattcaagagtttgtggctggacttgactaaatagatcaatctgctaaaaacaatttatgacaaaaaagcccaccttccccttgtagagtggacccttcacgattctccatctctctagcctgttttctcctttgcccacatctgcacctgtattccagtcttactgaaccacttattctccaggtggttggattcattcccttggcctgaaatagaccacctccctcttgaacacgttgtaaacttctacgctagcttcaacttttacttctctgtgacacctttcttgatctcccaagcaagagatggtcactgcctagacaaccaccacctcaagttttagtaatgattttcacttctatttatctgttttcatgcatatgtcattatagagcaatgtaattgtattctgtccattcattcctgaggaaacacatctttgaatatatcctgtccatgattccagtcttgcatattgtctctttccctttggctgggcactagttacctgtctttattttctggctaatatgatggtatttaaactatatttctgtttgtggatatttagaaatgcagctgtttgtgtagtttgatttttataatcaaacaccttgccaggctttctaatcttgtgtgtggattctttgggattttctatatcgacattcctctgcaaataaataattattccattccaattttatgcctttcattagtttattgtcttactgtatcgtattatccatgacttctaatacatgaatgtttcatgcaagcaatgataataggtaactttgtcatgtgatgaagatagtatactctgttttgttagtttaaaaatcatctcctctcctttcatgtttcttggtgaaatgatacatattttaaccatttagtcaatgaatgttagtctctggattatattagctgagttataagaggctgcctcatggtgttgactctcagatgctctctgggttctcaagtgttccccttgcaagtttgactcaaatgcctgtcccagcccctggggtcttgcactgccactgcctttttgttggtgttgtcctctttaaaaaataatatcctgctcttcttttaaggacctctgttctctctaggatattaatgattattatttttgaagtttccttccccccgtagtctttttttccccgttactttttgtgtcagttttccctattaagtgccttcctctgatttctggtgatccttggcctactaatttgtgagtcaagccagtaaagagctgatgggagctttgtatacttaggtggggcttgtcagctggggccttgtatagggtaaggtggcgacccctggaggaaaccccctttgtccttatggtttgctcttttctcttgggctggtcagcttcccagggaagactcctccatcctcctgccctgagagagaggacattcaccctgtgtcaggctactcccccactttcatacagtctccatagcgagcacttgtgctaggggaaggaagggcaggcaccccactgcaggcatcaggagaggtcaggagggctcagtgcttcactaacagactttcacctgctgctttcatacctgtttccatcctcacttccagaagtacctactgtaccaaattgcagagacatatggtagatgcttcagggtatagcaggttgttttgttgcctcttaatgctggcttaaactttagctttcttaggatggccaagtcgatcactgcttgtttacctgcttttcagcttccaaaatttgttgttttctcccttttatattaggctgtgttttagaaaaatcccactattactgttttagtagaattttcagagagactggagctacatgcttttattcagttggccatctttaaccaaatattacactatttgtaaacagaacacaccctgtcccttttcagatgttctggctaggatgtggatttgatgttccaaagctgtagcataatcatctggacagctttctcaattttttccctgaatattagagaaataattcactttgtctttcttgtttatcttaagcctcatttcttagaaagtaagagcttagtcactgggttaacaaaattcagtctttcaaggtgacagctgaaaagaatctataggcaacaaacctgatggctcagcaggtggctctctcagagcagaatagaagggcaggtagtgcttcctacaatgaggataaactagagtgaaagctcttcaaacatattaaggtggagatctctactgggccattgagtaaacacctcaccgtgtggaggaggaactcgtgcctctgcctggcagtgacagagaaaagtagaagtttgccaggtagacaagggttcccaggacattccaggagggagaaagccagaagcgtgagagaaagtagcactttaaggaaacagcaagtggagtgatccttggccttgccttccggccatgatgggagtgaggtctgcagccatggcagccatgactacctggaggttctggatatcatctttctcctgatgacatttctaaatagcttttttaaatttgatagagactgctaccaaagtccttcaaagaactgatattgagaaaaacacccttgttggaagaccaaaagtggaaattcactttcctctcagaaatgggccttgcattgattgtgtcactgaggacaatggaaatagatgccagaagtcacagtttattttaagaatgttgtaaagcagttgtgccccattagatgatgtgttatgtagcactggagaagtcctggaactacagttgtgttctgactcccccctccaccctcgtatacccctgtcccctgggaacacagtctttcctggctgttaccatatatatatgttcttcttcccgtctgatcctctctcatccccaaaataatcaacatgagcagaacgaagcagatggcacaagccttctttggcatactggcagatctgtatcactcagtatttttagaatcaaggggactgaaaattatgtcctgagatgttttggggtaagacttactatctttctagggtgacaggtgttgaaatagcaccgtatttaagactcaaatgcaatttctatgtcaagtcacagaacagaatgactcgcatcaggaccattgctctgtaagttctgttaggatcgttggtggcctgccagataatagaaagttgtcataaattgttttaaggatgtggccagaaagtgcattgggtttcaaccaaagattggactcatcagtaaacagcctttgaactgatcaagtgcgtggtgatgagagatgttgtatatacccacagttgttgttgttgttgttgtcgttttttaatagctaagctttgaccctcagccacaaagcgtttatagtctgttggggtagacagtcttgtttttacagaagtttattattatatcatgaaaacaaatatttgtattctaaggcccatatggaagaaatacatagttacggtgattaaaaattatgaatttgagttcattaaggactctctgaagaaattaaagaatgttcactattatataactaacttagttctgaggaccaactttgcaattagtattaggctaggtatattaaacacacagacctggaactcaaagccttgggaaaagatattcatgaaataagcataaaaacgagagactttgtgttttagtctttgagggaaacttgaagttggaggaaatgtgcctcacctttaaaccatggccatgtctaatgctcagattgtcccattcatctttgagggctcaggggaaatgtaggcatgggtgatgtccatgactgctggccttttgaatcttgggaagaagtggctggaaagagatctggaaaacctcattcagtgccaaagggcaagtttttcaattgaataagctttatttttttctttgtactcctagtgtgtttggtaagcaatgagtcaaggtttacatctgctgagaaagaatgcaggcgttttacttgccacctcttgtgtcctttctacacgtgtgttgtccacactgccacttctttccagtataattgatatggtgtagtatccatagggagagaatgtgtctctttcccattacatccatagctaaatggttagaacatgagctgtacattgacacatggttctatagtacttttaattccagtgtttcataaatactgcctatttgtagggtgtttatttaggttacagtgtgctttcagatccattttgtctcagtcgattgtcccagcagcctgtttacatacatcaggtaactatcacaaatgaggaaactgaaactcgacacagataacatgggtaagttggaatttgaactggggaatctttccactggattcacagaacaagtgcctggatttatagcttcagggtaaacacctgaggctcaatcagtagcacagttgtgtccaaggaaagcacagccttgccttcctctcctttgatgggaataccaagagtctgcctgtgccgtccaggacagcagccactggcactatgtggcaatttaaattaaagttaaataaagtaaaagtttcagtttctcagaggcacattttgagtgctcagtagccatcacatctgtaacatttccatcattgcagaaagttctgttggacatgccagtcatctcataaagcaagaattggggagaatcaacttactgagataagttgagaaaagtgtatatgcagggtgttaagtaggtgagagaaatgtaaaaccttccccaacaaagcagctccttctctgaaggggcgagtgggacgagtgctattttgagttcagctataaagggaatgagaaaaagatgcattttcaaacttcatactctgtgtgtgttagtcttttttaataaacctagaaagaacacagagcaattctaagtgaatgagtgtgttttatagctgggccggtattatggccaaacttaggctgggtgagaagtagaacagatcatgatacctagcagagcaaactcggcaggcggaatagaattcctagaaggagttattttgtttgtgaccagggctgttgaggattcctcaagatagggcctcaggcatgaactagaatactggaagggaaccaggggttgggggaaaggggtttgggcagagccgggacaggtaattagttaaagtcacacataattgcagaggttgtgtgtgctgctagaatcacagccgtcacaaagaaggtgtggtgccaaggtgctggccgaggactcctgtgtgtcccctggtttggattagcgctgaccaaaagtgcccgagtcagctttcacgtttccaagtgggtgaggcaggatggtgaggggtatttgcttggtaccgcgaactctgtccagacactgaaaacatctacaacagaagatgaggaactctacaagtttcctggaatttttgctggttagaaaaggaatatgtgtttggttatgtccgtgtgctacataatgctatatttaaacatgtttaaactgttattacaataaagtttcatctagttagactcatactttctgatctgaaagtaaccaaaaaggtaagtaaaaattaacttttaacaataaagagcaactctagagacatggcaataaatgactgcaaggagcagggagggctttaaagactcactgcaattggtcagtttaccatgaagtgccctgcttactggcaaagttcagcaaatgctggcctgtggacaaaagctactcaagtgtacttcacctaagcatacagtactcttaatttttttaagtattggcacttgaaaggtgagcatttgcccacctgaaaatctctctctagaatagcacagggtggtagtgatccagggctttaccctggcaggtagtggcaggtagaggccgatttgaaacctgctgtcagagtccagggatgaaatgtggggggttggtccaggtcctgagagtgaagctaggaggagacatctccaagtgtaaatttttggaacacagtttctcagcttgggtggaaagccaccctagtaagtggagtattgttcatgatgcaggctcagacacttcaggttcctccaatgatggccaattggtagaaaaagaagaacctggtttttggtgactctggctgagtcagaaggatgataatgatttgggtttgagacaagttgggtttgaggaggcagtaggcccatctcctggaggtggcctaccagcaggtagctggatgggccctccagggtagggccagggaatgaagaaaggtccataaacaaaaaaggaagagattagtagaacttactagaggatggtgcctacaaatctgaacgtggcctgggctggttcctgagctatcagctttgtgccaccacatcagtgcaactagactagactagcttcatgcacattctgtttatatcagcccttctgcagagtaatcttacaaacaaattgacttaggtgtatacaaattatttcttatcctctggaagtttaaacaggtgtgataagcaactaatgttatgccaacaatgagtgatgaggaagagcccgtggtttgagtaagtgtgggtgatttttgtttatggaccagtaaaaacacttgaacacactgagggagggaggtttttgtttgttgttgttgttgttgttgttgttgtttttctctttggtcaatggagcttcacactgacctgaaatagataatactggatccgtggaaagaactctccttaccagagggaaagtgtgctccactggccatcagtgcttgactcctcaccctctgagaagccaaaagtgtagacttgtatgcagatggccctctcacatggagaactgtgttccatgagcaccatttaaaggaacgtgttgattgtgggtagttgattctgaagcggtcagggaggaaaagcattgttttcaaatggctaatgcaagaaaactgttcctcttctctccacagccaatccgggggacccaggacatgccccagctatagtgatgcagattacctttctgctcctgaatcgcacctgtgcctcagactttctcccctcagcttgagactgcatgtaaactgggatgtgtgaaagcaggaagcaaagctagtgacagctgagaggtccatgtctgggtagaaccaggcccacgatgctgcctctcccgtggtctggagttcagctgcagggactctgctgatgtgcccagcaccatcgttctgtttgtgcttaaatggcacagcatttggtcagcacatctgaaaaggaaggtgtgagaagcaaagcccatggccacgttcccctgccagttatgtggcaagacgttcctcaccctggagaagttcacgattcacaattattcccactccagggagcggccgtacaagtgtgtgcagcctgactgtggcaaagcctttgtttccagatataaattgatgaggtgagaggctttggcaaaggtatgcacttttagaagtacgtttaaatggcttttctagccctcagaccacacgatgcaaggggaaagggacacaggatatggatgcattttagcctttgagggattcttgaaatctgcatccagtgattcctgtggttttatgtgaccgtcttgttgtgcagtgtcagttcattctttcaacagagattttttatgcacctacaatataccaggcctctccccatggctggagaaataggaaaagacaattaaaatgcaacctcactgctttgacagagctatacaggtggtagaagttgttcttcactgcctgatgaaacctgggacggcttctcagatggggacaatctttaagctgtgacacaatgaaagaggaggaggcagagaggaggttctgggaaagccataagtcttggccttaaagcacccatgtgcagagggtactatccgaggaggagcagatgaggctaaaagtgcaggcaggaaggaagccacgtatagcaggccttacctctgtctgagagggtttgtctcattcaggtgtataagtagtgaagaaatatgattcgtttagtatcctagaaagaggactcagataataatttgaagaagtggcaggaaggctgatttgaaacctgctctcagagtccagggatgaaatgtgggggctgatccaggtcctgagagtaaagctaggaggagacatctccaagtttaaatgtttggaacacagtttctcaacttgggtggaaagccaccctagtaagtggagttcaggtgggtatgcagatgagcagcatgtgcatttgatcagttttaaaggcacccatgacacaccaaaggataaaaagcactgttttagcagatgagtctttttaaaaaattacatttagtctaagttatttattgagtgcctgttaggtacctacttccatgagggaaatgaatacattagatatcgtttctgccgccagtggatctttttaatatcacaggaaagactccatgtacatgcagtggctgtgctgcacggtactgggactggtaatgagcatggtgtgtgttgtgtctgtgcacactcagagccacacacatagtgcgtccactcacacgtgctgcttttgatacttggttaagggaaatgcaccatttgcccttaatttcatgaaataaactttgaagtttcaactttgactgttcacatacaaacgcctggagagagccaggctttagcaagtgagattttccatctgactggtattaccatagaccacattatgaaatcttggagtgaccctggaggaaggcacttgaaagaattgaaaagatggaaattatgctcctggcccttaagaataccactgttatacataatgtaatgtaataagttggttttaaaaattagcctgcaaatgcttacatattttaaaattcaaatgtcttctatacatgggcctccctctagctgtcacgagtagaagtattgaatgctgatcacgtgcatgagtttgttgcagaggctccctgttttgcatgaagcttcttgcgtgtgcggagggtaagcgtccttacccaaacatgagagcagcgctggctgcaactgagtcacagtgaggacactaaaactgcagataaagactgagacacatagaagagatcaatgtttagaaaagaagaattagtggagtagaactattgggattacagttgacccttgaacaacatgagtttgagctgcacgggtccgcttatacacaaatatttttcaaccagatgcagattgaaagtacagtatttgcagggtgtgaaacctgtgtataccgaaggctgacttttcatacacatgtggtccacagggtggaccgcaggacctgagtatatgtgtatttgggtatgacaggggtagaatcagtaccccgcatgttccgagaaataatttactatggtaaactgcgctgaaaaagaagtcttaagtcatgtttagaaggtagttgttcttagcaaggaaaatggcttgttcagttaagggtgtaaagagaggcaaaaagggaagctgtcagtgtactttatgcaagaaccgccttccctgcctcagcccccagcatttcttgcctctcgcctctcttgcctgaagcagtgatatagtaaaggactggaagagtgtgagatggcaggatgctttcggttttgcttttaaaaaaaagatgatgcctgtaatcccagcactttgggaggccgaggtgggtggatcatgaggtcaacagatcgagataatcctggccaccatggtgaaaccccgtctctactaaaaatacaaaaaattagctgggcgtggtggtacacgcctgtaatcccagctactcgggaggctgaggtaggaggatcacttgaacccgggaggcagaggttgcagtgagctgacatcgagccactgcacttcagcctggtgacagggtgggactgcatctcaaaaaaaggatgatgaggcaacagaggttgaaggaaaaaataactgacttgcttaaccagaaaacagaatgtgggtcccagtacagcatataatgaaaccagttagagacaataacaggcaagaaaagatgatttggcaaggttggaggtcctaatgtgagcaatcaacctctaaataattctaaaatcactgacatgatccagatgatacccaaagatggtggcattgggtactgactctaggacatactaaagctgttttcatgggttataaggtaagatgaaaaactgagggaaagaaacaagtcgttgaagtaatttcagctataggatgagaatgttctagatcaggattgttgagtaagtaagggataaattaaaagggaaagaagtagatgccaggcaagggaaagagtcaagaaattcagaaatgtgggagctagtgaagtctggaaggcagtggtcttgctcaagtactactggggtgtcagactgtgccccacttacaggtagtacaggtgtaggacaggaaagagtgcgtaggaaataaccaggtgcagtcgttaacctggtattgatctacccatgggtgataaatgaaatcaaatcagatgaaagtcctctataatgaaagaaaagagagaggcacaaactgacccaagagctatgggatcctgttcaccagtactgggccagaaaaaaaaaaaaaaaggtttaaatactgagtgtgtaagccagctccccccttcatatgtattcctgcgatatatatatatatacatatggatatcctgcagaacaacatggctatttgccctctaacatgctctaaaaaccctttctccaacctgtgcatttatttagatagacctagaacgtggaaacaccagcacaatctggtttctcagatgcccatcgtattggttcctgtccctgccttacggtacccatcatgttatcatttatgtgcaaacaagctgtggtgtactggagggaagggaagggatgcacacagcaggccttttttgtttttgtttgtttgttttgtgacagaggaaggaggtatgaggttgtactttatttttaagaaaatgacagttcgattcagattagctttatattttttgaactggcttccagttggcctctaggtgggggcctccactcaacggctgctattgtagacccctccccaattctggctccacaaaaggggcaggaataaacagtatagggcagatgttggctgaaaggtgtaattaagtatacttttgacttaaacatactgtcttaaagagatcctatctcttttacggaatgagttgttagaaaatcttctgtatctaacgtgaaagctcacagggtacaactgcacttaaattgtcagttaggacaagctttaacctctcgtgacaaaacccctaaaggaggtatctgccctgagggatatgaagctacaagttgtaatgaaggattctgtttcataggacatgctaacatgtaatgctctgcattttagttattaaaatgaacctttttaaagcttaaggatgacaaactcagggtttccttataccactgagtttttaaaagccagtggtgagtttagatgttagcaattcagtggaactatgaaaaagatggaattgtgatggctttccataactaatttctgcttcacaaatataaaagagctattttgaaattccaaattgactagacagactacggcttgtccctgaagccattgttgaagacaaacttacaactcttattagaagtagcagcttcatatttaaagaagaaagtctttttgaattttgccaattaaattaccagtgacctttaagaagtaagtcaaaggtgtcttagagggaaaatttgaagtaacagagacaggcagcagcatcagagataagagctgatagtcaagcattgaatgaaggaaatcaagacagtggtgagatctcacggcaggcagaggctgaggctgaaagcaaggcagtgggctgatgttcagggtcctattagacacttttctgaggttaaggatggactttttaagaggctcctaagagttacatgtccatggcttgaactttttgtctcaaacaacagaaacataggaactaggaacaataacctaaaactggggctttatgtggttctgggtagcagacaaattgagtcacttgaatttccagagtacaaaagacccctttaaccccttcctgaaaaagatttttcatggtcaggtatttttaagtacttgcatactttgttcagaaatctgtatacattaaaaaaacatgttctctttaagaatattctggccaggcacggtgactcttgtctgtaatcccaacacttttggaggccaaggcgggaggatcacttgagcccaggagtttgagaccagcgtgggtatagtgagaccttgtctcaaaaaaaaaaaaaaaaaaattagccaggcctggtggtgtgtgcctgtagttcagctatttgagaggctaaggtgggaagattgcttgagcccaggacgttgaggctgcagtgagccatgatcgtgccactgcactccagcctgggcaaaagagtcagatcctgtctcaaaaaacgttttataggtgtgaaaaatgtattatggctttagtattgcttgcttttcttaattataaaagtttatatatttggaaaatatatgaaagaattttgaaaattataccaagacccagagaaaactattaacattttgatataatattgttgctacacctttcttcagctcttaaaacaactctctattgtgaaatttctccttctgctcctaggcatatggctacccattctccccagaaatctcaccagtgtgctcactgtgagaagacgttcaaccggaaagaccacctgaaaaaccacctccagacccacgaccccaacaaaatggcctttgggtgtgaggagtgtgggaagaagtacaacaccatgctgggctataagaggcacctggccctccatgcggccagcagtggggacctcacctgtggggtctgtgccctggagctagggagcaccgaggtgctactggaccacctcaaagcccatgcggaagagaagccccctagcggaaccaaggaaaagaagcaccagtgcgaccactgtgaaagatgcttctacacccggaaggatgtgcgacgccacctggtggtccacacaggatgcaaggacttcctgtgccagttctgtgcccagagatttgggcgcaaggatcacctcacccggcataccaagaagacccactcacaggagctgatgaaagagagcttgcagaccggagaccttctgagcaccttccacaccatctcgccttcattccaactgaaggctgctgccttgcctcctttccctttaggagcttctgcccagaacgggcttgcaagtagcttgccagctgaggtccatagcctcaccctcagtcccccagaacaagccgcccagcctatgcagccgctgccagagtccctggcctccctccacccctcggtatcccctggctctcctccgccaccccttcccaatcacaagtacaacaccacttctacctcatactccccacttgcaagcctgcccctcaaagcagatactaaaggtttttgcaatatcagtttgtttgaggacttgcctctgcaagagcctcagtcacctcaaaagctcaacccaggttttgatctggctaagggaaatgctggtaaagtaaacctgcccaaggagctgcctgcagatgctgtgaacctaacaatacctgcctctctggacctgtcccccctgttgggcttctggcagctgccccctcctgctacccaaaatacctttgggaatagcactcttgccctggggcctggggaatctttgccccacaggttaagctgtctggggcagcagcagcaagaacccccacttgccatgggcactgtgagcctgggccagctccccctgccccccatccctcatgtgttctcagctggcactggctctgccatcctgcctcatttccatcatgcattcagataattgatttttaaagtgtatttttcgtattctggaagatgttttaagaagcattttaaatgtcagttacaatatgagaaagatttggaaaacgagactgggactatggcttattcagtgatgactggcttgagatgataagagaattctcgaactgcatgtattgtgccaatctgtcctgagtgttcatgctttgtaccaaatttaatgaacgcgtgttctgtaatcaaactgcaaatattgtcataaccaacatccaaaatgacggctgctatatataagtgtttgtcatatggaatttaatcgtaagccatgatcataatgttaactaaataactttatgtggcactgcctagtaagggaactatggaaaggtttggatttctccaaatctgggagaattttcaaaataagaaaataacctttatatgatatactatgactaggctgtgtatttcttttcagggatttttctaccttcagggttggatgtagtttagttactattaccatagccaacctgtagttttacatatacattttcttgtggagcaatagagttctccattttacagaagcattttaaatgtagtttgaatattttccacaagatgctgcaatgtgagttatcacttcatttatcttaaagaaagactaaactggttgtcagttacatctgacagaaaaaaaaaaaaaatcactgtgtaaccaggttaagtggtaaaataatccaggcgtcagtcaaaggcattttgctgactttaatattgattatatttttaacaggaatttaagaaaatattactggaattaaaaatatatatatattaaacaagaattttctttgctctgtctagcttaaactactactcaagctgcttaagttcttaagtattgtttgtaatcaccaataaataagtgcatttgtaattcatcagtcattattagcttttattaaaagaagattacgttttacaatgtaactataatctcttgaatttggtatcttattaatgagttttaaagatgtaaaacctaaccttttttaaagctccattgtcttatgtttttagaggcttttccgtaaacatatatcttacatataataaacttttcaaatcttgcaa

SEQ ID NO: 349 - DNA, 70941 bp, Homo sapiens
gccccactcctcgctcgcacctcgctcgcgccagcccttcccgctcttctgttctcgctctatttgccccgctgactgctggcctcgccagctttgccagtcttacgtctctgccgcccccactcccgcccgcgccccatcttcttgcgcgactcgcgcccgctggtccccccctcctcctcccgcgtcctgcctgccccctcctcctgctctcgcaggctccttggcacccaggccgggaggcgacgcgcccagccgtctaaacgggaacagccctggctgagggagctgcagcgcagcagagtatctgacggcgccaggttgcgtaggtgcggcacgaggagttttcccggcagcgaggaggtcctgagcagcatggcccggaggagcgccttccctgccgccgcgctctggctctggagcatcctcctgtgcctgctggcactgcgggcggaggccgggccgccgcaggaggagagcctgtacctatggatcgatgctcaccaggcaagagtactcataggtaaggcccccgcctccagcgccttcccctgcctatgtcctcctctctccactcttcaagaaagagggatacctgcgtttcttgtgttttaaaacttaatttccacaaaagagtgttcccctcttttaattagatattttccatctgaaagcttataaacttctcttttaagaaaccaaagctgatctagtgttctgatcatgctgttgttaatttttatagccctgcgtttttaggtgcacccggcatttttttgcgtcggttaactccatgtccatcccttttccctgaaagcatgggtctgttggcatcattctcatcatccacagagaaaaattaatcttagtagcgttgatggtactgaaggcagatgcttgtgaacagaaatgacccacactaattctttggttttctttttgcttgaaacttctgatttagatgatttcaagtctacctggtttgatcgttttattattttaaaaaccaggatttgaagaagatatcctgattgtttcagaggggaaaatggcaccttttacacatgatttcagaaaagcacaacagagaatgccagctattcctgtcaatatccattccatgaattttacctggcaagctgcagggcaggtaagttctgagaaaattaccctttaatatttccactgccttatggcaggtggaaatagtactgtatagtgtgtagcctggtacattttacagttattaagagaaatttctcatctgattgccaaagcaaataaagaattaatttccatttatttcaagttgccatatcaattaatgatcttcaaaagaaaagaacaagccttgtgcctaagcccattattttgataagactcagtgtcctgaggctgctggaaatataaagacctccaataccaacatcactgtgtttctgtgatcattgacattaaaatttaacatacttaaaggactctttttgcatagtagtttctaatcacttgtgacattcttcatactttacaacaaattttaaagtttgtaagtatttttgacattgtgcacttttaaaaagtcagtatgttgaatgttattcactggaacgtgaatgttgcatatttctggtagaagttagacccaaaaggtgtcatgtaagaacgttataaaatattgcagcctatgttttcaagttaccattttaaatgctttcatatggaaaagaaaactggaatctattttttatgaagaagcattccttttattccttagcacattagcatcttttatatgttaccttttgtacatttttatggcttctaattttagaaagaaagaataaaatgcttatgtaaatttaatttcttttgtacaattggagaatttactctagaggacaaatggtaagcaatgcattcttcagcttattagttggtagaatgtgtctactatgaaaatcattataattataattaaaaccacatttttcggtcttttattctaaagttccttaaatgattattttcaagaagaatgtgataccgaaaacactttataaaaaataactattttgaattgagaaaccactttgtttccctctaattacctgttgtggtatagacatgacctttttagctgtctttttcccttcaagtctgttctctttttcttcttcttctgaaatagatcaaatctagaaccttcaacacttccattgctatgtggttaaaaaaaattgaggttttggattcactgaggtttataacaggaaagtcatctattgttaatacccccattttgcagataggttcatcgaggtttccattgctctatagggagattattccttttctccctacaagtccctcttcatagatacttcataaacaattaagttgggaatattgtgaaatcagtaataaaccaacgaatggcctttcattttctccttttcagctgaatctgtttacttatggctgaccgctcatcagatggtcattaactaagtggccaattaattctatatttttgaaaagacattttttaacctatacctttatgggttcgtaagaatcaataaaaggcagtttgaactgcacccttccatctgaaagggtttggtaactggttaactgtaggaaaagcagaaagtgccaatagctctctcgtgcgcactctctctctctccccctctccctccctcctctctctatctctttctctctcacttatgtttgtctgttgaagaatagaatttgaagcaaaggcttaaattccatgttgcttttatcctattgcttaacagtataatgcatgtttgcaaatattggcatactggtgagtacaaaatggactgacatgtcatacaatctcaggaatatgtcctgcagggaattagggaggagagtggaactggcatgaagaggaagtttgtaatatttttttctcctgcttaagtgttgctcacctatgtggatgatctaatgatgcaggacaatgttagcacctcaattaagctacctttctctctctactcattcggctttgaataggttaccacaactaactacataaaatctgctttctggggaaagggtggtgagggggaagaatctacacaataccaagcagcaagatgctttaaaatattatttttttatgtttaatattatttaagtatggctaattttgcttactaaagttatgtgatcccagcaccataatttttgaaatgcacagaaattctgaagatgggaaaaatgacttcaataccaattagtattttgaaaggtatctatggctaaagccaaaccacatcaaaacatttacatggaaaatgaaaatttcatttcattatctgattatttcatccaaatgatatcaaatatttaggcatttcaacaatacataaacaaaacacatagctcattaatgaagttttaaattttatatttaagtgttttagcaacatgtggacaacattaaaataacctcaggattgaagaccttatagaagcagtaaggtgttatttacttccaataaattattagtccagtaacgaaggatccccaacctctgggccacagaccagtgctggtccatggccttttgggaactggggagcacagcaggaggtgagtggcaggccagtgactgaagctttgtctgcgttgacagatgctccccatccctctccttactgactaagctccgcctcctgtcagatcggcagcagcataagattctcataggagtgtgaaccctattgtgaattgcacatgcgagggatctaggctgcacactccttataagaatcaaatgcctgatgatctatcgctgtctcccatcacctccatataggaccgtctagttgcaggaaaacaagctcagggctcccactgattctacatgatggtgagttgtatgcttatttcattacatattacaatgtagtaataaaagaaataaagtgcatgataaatatgatgtgcctgaagcatccagaaattattcctccaccgcccggtccatggaaaaaatgtcttccacaaaactagtccctggtgcccaaaaggtgggggaccactacagtaatccaaagtgttcttggtgccacttaaaatgcatctcgtgttccacttcaaacaaatgcaaataaaaattacagtgagattcatttccccacatcaacttcgtcagatcttttaaaagtggttttagtatgtggagaatagtgcattatcatatgctgctaatgtgcatgtaaacctttttgcagggctgttagactctgatggcaaaaggcagggtatagactttttgactggacaattttacatccagagattcatgccaaggaaataagcatggatataaataaaaatttaggtccaagagtgttcctcatcatgctgtttataaaaattaaaaaatagatacaacttagggtccagcaatagtggcagaataataaaatgaagcagttgtaaggatattctagacatccatttggggccatgggaagagtctcatacaaattaagtagtttataaaagtggtccccaaccattttggcaccagagtctggtttcacggaagacaatttttttttttttttttttttttttttttgagacagagtctcactctgtcgcccaggctggagtgtagtggggtgatcttggctcactgcaacgtctgcctcccaggttcaaacgattctcctgcctcagcctcctgagtagctgggattacaggcacgtgccaccatgcccagctagtttttgtatctttagtagagacggggtttcaccatgttggccaggctggtcttgaactcctgaccttgtgatccacccgcctcagcctcccaaagtgctgggattacaggcgtgagccaccacgcctggtggaagacaatttttctatgaacaggatgggggatggtttcaggatgattcaagtgcattacatggatagtgcactttatttctattattattacattgtaatatgtaatgaaataattatacaactcgccataatgtggaatcagtgggagccctgaggttgttttcctgcaactagatggtcccatctgagggtgatgggagacagtgacagatgatcaggcattagattctcataaaaggtgcataacctagatcccttacatgtgcagttcacaacagggttcacagttctatgggaacctaatgccgctgctgatctaacagaggcagagctcaggcggtaatgcgagtgatggggaacactcgcccactgctcacctcctgctgtgcggcctggttcctaacaggccatggaccagtactgacatgtgccccgagggttggggacccctggtgtataatatagtatattctgtttgattccattacaaaatatgttggcagatatagaaaaaattaacatctgatcttccaagatgtaaacaccagttacatcttcatctattatgttttggtttttctacaatgaattcatttgtaatttaaaagattattttacatcaaatgtgtataaacagtgtgtgagtttaaaattgtatgatgttttgtattataaatactttattatctggtatcatttttacactacttatcactcaacaaaatgataacaccaatgattttcatgggtcatcgtaactatggagaccaaagaatttattaatgctcatcagattctcatcaatttcttttgaggtccccccaaatctttcttgcctgaaatcatttttcctgaattctccctctccctgcaattcccattttcatggacaactttgcctccatttaaccttctgatactcattttctgacatgcctcctctcaaggcttttagatgagaaaagaatttctactgcaaaagcttagccttaatggatttttagtaattaatggaaaatactctttattcttgtataaaacttttcaatagatgatatctttcaatgaggcatgctttattatttttctgtaaatttgagacaggcaggggccatgagcaacaattttagttttctaaataaggcactaattaaacattttatttggaaaataaccctttctaagcccaatggctttcaagtaaaaatttaatgagaagttttgttagacaaatcagaatcgaacattaggataccactactgatttccatatgaaccaatttggtgtaaggccaaaaggtttttatttatgtagattatataaatagatctttacttacaaaggtcacatagatttgatcttgataactataatatgttctatcacctgcataaatatgctaaggtactaggaatctagtacttagttaatagggcatcccttttgatgttgcctttttttttttttttttttttagcaatgacaaaggatttatgccgagccatctgtactagttttccaacctccttgtgaccaagggcctggatttctaagatagatggcaagggttggggtgaaattggtgtctatggaatagaaattctctgggtgatgataatcaaccaatattaatttcaaaccaaacacctggattgctagacaagctctagacatctgtaccaacaggtccagatcctaaagtgtgctttttatcatgtatagtgtgcagaattcttataactactaaaagtcagtggggtaccttcatttttctgaatctccacatgtttaaaaacaaaaccgaagtgttgctgtggatacaggaaaagaacaggagaattttgtctgctgccctggggatgtgggaggtcatgtatataccgtacaataactgactttattgagttaaactgtaggaatgtgtttgtttttatgtataaccactgaaaatagaaaatattagatatgctcaagagagagcgtatcaagtgaaacattttccaacatgtaaggtttattacaaatgagttagtgacactagcgtagctccctatcaatttaaaaaaacttcttgaattactgaaaactatcagaagtaacaacaacaataatttaaaaatcaaatataacaaaggcttaagaactttgtctggatactggtgtctttgtgaatgattccattcagtatcatccaaattcacctttaaagtgagaaaagtaccactggaaaaaagggaaaacagaaacaggccatttctctgacaatggactcacatatttgctaattttataaaaaacagaatcatcctactgatctgtttctgtaatatggtgtttgatgtgatgtaacactggtcccattaaattggctacagtttgcactctcaagtttcccgttggactggagttagagacttatattaaaagtgtggttttttttccctttctccccttgacgtaaaccaaaaaaaaataaaaaaaatagggtaaattttaattcaagaattccctctccaacttcaaaggaactgccaaacacccttaaacacttctttccaaccctgcagttatggtaacacttattattactatggaaatcccttaatgtgtactgtctacattttttcctaatagagttatgattgttttggtagttatgacccaagtggtttcatacctttgcactcctggggtttgctgtcataccttagtggtggttttatgtcaccaaatggaggaaatgcctcattttctgacccctgttccatggtttcaaagtgggaatgtgagtatgtttacatactgtgggcatgatttttttcaggaggtactcatatcaaaagcacagctttcaacctttaacgtttagattctgctatgctgtggtatttgcattgtggtgttgtagacatgccactagggatcaaagagtaattctgcagagagcccatttcatttagcaaagcaggcatgtgccagccatctgttgtatctgctgatagaaaacagcagtaagtttctcaaacttttgccagaaggaaaaaaaaaagactttattgcttagaggagatgagttacaaggtaccttgtaagccacatctggttctatggcaatttacatggcataaatgtaaactctgctgtgtcttcctttcacggtggtataaaagcacataaacaaaccctctgctggcaccctccctatttattctgattctaaattgctcgcacaaataaaatctttgaaattgttgtggtgaagcagaaaggtatgatatccaataaagcattttgttttggatcaaactgatttaacttaactgtccctgatgaataagatgggtgtggttagggaaaaactttgaggactgagttcagcaaaaatgtcccttatcctgttgccggacctctggaagaggccttatcagttcagggcttcttctactgcagtaatttagccaactcaataaagtcacatgtgagtaacttgcttacattcctatagaaccttggtggatggcaagttgttctcccgtgcagcctttctctccgactcaagcactcaatcaacaaatacagagccaggtgcatagcatacaaagagaaataaacccagtacctgccctctgggagcttgtactctagaaaacaaatattaatctcactcatccaaatgaggttaggaagtacaggattggctgggtggccaaaggaagccactcttcttcctgcctggggaaggaagggagccagggctacttcactgagctcactgagcaagtgatgtttgaattaatcccaaagaatgagtcccatcagcaagggaggaaaatgccttcccagggaagagctcaggatgtcctaatgcttggaggtcttagaggggaaaatatattctgggtgatcataaggggctttgtatctcatctgagatgtaatggaagcccagtgaagggaggtcagggccaaataatggagagagagtctgggggaaaagaagtagaagatagaaacaactcagggaagtttctctcttcttggctatggagagagtgaactcaacatgttgcaaatttgtattgagtaaatcgttgagtatgtgttgggtcggcaacagtttttccacaaccctcatttagctcttctttcttaataaactttcaaaagagttgcaatgattagtctcagctccaggatggtgtgtgtgtgtgtgtgtgtgtgtgtgtgtgtgtgtgtgtgtgtgtgattagagcagggaactgtaaaaaaattctttttgtaagtgcatagaactaaaaataatttcatttttaatggagtctagaactttgaacataacataaaagggagcttaaataaggaaaataatatgttaattggaaaacattgacttagcatctattctcaacttctacactacctttttaagtaccaggaaaagtacaagagaagtgtagaaattaaagttggcaagtgatccttaagtttacaaaatgagaagctgaacactggaaatggatttatttaaaataagcctgcatcttcaaatatttgatttccttttaaaacttactattagcacaaactctaaagtcacaggacaattactgtccttccctgtttttctcagctagacatatggatgtctgtcctcctgagctgtacattttatcttctctttggattttctggatgaatgtgatgaaagaatcttggaaattgttaggcatctcttgaaacccattcatctgaataaaatctcacagggtagctatgtgttgtaggcctgggacaaagggacagtggcaggagggtaagttcctaagctggcagcatgagaaaggagatgaatgtagtttgcttagctgccctgggccagaacacaaatcatgccttgggggtaaaacatgattaagaaccagttatctgctcttgagaaaattagaagctaactggagagacagctatataaacatatccccttaacaattcctggaaagtggaagtactgaagtattcccaggtgatgatgtgggcacagaggaaaagtaactccagagctgagtctcactattgagttagccaagcaaaaatgtggaagaggggatggtttttagggaaaggaaacagcttgaggcaaggcatagagaccagaaatatagttttctgggggaactggtactttggtgtggttggagtgtgtagtacaaggtaggaagtggtgaggtaaccagggctatcttctagagggctttgtccatcatgtgaaggcacctgggactttagtctataggcagtggcaggtcagataatgaaaaagtagaaaggagcggaaaatggggttggagatacatgtttagattatctcatcacagggtggagggtagttttgagggtagctcaactgcaaggagagaaatctgggattgagaggagatcaggggtaaagaggaggttagagaaatatttagaagataaaaatctggaaatcttggtgccaggaacaaggagtgcctcattttctctgctctgcttcactgacttggcagtagccctgttagctatcctatcccctgaccccaggctcacctttcctgcctcagggcctttgcacgtgaagtttcctctgcctagaatgcactcccttcagatttctgcagggcttgctccctggcttcccccatgtctctgattaaatgtcactcctctcagaggcttcccctgactcccctctctaataaaacagccaccattctttccatcactctgagtctcctactctgctgaatatttcttcatggctcttagaataatggtaatacttgattataataggttttaattgattaacttttccattcaatgtaagctcatgagagcaaggacttggtcctgttcaccatatatctccaggtcccggaacagctcctggcacatagtaggcagctgaaaattatttgttgaatgaataagtgaggtaggtctcattatgattccctttggacagataaggcaacggaggcacagacgaccagggtcacacaactagtaagtgtcagagctgggatttaaacctgggcagctaggatccagcccttgctctgataagtgtgaaacagatgtatgaacacagagctctaggagcacagagggggatgcagctagtttgggctggtggagtagaggaaggcttcaccgaggagacatgtaacagtggaactggagctcaaaggatgttcgtgaagctgtttaatgagctgagatgggaggaaggcacagggagaaaggctaccacaggcagggtcaacagagttgtgaaagtgcattctgggaaatgttaatgaggctggggcttgttgtgtggaaaggagaatattgggggccaggggaagggggcagggggcaggggagggatgatgacatgaggctggacatgtggtcagggccagatggagaaacactgtggaaaagtcactgaacccatttaggccctaacacttttatgtataagaaaagcagtttggattatctctaaactttcaaattctaaaatattatgattctatctctgaagtaaaacaacttcagtcatttaacattaatggtaatatctttatacaaatgcaagatctgtctccagatttacagaaatcaaagcataaagattctcttctccaaaattgtattgtttgttgccaaatttaaaaagattcacctccaaatactctttgtgtatcctattactgtcattagttacatggtatatactctgagccgggcactcttctaagtgctttacagtgaatcttcagtgaatcttcatagtaaccctgagacaggcatttcttattctccccaatttgtagacgaggaaacaagagaagaaagaaattaagttacttgcccaagatcacataggtaagaacacttatgcacatatttatatacttcagagactttcctcagatctgctctgacaacttttggaatatcttctcattccaaaaagtaacaattcaaagaacatttgtcagtgcttagtatgtccttggtcctaagaatacaagctttaactgatctaactggcttcaggaagtcaccagctggggagaagactgtggcatcaataaagcaatcataataactgtggtattatgtatgtatatgggaacccaaccaaaggggcaagtgggagctgaaatccagcccatacctcacttctcaagtttggatacagagctgcctctgtccagagggggcacttccacctaatttgtagagagacttcatataggccataatgccctaagaaagatgctatgagagtataaagctagaggattttgctactgatcaggtaaatttgcaattacttatctgctggagaagacatcaccaaggaggtaacagcagacctgagtcatgaaagatgtttagtaggcagagtggccaaggagggtggggctgaggtgggcactttaagtataacgaataacccatagggaaatacatataactgagaatcattggtgtagttggaaaatgacaattatttagaacagttaggttttatggaacagaactgaggaatatgggtctaagaaataagtttgggaaagattatgacaacttaggtatgccacagttgactttgtcttatagataatcagagccatcgaatgcttaaaagtagataataatgttgtatctgaattcacagaattagctggtctttgcacgggaaaaagtaggagtaaatgaaacagagttactacaggagcaatagaagggacaagttagcatttcagaatataaatgtaaggtaggactctaaatgtaagcctattgactggtagagtccaggaatattcaacagttctgtctatgagtggtaactttggtgacggatggaggtagatgatgggatgcttgactaaggacaaggagccaattaggaaattatatgagataccatgaaaggtgaggagcacctgaaccaaggaaggcagtggagagggaggggaggtgtaatcgacaggacttattgagcatgggtgttaatggaaatgagggaatagagatgactttgagattgttgcatggataatgatgttgtaactaagaaatcaataactagagcaagggcagaacagtttgggctgcaaacacatggggatccatttggaaattcctggatacatattttctactgaacattcagatggcaaagtctggtagacaattgaaaaaaatttgactctgaagctaagacatgaagtggagaatggaaacattgattttgaagactgaatcctccttccccttctcatctgccctatcacccttccttcttttgacctccactcaataaatatttattcaggtcctgtctaacaccaaagcttaggttgaaaatgaacaagactaatgtaaattggatatgatgcttgctctcaaggggatcacagtctaatgtggaaacagatataacccatataacaatacaatattaaacgtattataattgcagtatgaagaaggtgctatgaaagtactgagaaaggagcattaactcggctgggggaggagtgaattatctgcatagggttcctggtgttcttcagagcatactctgagactgtcacactaagatactaacaagtggaacaacttttgctctgcttaacttcatggcttttatgtacttgagataattgggcctactatagtcggccttcagcttgccattaattctttggagatgaatatgacaaatgtcactataccaccaggtgacagagcaagtcagttcttccaaatgaaacatctagaacaactcttgaggaaacttgtttgtgggagctgaaggcaggcctaaataaacatatattttagtgcttattaggatgccttgtttccaagggctatttcagtatcaataatggatgtgccactgggaggattcgcatctgaagccaagtccaggtaggaaacctcctactttttaaaaatgtttaacttttaattttttagatggagtcttgctctgttacacaagctggggtgcaatggcatgatctcagctcactgcaacctccacctcctgggttcaagtgattctctcacctcagcctcctgagtagctggggttacaggagctaccatgcctggctaatttttgtatttttagtagagacagggtttcagcatgttagccaggctggtcttgaactcctgacctcagtgattagtccaccttggcctcccaaagtggtgggattacaggcatgagccactgtgccaggacaggacatctcctgctttagacaataaccagatggatcccaatagacatgtagaattactctgattcctgcatgtttgaagcacattgaagcaatcaatatttttattcacagttagaactcaattaggattgaggttgtatttatattgctgtcacttatagcagtaaccagcagatggcaatgtaaaagttacttctttatggaatttttcatctcaacattgtttttttaagcttgcaggtgctctctgtgtaacagaagcccatttgtgatctttatgtcactcatttcaatagctcattactatattcagtaggttggaaaataaagtttcccaaattcattgccactgatacaattaaaactcctcaaaagttagaacttatcctcattaaaaatgtgaatgattcattacacaccgattacatattctttttcttttaagtaattgctcaaatttcggcagaagtcaagttttgagttatctctccatgttcatccaatttcttctttgccttctctggctgtatctttagaagacacagaagagcagagttggaagagattccagagctcatccaactcagtgagctcaatctttctccaaagtatcaattaattgtggtctctcagcctctggttgaacatgcccagtggcagggagctcattaagttggggtttaaaaaatatttttgggatgggcgcagtggctcacgcctgtaatcccaacactttgggaggctgaggcaggtggatcaagaccagcctggacaacatggtgaaaccccatctctactaaaaacacaaaaattagccaggcgtggtggcgagcacctgtaatcccagctactgaggaggctgaggcaggataatcacttgaaactggggggccgaggcacatcactgcactccagccagggtaacaagaatgaaactccatctcaaaaacaaaaaaaataaaaaaaaatatatatatatatgatcatatatatatatgattctgttaatcatagaaagttgttttcataaatgagtccaaatctgtcttcccagtataacttgaatatccctgggctctaccagcctgtgggcttacatttggagattcctaccttgcatttatactctgaagtgccaacctgtcccctctactgctcatgcaggcattctgtttcatttactcatactttttcccttgcaaagaccagctaattctgtgagtccttggaagagttccacatatgccatcctgaatggagatatcctgacccatggtgccactggtgagaagtctgcttctcagatttgagtgcaatctgtccatgcttcttaagctgtaaacactcaagggtcaagctggcctgtattctctacaggacttatggcctcagaacagcttggtgtcctgtgcagaatggagaagagtctacccctttcctcatttggcattgaactttgtcacttggtatctaaagcagtccaatggtttaggtgtggtttgtccctgcaaaaactcatcttgaagtttaattgccagtgtggcggtgttgggaggtggggcccagtgggaggtgtttgggtcatgggggcagatccctcatgaatctattggtaccaccctcacagtagcgggtgagtgctttctctcgtgagactggattagtttccatgaaagtgggttcttagaaagtgggtcaagccttctcagctacaccctggtgcactagtccaagcccccacaaaatccttcatttcccttactctgcaaacacctgcttgctttctgcttctccgccatattgtgacacaacacaaggccttcaccagaagccaagcagatgctagtgccatgcccttgggctttccagctaccagaatcaagagctaaataaactcttttaaaattacccagcctattctgttacagcaacacaaaacagacaggcagcatggcttaataccctgagcccagtgaagtacaccaatgttaagttccttcagcccatgtccccgtagaaatcaggcctggtccttagggccaggccttagaatctttcagtaccaatgtgtacctctaacttccttcccccttatttcctaggcagctgcataaacaaactccccattagtgggtccctggcatctcatgcatgccagtgggtgccacagaccaccagagacacagctgaacccaaaatcccaattggagctctactcctattctcctggtcacatcagtaattcctggtcttggttctctccttgtcctctggagccactggagtatgttttaacccctttcttacttgaaatcagaccacaggcattttaaaccagctcccatcccctttaaatcatcttttctttatgataaacacccccaatttcttcagctacttcatatattcagctttgcatttcttaagccctgactcctaaatacttatcaaaagtataaaattgtcacagatagactttactggtcttttactctttatgctctaatgagaaaagagttgattgctagaattagaaatttacttacttacagaatgttaaaatcatatttttgcctgtaaaccttgtattatgaactaaacaagaagaagaggtggtggggtggaaggaggaggagtagaagaagaaaatagaggaaaatgtctaatgcttattaagtattgctcatgtgccagtcattgtgcttattatttttcatcgttatctaatttaattctcacaaccctatgagataagcactactgatattctcactttacaaaagtggcaactggatcacaaaaaggttgaataacttgcctgaggtcacacagctagtaggtagtagagccaagatgtacactcaggtagtctgactgcagaatccatgatgaattgcaatttgagccctttgaaatcaggatatttctgaatcttcatctttattatttagacattctgttgcatgcatatgaagggtatcctgctgtgtgctgtggagggtgagtttaaataaagactttgaccaagaagagtttatacttgcaggggaagttaaaatagagtggctttggtaaataatggttacacttgcttgaaattgtcttttttcataggtcaaaatgcttgaattttatgtgatttaacctaataataagaacgggcatatatggggcatttactgtctgccagccgctcttctaaggtaatttacgtggattatctcatttattactgggatcaattctgtgagctaaaggcactcatttttttggcggtgggctggagtcttgctgtgttgcccaggctggattacagtggcatgaacgtgactcactgcagccccaacctcctgagctcaagcaatcctcccacttcagcctcccaggtagctgggaccagaggtatgcaccactgtgcctggcttttaaaattttttttgtagagacagggtgtcaccaaatcacccaggcttgaagccactatttttatttccattaaacacgtgagaagttagaggcacaaggaaattaagtaacttgcccagggtcacaccttagtcacctgcagagcctgggtttgaattctagcagtcaaatgccaaggtacatgtacatatatgtatattattttacctccatattacacaagggtaggcctacctgtccactcaaatcaatttttaaaaatgcagtttcatttgtagagtcctatatatatcaaatcatcatattcaagatctagttcagaagccaaatagaacaaaatccacttggctccagactagtggaatatttttgattcccaaagtttgaacatttatctagtttctcagttatctgcaggcttgagtttagagtttattgcatgtcctatattgtctagagtttgaggaagcattcactcataaactgagaggcaaagtgtaaattggtacagctctcctgaattcaagtaagacattgttctattattctgctaacagtaatgatgcctttcatgtacttaatcatttaaaacatgctttcatttattttatcccattaagttcattcagtcttcccaaaaactaaggaaaaatcatgcattggtgaaactttagataactaaatatgaggaataactgataattcacagtaagtggcctttagccaaaagtaaaataattcaaacctgatctttaatagttgtgcatttttctataacgcacaaaagatttgtgtgttcatgatttatagaaatgcttttgcctttcaataaaaatatataagggcccagtcgataaatgctatttgaattataaggaaacattttgagtggaaaatataagtggatttccatttcattacatagtaaacatagaaatacttacccatcatctatttttgtacttgatattttagatgttttttgccatccattctttcagaaactctatatatccaaggcttttctagaatggtatttacttggttatagatagttgtccacccaatataaaacactgcaagctaagagatgtgattgaaactacccttttgggtggaacagagggccaggactagggcacagcaagcaaggactcagggtgcttgtatgagcctaggaatgagtgcctccataaattcacaccctggggaccttgcctgcctagtccaaggccctgagctgaacatactggcaaaaacatcatgtatgatgttaattttatgtgtcaacttgattgggccttggggtgcccagacaatttggtcacatacattattctgtgtgtgtctttgagggagtttctgtttctggatgaggttaacatttgagtccatagactgaataaagtagattgccctccctaatgtgggtgggtctccaacaatcagttgaaggcctgagtagaacaaaaaggctgcccctcctatggggagagagaactcctgcttgactgccttcgagctgaaacactggctcttaagggccatcagactggaactacaccatgggctttcctgggactccagcttgccaactgaagatcatgagacttgtcagcctccataatcatgtcagccaatttccttataagaaatctctgtatataactcctattggttctgtttctctggagaactttgaccagtataccatgtattctgtcttacctgcccaccagtgagagaagttactatcaaagagaagcaaaagacagcacaggttaaatcttgatcaactaaactcttgagggcctcagtttcttaaagtactaaaaggaaataattaaattactttttacaatggcaacaaaatgcagttgcataatgtgtacaaaattcttgacacatagtagacaatgaaaaagtagggtcttttcttccctttatataaatgagctgttagtgctaggtgaaagtcattaggccaaagaaagctggtcctcctgatcccaagctgggggatatgctggcaagatgcccaaatgccactctaagtgaatggtgtcccactctctgaactcagagtatcacactgagctgacctcaggagacctgtctcccagcccagctcccacaccagctatctgagccctcagacaagtatttcacttttgtcctcattggcaaattataagggttttttattttcaactctaaaatgtctgtgatttatgttcggtcactatcatttctgcattgttcttagttttgcatttgaatttaaatcacagcaagaaaaatagcacggacaatacaattacttgtagcaaaaataaagcaaattttgagcagaattaacttttcaaaatactgtttgccattttaatgttaataaaatttcttaaattcattttaggcagtttttgcctggtttctctattggcttgatttcagtgtcttcaatttgactaataaacagactttaggagttatactctgaggctggtagacagaacagctatattactaatatttatcctgtaagacctcctcaaatggtagcttctttctagatattcatgacatttattcctggcttggctctttacaaacaactgagaaactgactctgagatttagtccctctgttacaaattgaggtttttatattgctagttgtctttgtagtaattataacttgcaaaactttttactcaccaagaacataaactggacttcattaaagtttgcagtacttaatttcccggatataaccatgtctttttatgaatcctgactgagttttaagttcattacatttttccatcataaattagcacacccttaaaaatatttggaaaataccaaaaaggagaaagaagaatgggaaaagagcattcatatatagttaactcacctaagaagatttgtgtccttttttgtttgttttttgcttaagggcagtagggtagtttcccatgttatcacatactcggtaaacatggtttttttttaagtggctacacaatattttgtggtattttattatttcttttttgtagagatgggatctcagtatgttgcccaggctagtcttgaactcctgggctcaagtgatccttttacctcagcctcccaaagcgctgggattacaggtgtgagccaccacgcctggccctattctgtggtttatttaacattctgtttcaattttatatatatatatttactattacaagtaacactgtgaagaacaacttgatgcgtaaaactttttctgtttaaggattactgccataagactgagttccagaagtggaatttctgagtcaaattgccaattattctacgggctcttggcacatacattattgctgaatggctcgtaatgactactccatacttccaacagaattattcaagaatctcttttttagtatgcttttgtcgcttttaaaaaatcctccaaatgaagctttccaagtagtattgataattgttgatttgtgcctacatttttgttcagttaggacaagtttttctcagtgggaattttatactgtagggggcagtgggggatcagtaagtggtgggtgagtgatctcccttttcatcagggctgttaagatccctcaagtttagaggctttgcatgggcatgactataattgtgaacacgggacccatcagatagatgctacattataaattatacttctagcctacaaatacaaaactagtaggtaattcctaaaaaataaaccaaataattccttttgaacataataaggaagcatattttctactacttttaaatgaatgagtaaaatatttttatgagtttctttgtatgcttcatatacatgtgcacatgcatttattcataaatatttttaaataacagagtttgggacatttatttttatagaaatgctttaaaaaatgtttttaatattaaataatatattctcctaatgctcagaggtgttatttcctcaattttcttaaggacaaagtagagtgggattaacaagtagatcaacgtcaaaacttaaagagttattgacattactggctggaaaacagcactttttaagagaaagaatgtgtatgctacattgtataaaaatgaggaaactgagctaacaaatacattcttatgggtgcttgtaaaagaaaaggcaaataaacttgctaatcagcgctcccagagctgtatatccaagaggaagaagaggaaagggtagatataggagagtctttggagaaagtacccaggcagccaaagagctggcttcacttgaaccagcagtcttgatatctgagtaaagactctgtttcaggctttgaagtgtctgctaacttctgctaaatttgctctctatggaatacaacagttcaaggtggcgggttggggagaaggggagcctggtaggcatacacaaattattgtttatagactgctggcctctctgctgcagagcatcttctgtagccacttcaaaggcaggagcatcacgtggcttatttgagcaaaatctgctgcagtgaacatgcggcaaataggagggaaatgggcaggtctgatggagggaaatcattctcaatcattcccattggctcactctaagtaatctcataaattggctatcaaaagatttctatacattttgaaaacatcaggaattgataaaggcaaagatatgtctccaaagagatttgtgcatcaaatttctaggttcacatgtgtttctgagaagattgcttattagatcttaggtcactaagagcacagaacaattatgctgggactttaagacctaagtctatatcgagtccataaattctctacttaggtatgtatgcagaatgagctatattctcttcccaaatgctctggactctatgttaaatcttagaagaaattgctaagggcttgcttagaattctgaactcttagaagggagggaatcttaaagattagttgaaccaccttatttttcagatgaggaaaccaaggactagaaatgatgactgacttcccagagggagttagcaatagagctggctaaagggcacatgttttctgacaaccagggcagggtttttcactgtgcttcagtcttaggatacaacatcaccatatcacagtcccataaaatgtggaaagaaaaagttgcctacagtttttctctagaatggagtatggggaaggccattgatctgtttttgtgttatccattacacacacacacacacagactttaatgttcaattttgaggcaatagctgagtgggctagttgcaagcactacttggtgactcagttctggccgtgatccattttgcccagcacaatgcccaggacatagtaggtattgaacaatagcaaaacggaagtggttggtgtggcagccatatgatatcatggaaagcatgctgagccagtcctgactggggggctttggaaatgtaacttaacctgcctagccctccacttccccatatgatctcttagaatttttccggctctaaagtggtatgtgttgtgatctgctattttcccttagaagggctttgtgaagactggcctgtttacaaagctctctgagattccttattatggacattccaagagcatcaaaaggaactacagatacagatttttcaaacagagttgaaaagtgtttaacagtcagataatatatatgtttaaaaatagtgctatttttacatgactttgaaaaattggcctgaccctatgttaacctatttctaaaagtctgtgttcataaattgacttattttatccactgcctatggagcaggaaagacattatgctagcacaacatgtactaaccctgatgtgctattgtccttctcttaatttgttttataactttggctcattcttggagatgagttcttttcaccagaatctgccaatcctagaattacaattcctctcttcctcacttcttccatttagtaaacatgtttttcctgtgtgatactagaacattttgaattttaatttcctctaatcctatcacacgaagtgatatgatacaatcaaagaaaattaagggaagacaccaaagacagaaatacataaaagacaatgctaaggtaattataaaaatggcaacagaaagagttctgtggaaagattcactctctggtcaggagataatttagaaataaatgttgaggaaggacttgattttttgaaacaaagtgattttggagggatcaggaaaagaaacgtagactagtatgaataaatgataagacttgggagtgagaaaagtaggaaaaagaagtaggcaacttgagcatcttcatatttgtgtttgtcaaagtcactaacaggaatatctaatagattggtttctgagactaacctgaataaaatagcacccagtgtgtccaccaggctgacgtaggtttctgctttgggggtgactcttaaatctattgtttagccatcccctagaacggtagaggctagatttctcattttataactatgccatgtaggaaggaatcaatatcaattttgaaatggaggtagatatctctattgtttcttgtcctctcttttgagcaaagacatcaatttaatatggcacggcttgcatcttgtgactctatgttgatgtctaggttgttcatctagctattaataaagccatgaaaacaaatattgatactgactggtgtataattctcagagctgttctttttttttttttaaggtgaataaaagaggcccagttttcagagctcttagtttccatacatccacacaaatcatgaatcagattacatcagccttgctgatttggatacatcgagtttttttctgttgatctgtttcttttttttttttttttaagttccaggatacatgtgcagaacgtgcaggtttgttacacaggtatacatgtgccatggtggtttgctgcacctatcaacccgtcatctaggttttaagccccacatgcattaggtgtctcctaatgttctccctccccttgccctccactcctaacaggccccagtgtgtgttgttcccctccctatgtccatgtgttctcattgttcaactctcacttatgaatgagaacatgtggtgtttgagtttctgttcctgtgttagtttgctaagaatgatggcttccagcttcatccatgtccctgcaaaggacatgatctcattctttttatggctgcatagcattctatggtgtatatgtgccacattttctttatccagtctatcactgatgggcatttgagttggttacaagtctttgctattgtacatagtgctgcaataaacatatgtgtgcatgtgtctttataatagaatgatttattatactttgggtatatacccagtaatgggattgctgggtcaaatggtatttctggttgtagatccttgagaaattgccacactgtctttccacaatggttgaactaatttacactcccaccaacagtgtaaaagcattcctatttctccacatcctcgccagcatctgttgtttctagactttttaatgactgccattctaactggcatgagatggtatctcattgtggttttggtttgcatttctctaatgaccagtgataatgagcttatttttatatatttatcagccatataaatgtcttcttttgagaagtgtctgttcatatcctttgcccactttttgatggggttgtttgtttcttgtaaatttgtttaagttccttgtagattctggatattagacctttgtcagatgggtatattgcaaaaattttctcccattctgtaggtcacttgttcattctgatgatagattcttttgctgtgcagaagctctttagtttatttagatcccatttgtcaattttggcttttcttgaaattgcttttggtgttttagtcatgaagtctttgcccatgcctatgtcctgaatggtattgcttaggttttcttctagggtttttatggttttgggttttacatttaagtatgtaatccatcttgaattaagttttgaaaaatatggaatgcttcatgaatttgcatgtcatccttgcacaggggccatgctaaccttctctgtatcgtttcaattttagtatatgtgctgccgaagtgagcacgatctgcttcttttcttttcttctttatgtaacctatttccttctattacaactggggccctaacaagctcactgatattttctttaaagatagtcaaactgaagatattcaaaaacctgatctctttcccctttggtgttactggttttctttgatcatccttttttttgtgtgcaagacatttgaaattacctttacaaaataaaacggactattgaaaatagactgataaatagttatcatatctgcctctaggaattataatcaaatagaggagatatggggccaaatatattttaatgcaatgagtacaatgaatgtattgtgagtatttctaatttgaaagatactaacatatttacaagaggaaaagttctctgtagtggcagtagagccacaaggattgcttgagagtgctattttgaactagagaatccagagacacaaatttgctcagaagtggctttggcaactttcaaatatgttccaaaataaagaaaaattcaagctgggcactagtggctcacacctgtaatcctagtactttggggggcctgaggcaggaggattgcttgagcccaggagttcaagaccagcttgggcaacatagtaagaccctgcctctacaaaaaaaaaaaaatacaaaaattagtctgatgtggtggcatgcacctgtagtcccagccactgcagaggttgaggtgagaggatggcttgagcccaggagatggaggctgcagtgagtcaaaattgcaccactgcactttagcccgggtgacagagagagaccttgtcaaaataaataaataaataaataaataaataaataaataaataaataaataagaagaagaggaaggaggaggaggaggagaatccatgataacaggtaacaaaactcactaaggtgacgatggagtggggagtgggagggaagttagtaatagttattgggaaagaagaagccaagacacaaaaataactcctttgatgtgtgccctctttatttattgcatttggttttatatactcatctgtctttaaagatctcatgtttagtacaaaaagatgggactaatctttccttggatatcttttattctgtcattaagtgctccttcaattcagacttctttgttgcccccttagatagatcagaaaattctgttggttttgtttttttcatgcttacttcccttcctcccaaagcgaaggcaatcaagctacactaaacacccacatttctaatttgctaataatgcaatttcatttaatgagaaagaggaaacaaatataaaccctagataatgtggttaatgacataatggcttcccaggcatttgggatcttcacatgagagcatgtctttgctaaatgaatatattttcacttatattttaacaatgatttgtcggaaaagtattttccccccgatatatttttcaaagtacacaagccatgcaattaggtaaaaagttactgtctttgattaaattgctttccgcaaatgagtgtttattggatctgggagaaatatttgtcctttcagactttccaaaaatcctcccctttaggtactacacccatgcttaggggtttgaatagttcaaggctgacagtagctgtgaaaagtttcatagccttttaagaaagttcagcggctatgtttggggaagagatatgtgtattatgcaggactgttagctaatgccgagactgtaacatatggaattcataaaggtccaattacagaaccgtcactgtttgccatggttttaacttatgtaagttattgattatactttcatgagatcataatcaaaaggttattctttggtaatggtgtgttagaagagctttatcctgaacttcaaagccatcctctgagcctcaagaacaaaggcttagaagtttgaactggggccagaatcagtctgtatgagttaacgatgttccagaccatccgggaaccgaatccacctatccacatgcgggaactttctctcatcacatcagatcaacagtcatcactaaaagatgacagttgattcaactttaatgtgtctgtgtgtgtgtatgtatttttttaatgaatcagcttgactaactatagtgtctgctttcatttgttttataaccatttattttgactgtaaaatactgtcatttgctgtgctttcagaagagagtgattaccattaaataggtatacatctaggaacaggaattacaagtactcaaaatttggagaaaacaatttttagaaattaaaaagctaaggtataacttaatataagtaaaaagtaatgaaggagggctcaggtgtgtcctaatattctggcatgtgttaagcaggcaaaaaacaaacaaaaaaaacagactatgagtttggctaacgttacaaatggcaaatctgctgccgctcttttactcttaacatccttacatgaattattgcaccaaagaagcaaaatgccatcatgtgtaatcacacagagcgatctttactctttctcacagcagcccctgcaaacctaccactaggctactttctctttaggtctttggatggatgctcaggcagatcctgagatttctgtagtcaacctgacataataaaatgttctctgattactttagtgctaagattattctcatgccagtaattaaaatctcctcttctgtgtggtagttaaaattatgatccttatttaaagttaatattctcctttcccttagctgcagcttggttggttgcaacatggttgacccttctcagtagggtctagctcctccaggagaggggtcatggacaagagagatcagaggtaagaggcagacaggagttgatgtcacctacagagtttcctctggccccagaggatgtttaaaactgatcttgttattatgggctctgtctcgggttcctcctctgggatctccagacagctttccttgggttaaggcattgcttccccatgagctgcatgctcataaccatggtacccatccactctgatacagccacactggcctcttcgctatttttatgaatgtgccaggtacactgccacctgaaggacttggcactaagcattccctctgctcttcccccagatatctgcatagcttgctctctcactttattccagtctctagtaaaacatcccagcccagcagtcttccgagtctgtcctctcagaaacagcaatcgcataccatgcatatatatatatatacacacatatatatacacacatatatatacacacacacacatatacatgtgtatatatatacatatatatatacacatatatatatgtatgttctgggatacatgtggagaacttgcaggcttgttacataggtatacacatgccatggtggtttgctgcacccatcaacccgtcatctacattatgtttctctaatgctatccttcccctagccccccaccccctgacaagccccggtgtgtgatgttcccctccctgtgtccgtgtgttcttgctgttcaactcccacttataagtgagaacatgtggtgtttggtttcctgttcctgtgttagtttgctgagaatgatggtttccaacttcatccatgtccctgcaaaggacatgaactcattcttttttatggctgcatagtattccatggtacatatgttccacattttattctctaccatctttctccactgaagtcttccacatagtgcctgtcattacttgatatatgttcatttaaatatttctttaaaaattatgtgtctcctcctctttctcatatcagaagtaggctccatgagggccaagagtttttacttcttttgctgactgctgcatccctagtgcctagagcagaacctggcacatggaaactactcagtaaatatttactgggtgaatgaataaaagaaggcatgaacacagaaagatcagccagatataatgatttgctcttctgtgtgtatctcaatttggaaaagattttgttcttaattaattagaattaatttacttttaaacctttgatcagagctattcattgaaatggattcctggggtaaaaggcaagacctatgaaaatcaaacttgcttttggaaatataaacacagtagaatttaatcacaataccattttacctagtctgtgatttctttttattcaaactgtaatacaggaaattggttatataggatacaatattgaatttaatttaaacagaagcagatactcttattagctaagttcaggcaaatagtattattatcagagattctcaaagatagggaataagacttcttctgttgttttgccttgtataatactgggaaatacatggagatttccttgtataatactgggaataatatatataatgtataatatatattatatatggaatatatatatataatatataaaatacttgtcttgcataatactaggaaatacatgggatttcctctctatgtctttctttttttcattccttaaaatttttattaaagaaactaggtttttgccctgtagagttttctatagtctggattttactgattacatctttgtggtgtagtttaacttattccgctatcctttaaatttcctgcaaattaatagtttgataagacattttaaagttaaagaaataagataattccaattttgcctatatgtgctaacttgaactagaaaaggaaggttgttttggactattttcacagcccctgctttcattctgaaccttactccctatacccacaatgcattacagagaccctctgttgatcacacccctccagctcccatcacccaggaatctccaagctgcttttttctatgggtactgccactgtcaagggactcctgctaccacactgcaccaataaaggactttatattgatcctgtgtatagtaactagcatttgttgaatgcttacaatgtgccaacattttcacctactttacatgcattatttgatcctcacaacagcactgcaaagtagacactggcttccttgggttcctcaagcttgccagagtcctcccagagcttacgcaactgatctttcctctgcttaaaaagctgcccctccttcacctgtttaacctctgctcactgagcagatctcagttctgccatcctttctcaagcaagctgttcctgacccccaagttaagccaaagcacacattctcaaagaaccccatgtacttctctgaagccctttatcacagtctcgattttttacttacttgattaatgatcagctcccttccagcctgcaagctccataaggacaaatactaggtctgttttgactcagcttggcatctcaggcacacacaatgccttatgcctggcacactccatacatatatgttgaatgaatgtaaggctaagcctgtacccaaggccagctagtaaatagtagagttagaattcaagccaagcaggtctcactctagcccagacttcacccacattctccccagcctcgtggccattgttatttggactgttggctctctcccttcaagagccagctctggaccagcttagtctcccttgttggccccttttcccatctcccgctgactgttgactgggacccaaatgtctacctctctcagccaaggctttgcaagtatacttgaacttctgtttcattgaaagtcagaaatttcataccttaaatggacatggtaaaaggtgagttacctatttttttagactatactaacttaaagtttgcattcattttttagaaacagtttttcagccacaaaaaatagattagtcactgcagattcaaataagaagagaaaaaatcccttccaatgaggagagtttaattggggtaggggccagggggaagagacaagaaaatagatttttaccgtaagtacaatagtataaagatgaggaaggggacaggaaagaagcatctgtagcaagggcagtttaactgaagagatgacatttcatccaagcttggagaggtaagtcaaagtctgcttggtgggcaagtgcagggagtggatactccaggcatagagtatgaaataagattcatgacagaggctggtggctaagttaacttgaagcttgatatggccagatcaaagacctgtgaggcaggatgtgggagaagaggctggtgggcagagctagagagaaagttgtagctagccaaagtcttcattgtaataagaaaccattaagggtgttaagtaggagcagtgatatattccagttggcatttaagaagaaaaattggatgatggtgccgattgagggaataaatctggagcgcatgagttaccagggaggtaggttaggagcatgagggagaaatgtctgaattttggtcataatattgggaaggaaaagacaggaataaagctgagaaatcaatgagaatttgtggaggtagttggtaagaaagaagtttggagtctaagaaaaactgccaagtttatgtcttgggtaataggtatattatgctttcctaaggaatacaaatgaacagcctcattgggaagataatgagtttgtccattatctttccaatgttaagtccaaagggagaaatctagttgacagttgtcaatatgaatctagagattaggagaagggtgaaaactggagataaaaatcttggaggctaatgaaatgtaggtgtaatttgaagtcatggaaatagataagatgcccccaaaatgagagcataagccagaagagcagactagtagttgtttcctgggaacatcaacatttaagacaatggttcttaacttttttgagtcatagattcttttgacaatgtgatgaaagctagaatctgctcccccccagaaaaatattcatatgcatatgaacatcgaagctatgcattctctaaggacgcatagacccacattcagaactttttttttgaggtgcaattatagagagaagagcatgtgaaggtgactagagaaagtgattggagaaggagaaggaaaactcagagagagttgctatgtatacatcaaaaaagaagagaaggagaagttacttgtcattaaaaaatttcatagaagacaggagagatagagatgggaaagggctcattggacttagcaacttggaaatcatcagtaaccttttatgagaaattttaatagtgactagggcaaaaaccataccgtagtaaagactgatgggcaagaaaactgaggccatggttatagactcttttaaaagcataatgatggtagagacagagtttttaatcttttcatcacattagtatacttacatgtgcacagatggcataaatgatggggccagtctcagaggatatggaaaggaaccaggattggatattagactatttgtagatagatgggggggatgttgagaggattcgtatatagtaatctctgttttctttgtggatattgacatcagttgagagaagatagcaggaatgggacagcatacctgggggaaaactatgaaactgttgtgtgtacaagaagggagagactaatgatgtttacaagaatttcttggggattgggaggacaattgaagttggccatatagatttagttagtcctcagattatggcttgtcatcatcagtgctcctcaggaaatgttcagttctgccttagtttctctttttcttaaacagaatgaataatgcatgtatgagtaacaacttttaaatagcaaatgattagaagagcttagaagaaaattaaaagagcaaagtatgttatatcttttaggcaatgactttttctaaagtgtaaaataaaatttatcaaatacatgactgttcttaaaatcttctttggtaagactagttttggactttgaaaatctgtaaccaagaggttacagactttttttttcctgtttgactcttaggtaggaatagaacaaactgctcattagaagataccttgtaatatagtattctgaaatatgcaattgcaattacttgaacaaaaatgtcaaattaaggctcttctcataacctttatgaaagtatctaatgcattttttcaaaacattaagctaagggggaaagtctgtgttttttttcctccttttttttaaatcaaagaataagttgatactgtccatgtggattcaatgaaaaaatactaaagaatttaagaaaactacctagagctaaactaagaaaaatatgacctaattttaaatattttggaagtcatcactgaatatatcttctgatatttcaagtttaaaattttgacatttactttttatcaatagaatgaagtaaatatacaaccctggaggtaactatgcattttaaagaactgtgaaagaaatggaacattaattttgcctctttaagttacttatatgtgctactcaagtttttatgtacactttgtaaatatcattctgtcctaaaaattttgatttgctgaactataccaccatgtgaaatgcatgaaggagagaacaagggaattagatattgatgaagaacaaatgtactgcataaggtgtgagggtaattgcttaggatttttgttttgttttattttttcccccgcgatggagtctcactctgtcacccaggctgaagtgcagtggtgcgatcttggctcacagcaacctctgcctcccacgtttaagcagttctcctgcctcagcctccagagtagctgggattacaggtgtgcaccaccatgcccagctattttttttttaattattatttttagtagagatggggtttcactatgttgggcaggctggtctcaaactcctgacctcatgatccactgcctcagcctcccaaagtgctgggattacaggtgtgagccaccatgcccagccaattgctcaggtttaaaaaaattattagtaaaggaatagctcttagcacagttctcttttcccttcatacagatgaatactcaatgactgcttctgaagctttaagaaaagaaatattcaaatgtaagccttgagatgagatgaaaaaaaaaaaaaaagaaagaaacactaggaaagagattccttttccctttccagaactgtctccctctcccttcttctcccaagtacctgcacacacactgctgctttctgggcacctccatgctctggaatcatcattttgccttagcatctaacagaaatgtgtcgttgtgctctcaagtttctccatgctgttcctttttccacacctcctgtttagactgaccctggtccccacagtgtcaaccacaccacttgtaatgacattttctttcctcagtcccttatcttaccccaccatagttgcctaatgcttccttcctccccatgcccaatttttaggttggcatcgacccaggactttgctactgcttgagttggagcaggcttactgtgaggaggaggcacttgtcctggaagcttgaggggaacagaagttttcagaagccccactgctgcctacaccaccctttccattataaattttggcaaaccagtgaaagcagtgtgctgaacagggctaaatttggtttaaagactatatttataccaataccttttttttttcaatttttagatgagctgaacaaagtgttttccatttcccaatgctttgcttttctacttttctgtcaccccttcctcaaaaaataaaagtaaaaaaccttaactgttggttttatttaatacaaaatagcaatatagccctctgttgcttctctatctttagacatcttgaaagagagtgactagccaatgatttgtcagatagccaggtctgtttctggtttgcatgaacagtggtgattccaaactctaggaggaaaaaatggaaaatgtcttagaaatttcagattcatgtgaagccaaactgtgatcttctgccagttttaatttacaaaactctcatagtcctggatgtgtttatttgaacttcaagttttaatatcaccattatattccaataacctcactccctcagtccagcccactggctgtgatctagtctagtgtgtataaaaacaatgactagaacagaagaagttggctaattgagattttctctttaggcaatgtttcttctatcgcctgtttaagccatgatcagtaaaataaatagctacgctgcatgagaaggtgctttcccttttccttttgaaacaagttcttctaagagctagtttcaaaagcaggcagggaaaaatagtcattgttgatataggttgagcattcctaatccaaaatctgaaatgctccaaaatctgaaacttttaatggccaacatgacaccacaagtggaaaattccacacctgacttcatgtgactaattgcaaaattatttaaaatattatatacaactaccttcagcctataaggtatatatgaaatatggatgaattttgtgtttagacttgggtcccatccccaagatatcttattatatatattcaaatattccaaaatttgaaaaaaaatctaaaatccaaaacacttctggtcccaagcattttggataagggatactcaatctgtgtttcacagtttcgcagtgatagcacaattacatcctgtaatttatagaaggcaaagtgactggaacccaagagggaaatataaaccagaagagccttgggcaaagtcttgtgtcagaacaggacctcatttacattatctcctttcattctttctgggagcctcattgccaaaggtttgtgccagaacaagcataaaacagttataaactacacacagatcgggtagataacaaatgtcagtgtttgattgttctttttttcaaaagtgctctgtattctcaattgtgggctgcaatgactgaccacacagaagagtaagagagaagtttttggcccataaaagtaacttagcaattgccaaacagaaaagctgctgcctgtcactagaatcagaggctaatgccattttaccacaacaatgtgttctggaacgcaccgggtttacacttctggatgcctctcagtaggtcattcattcacttattcagcagatatttttcaaatgccttgctgtgcacaatgctgagtgagtctccagtagaccattggaaaaaatatgtagtcccattcttagccacaggaatccaacatttagatgagaatacaagatataaacatatgaaaagttaaataataatacatagtggtagatgtttaagggccaagctggtttaagtcctattgaaggtcagtagaggttaaatcactggaatataggcatggctatggtatcacctcgggccagtgagctccagaagatgatgcctgttggggagtagtgagagataaaaagataaaggaaccaggctgtggagacacctaacaggccgaaggccttatcccatccataagcagggacaggaaaggattgtaacatggcaaaagtggtggtttcatttgatgtattggccacttttaaagagaagggcaaaaagaatatttcaaagaatgttataaaaatgccaatatgaggaaataaatgctggattcaggtggaagtggtgaggatgaaaggaaggtacagaatcataagatataaaagaagaaaggataagattttggtgtctttctgtggggacatgagatagaggtaagaaacagcaataaccctgagcttcagtatctttgttaattgaaacaataacaagaccattggcagctaaaaagaaattaagtgtggctaggcacagtggctcatgcctgtaattccagctacttggaggggtgagatgggaggatggcttgagcccaggaggttgaggctacagtgagccatgatcgtgctactgcatcccagcctgggcaagagtgaggtgcaaataaaagaaaagaaaagaaaagaaaagaaaagagaaaagaggagaggaaaggaaaggaaaggaaaggaaaggaaaggaaagggaaagggaaaaggaaaagaggaaaggaaaggaaagaaaagaaaagagaaatcaagtgggggaagctgattttggaagataatgaaccaggctccatgcacatgagcatgggcatgacgcagatggcaagaagagtctgtgctttggaagaaggatgtgaatggttcatgttgagcattgctgtctacagggaaatggttcaatctgtgaaaatacctgagcttcatgacaatataaaaagagtcttagtgattttatatgattatgagctgagagttaatgaggaaatgcaggaaaatcaagaagtgatatgagaatcagaagagtgtcacagagtccaaagataatgagctttgagtttgaaggatgaaattttgcagaggtaacaagaagaattctgaggaagaatgtgagatctggcaatttttgctctagatattcagattattttaatcattgggcatgcttattcgttttgtttgggtctttaacattgaactattttcctttcttgcttattttagattttttctggcccttcacttacagcgtacgatctattttacatctctttagtacctctcatacccagtgaatctgctaatctgaattcacagtgaatctgcgaatctgaattcacttgtatgctgtaacaataataggctgttgtgagaattaaataaacagtaactgcagtataataaacattcaacaaaaattatttgaaaattttcaaaccttacagcttttgtgtgttttgtatctataaatgcctgaaaccttctttagaacaaagatgataactttattgttttaatgttcttccatgagcacttaggtcagcatcatgatatatgggttaaaagaggtttgaagtccttggttttctgaaagatctttgattcttaactcagaggctcctacaattattgtgcttattagattaagtacacaccataaacacagaacttcaaaggtagaagagaaatactggattctcttcattcctctcaataaggggttaatgcaattctctgcttcctttctctatgtctaccctaaaaggagtgccagaacaaaggccttatgagttgtcccattttgctgtttaaatgatgtcttcatctcatctggaaggaacaatcctaatattcagccaagtccattggaagcaagttaaatgacctccagcactcctctcttgataatatttgggtgtcttttatgcttctccatgaaaagaaaatttactgcatggcaaaccatgccagtgaattattctcctgaatagacccattctttgtttgaatacaaagcaaccttttcatgtgtttcccaaataattactctgtttgcctttacctgagtttcctctagtgtcatttaatggaacaaaatgtactttttcctaatagaggttttagactctccagtataccatttctctattactgttcatgctctgagttccttttatctaaataataaatctacaatttgtggaaattgttcccaaactttaaagctagttctctgttctctttggcatagaatttagattttatttgctctcaaataagtttttccaatggggagatttgggtctaagaatatttattataaataaagtaaaaacagaaagtcctgtctagaagttagagtatggcgtaaatatattgttcatcagccatttcttgtggcttttaatttaagcccttaggttaaatgaaggatatatttactctgtagttcataatactatatttgtggaaatattttcacagtattgatggttttagatttctttacaatggcaaagtaaaactttgaaagaagttagtgtcaacatcagagataaaaggttagtcaatttctaaatggttttcaagttaaaatttttcttttttcttttcttttttttttatcttaaaacttcccagtgtgaagttagaatttttaaagaggcaatgaaaaccacagacaaaatcttttttaaagaaatgtaccaagtatccaggaaattacatgtttcagagattcatgcaccattagttatcatcttcagcaagaaagaaaacgatttactctggtaactgccttttgctgataagatccaagaaagaaaccagttcctgccttatgaacagtcttattagaataagacaaatgtttactgattctcaaagaaataaaagggacacttttgtgtaaagtgtgttattgattagatcagagtattgggtgtccagagaaatctattaagcctagctgcatcatgtgaagcagtcgtgccactgctcattatcaactctctgatgctaagtataacagattccatgcttctcagtctaccttctgtggtcatacctgaaggctctgtgaagttatgtttctggcctccgaatggaattttttcagttccatattctttgaacatcatcaaaactttttggaagaggcgttcagaagctattttatgcaaattgctgcactttcaaggagacatggaagagatttaaataaaattgttgtttaaacacagccacgttaaatagatgttcaagaagaatattttatctatgatcagagaattatggaaaaagaatcatcagccacggaactgaaaggagggtacatgattaatgctttttaaaaaaaatacataaatgcacttatttcatgaaaagatataaattcacatatagaaaatctgaaaaagagagaaaagaaaaaaaatcaccatcaattctacacaatcattgttttaatcttggtgtctagtttttcttattaactaaaagtttattttttaaattaaattatatttgttaaaattattgtagttttacaaatgtaatttttaaatatatcacacatagaaaggtatatttaatttataatgtgacaaagctcaaagatataattatggggtagcaaatgataacttatatggtatttgaccttttaatttcaaagttttttgcattctatccattcatttcttttccatcattatatgtactgttaagtctttagaatgttttggcacatggtgtgcattacacccaagtttattgtgtgattgttgttactgtacttagtaatagaaataattcaaatgttattcattataagggcatctatcactaaatcctttcatagtgccaaataaaatacgttttagaacagtatgttaaatgatacatattatctagtaaaatgtagagggaagtgcaggtggtagaagtcatttaaaacacctggattcatgaaaacaaatccacttttaatagtcattggttttcctgcagggacagaaatactgttctctctttcaaaggaattcattccaaattgaattacctttcctgacaacactcctttcatcagacttcttataaacctctgccttcccttaaacagggtaagaattacctgccttatgaccctttattctcagggccatcctagtgaatcaattttataaattaacttaaacaatgttgttacccacctagggaactgttcacagtggtcttttggaaacttgaccacaactcacaggaggggatgcagtgggaatttggtccatgaaggttatccttttggcttagtgaaaccaggaagtgtttctcaattaacttcaagtatggacaagttcccacagcatctgagactaccccttggcattattatcctcatgtgaagtccttaatgcctgctgcatgtgatactgtgatttaaagcagcaaattgtttgaatgtctaccatgtatctcttaatatctttcatgttgtaaaataaattttatattgcttgtagggtcatattcttttgcaacctccttctagcccatgttaatgtaatttctttaattaatagatagaatgcaaaaattaatataattaattacattgaattaatgtagttctgggtgtggaactgaatggatagaatgcaaaaagttaattaattaatttaattcattacattaaattaatgtaattctggatgtctctacaggtaactgcagaaccactcaacttgcctaactctcatgttagcattggtgctatttattgattgttctttatttctaagcaagaacatattgttaccatcacaactctccttccgctttttttttttttttttgagacagagtctcactctgtcacccagtctggagtgcagtggcatgttctcagctcatgacaacctctgcctcccaggttcaagctggaagctgataactgagggaggagacttatgaaaacaatattgatgataataataacaatctccaatgcttataaatttctgtaatgttggcattatttcttccttaatgtttgtgagaattcaccagggaagccatttgaccctggaattttttttgtgggagggttttacaattttgaatataatttccttaacagacataaggctattcaaactttctatttcttgtcagatttgttcatttgtgtttctcaaggagttcattttatcaaagtcattgaatttattggtgtaacattgatcccttttcttgcttaaatgtctatagcatctctagtaatgcctctctttcacttttttttttttttttttttgagatggagtcttgctctgttgcccaggctggagtgcaatggtgctatcttggctcactgcagcctccacctcctgggttcaagcaattctcctgcctcagcctcccaagtagctgggactacaagcacccacgaccatgcccagctaagttttgtatttttagtagagacggggtttcgccatgttggccagactggtctcgaactcctaacctcaagtgatccgcccacctcagcctcccaaagtgctgggattacaggtgtgagccaccgtgcctggccttcacaaacccttttaataatccagtgggaatccattaagcattaaagctctatagtgagattatgcatcattactttcagtattcatggccatttgagtagcaggaatcattttctcaactagacttagtgggtaaatgaaagtgttcacaatgtaaaggtttatggcttgttgtcttattgtgatggtggtttttgcatcttttggcttttctctccacaattaaatcgagacattaaatataaacctttcaaagggaatgagagtaaaaaataaatgttaacagcaagatcatggaatttgggacttcattacaactctccaaattctgatcaaaagactcacttcagaatttagaattaggagtattaaagaatgattaaaatagctgagatggattctagtcaatgactggtttgacatcacctatttccctaagagaattttttttctcaatcttttaaaaagacagcaattaatatcatttaagttaaaaaattactgggcaggcatagtagctaaagcctgtaatcccagcactttgggaggccaaggcaggcagatgacttgaggtcagaagttcgagacagaccccggcaacatggtgaaaccctgtctctactaaaaatacaaaaattagcagggcgtggtggtacatgcctgtaatcccagctactcaggaggctgaggcaggagaattgcttgaacctgggaggcagaggttgcagtgagctgagattgcgccactgcactccagcctgggcaacagagcaagactctgtctcaaaaaacaaacaaacaaaaacagattaactattgtggctgtttttaatgtttttagggatcacttctctccagagtctaacacagaagggtgagttgtgcctacccagtatcttggatgctgtgtgctccagagttcctgtaatgaaaattatctctgccccatcagatggacgatgaattctgtggtgccttctccctctctggtttccatgttactaactgtcagtgcctttggttgtaggcagaatacttctatgaattcctgtccttgcgctccctggataaaggcatcatggcagatccaaccgtcaatgtccctctgctgggaacagtgcctcacaaggcatcaggtgggtggtctttgcctgaagaaaggtttacacttaaaatgtaatgatgataagaatatttaagatgcaaatgtcctacatcagagaggttatgaaatgttttcctgaagacatctgttgattttaggacagtttgactgttattctttgggcaaaggattaagatgggagtgaagaaatgatggttatataattttctaaagattcagaatagccccagcccagcccacactaagttcataaatgattccagacttttttaaagaaaaaaaaggagaaagaaacacatctggtgagatatatttggccaatgtatggattaatgagatacacaaaaatgtggcaaagatacaaagtaagtgattgggggcaaatgggataagtcaagaaaattccccaaaagttagcattgtattaaattagaatttgaaggagagaagagacatggaaaagtgggagaaaggggttcaacgtttctagtctaatcatccttctttgctaagaaaataatagtatgtgatatttgtttaaagcttttcagcttacaacagactcactcttgcgttatctaatttgaatactagtagcgagtcaaatccagaattgcagctcattttctaaattaaaaaattaagacttaggagatttgactgacttgcccaaagtcaaatattaggatagtaataagcagtagagttgagactagagcccgggatttctgacttttagaaatatacagagatcacttgtgttatcatcctaatgtatttccttctcatcttttttctctgaatttttacatatttgtgataatatatatttggttttgcgtcatgattttttttttttgcttttaaccttttaacataaccatttcctatgtcattatggattttttcaaaagttgtttttaatgctcttacaatattctattttatggatataccataatttgtatacacattcccttatttgttaattatgttgtttttagagtttgactatagcaatatcacaatatttttttaaactaatggatggtaacttccatgcacataggagccctatttttttgttcactgtggctccaccccagggcccagcacagaacaggtattcagaaagtaattgttggattaatgtgcgtaccaaaatcttggtgcttatctcattattttgttaaaatcgattcctaaaagttgaattattgtgtcaaatgataggaactatgagcttcttaaagactcttaaaacaaattgccaaaatgccaaattactttctgtaaaggttatcatacccatttttaccctggttaagcaatagggagaatgcttggcttactgtaatcccatcaacataggttattaatcacattaactactttagtggcttaaatagtgaaaagtcaggccaggtgtggtgactcatacctataatctctacattttggggggccgaggggggaggattccttgtgcccaggagttcaagaccggcctgggcaacatagcgagactgtctctacaaaaaattaaaaaaattagccaggtgtgatggcacatacccatagtcccagatgctcaggaggctgaggcaggagggttgtttgagctggggaggtggaggctgcagtgagctatgattgcaccactgcactccagccagggcaacagagcaaaaaagaaaaaagtcagtctcaaaaaagataaaagaaagaaaaagtaaaaagtcatttgtcacagtcttcttttggtattttttattcctattaaggtagaaaatattttcttgtatctattagaccatgaaaaatgtgtaccatgctcatttttatattgagataatagtgttcttcctactgatctgcaaagcttgttgtatattaggtatattcaccacttattgcatttttttcaatttaacatttatactttattttgggggagaatatgcagaggctttaaaatcctatgtggtcaaacctatcttttcctttgcaattttttccactgcatttatgttttgatactaattcctattccagagagcagttaagttataactttcatatgcatctagcattttataaaaatttatttttggaatattatgaaataaggctctaacctgaattatttttgagtcattaacttttcttacatgagaagttgaattgattcaagatatgctatttatttcacattaagtttttctatacatagggtgtgtttagagattactctttattttactattgtgatagtggtagctttatagtgttttaaagtcatcgatggcatactctctctttttaaaaaaaatttagtcttattcttctagaggaacgtgaaaataaattttgtcagatgtcaagtaaaaatccccttcggagctaatttaagtctctaaagtaatcaggagatcagatacttttacaaagggcattttcagattacggttatctaccacttccagtggatctgccttgttgcattccagtgccataagagtgggagactaaataaacacagagtttctctaatttcccgacctaagtgtcatcgtgggtgtagacaggagaagtataagttcagtttctctttgatcatcacagtgctgcaggtgtaaccaacagcacccctagaggatctgtttctgacttagacgtgtttgggttctgggtgaagatttattcacctgagatgtgtagccccaaggacgtgagtatctattctagagatgtggatacgctgattccactcagatggcattggtagggctttattaccttgtggagaagagaaagacactccagccaccaaattcttggaatatggtcatcactcaatctcatgccctgtcacatagtgttctttttagttgaaaataattttctttttcttttctttttttttttttttttttttgagacagagtgtccctctgttacccaggcttgagtgcagtggtgcgggtctcaactcaccgcaacctccacctcctgagttaaagtgattcttcacctcagcctcctgagtagctgggattataggagcatgccaccatgcctggctgatttttgtatttttagtagacatgcagtttcaccatgttggccaggcaggtctcgaactcctgacctcaagtgatctgcctgcctcggcctcccaaagtgttgggattacaggcatgagccagcacctggctaaagataattttctataaaattctccttgatcatattttttgctctttttgttttgttttgttttggaagcagtcagaataaaataagtacataacacctctcaatttctattttatatttttctttttttctgattaataaaggaatataagctcatcatagtccattaaaaatacattaattaattaccagttatacttacctgctcagcttctggtaaatcttgcgtctttgaatttctaatttaatgcttgtatcctaagtgcttttttcactttttgtgtctagttaaaaaactaacctgcataatgtgcacatgtaccctaaaacttaaagtataataaaaaaaataaaaaaataaaaaataaaaatcttactgaaattctactgcttaggaaattgacaaataagattttgaacatatgatgtgaggatattttaatagatcatgtttagatagaacatcattttctaataatttacgttctttataaataataaacgtagaggaaaaagtgggtgacactttggtcaacctgaaactaaaaacaacaagccttctttgggaaccaggtgatatgaacacatatgcccatgtgtgcacacagactcgcacacacacacatcctttgcatatacaactccctcaccccaccccacacacacatagtctttttgaagcagatgtagaatttgtttgtagaaatgcaggtgcaagaagtttatgggaaccttacaccattgcagagcagctactcattagcctcattagctcagtccctcagtaggagaagtgaaggtaccttgcattattaaaaagtaaccaaatcagtgtgtctttgctcttaagcatccaggtagcattcattattctacaaggctattttatacccccaagctgctaaactgttcttttatcctacagactcctatatgcctaaatattgcatgaagaaagaaaactcctcttgatctttaacagttatgaagtgcctgccttctggcatcagaagagaacaaaaacaggaaatacaaactgcagggtggttcaataaaattactgagttgtataacaaaaaacagtttcatgaagccaagactttgcctctttgaacactctctttttctgaccatgaaaccaacagagcagtggtgtttctcaactaggacttttaggaatccaatgtctacactgttaaataggtgcttatgctggagagaccatcttcttataggtgacctcagttcttagcagaatgtgaagcccagagtttgtgctaagtatttggtaagagaatgaatggctggcagggcagcttaaaggactgatgaatatttatgttggatatttctagtgatgtagcagttcatgatcatgtggtgtggaggatgggctcttgcctgcctttctcatctcttgccttgttgtaaggacagggactcaactgactggaggctgaggctatctgagcaccatgcccatctgtgtgtgggagcagtatgcaatcagaacaaatttgctgctttcttctgtagaagagttagttgatgtgcaatcaattgcatatcagtctgtacttcaatgctgtgagttatattcgatctgctttagtttttctgagttgttttaattcacctcgtttagattatacatcctattctgcactggaattcatatctggcctaacttcatctagcgtttgggaacaatggctctttactcatattcctattgttgcaaaaatacatgactttcacattcctcttattccttggaagcaaagagtctctgctttttctgcctttgatgtctctttttcttggtgcatctgtttttctgagtgcatgttgctagtattttattctctacatctcctactgtctatggtgaatttctgtctctgtgtatatgtgcaggtatgtgcatgtgtggaagtgcaagtgtgtgcctgtgcacacaaggtatatggttgtgtctaccataacatatatcacatctgttggtacctagtttgtgacagacaatatgctaaatgctgagattacaaaaacaagatatagttcttgcctttgagaattctcatccttaacaaaggatgcaaaccataattaaatcactacaccacaatgaaataatatatataggtgtttgtaaaatatataaatgtaattatataggcaaggggtgttaggaaaggctaaagaaagcaagtactatttaattttggccttgaaagttgagtgggaggacagtaggacagaaaacacaagaaagaacattccaagcacctgggtgtgcagtaaggaaattgtggatgtgcaccacacatttggggaactgagagaaatagtttgcgcagagcacagagttgacaaaaggcaattactggagatgcagctaactaaagtcagattttgtttttttaaagcaaaattctttgaaaacttttaaaaggtgtttaattataaatattattacctaaatggtcttatagataaagtttatataaacagaaacgaagacaagtagggtttgcacaagaggaaataaaatttttactttgtgttttaaaattgaagagtgggaaagtgtaatggtatggtttatcacatctttctgtaattcttcttttacattaaaaattaattgttgatctggctcaagatgtcctcagtgaaaaaaataataattcattgaaattataagctaggtacctcctaatttctaaactttatttcctagttctttacaaatcattctgcagtagggttcaggtcataactgtgcttacatgccttctatttccaaagaggtagaaatgtgcaggtaaaacttatatacctgggctgatgggatttttaatgtgttcatttttaacttgaagctgaatttaagggctagagttattatgcacaaataaaattagcaaaaattgcaagcctagagtatattaggtctttaaaaactataagaaggaaaatatttcatatcagttataacagtaattgaatataactttagtaaaataatttttagggatatcatttcttttggtttactaagaaaatgaagatactacatctttagttatctgccaaaattgcttacagtttttctattttaaaactttcattagattttgcaacctcgcttttgttccctgcaatggtggaaagccgtatcttctagcatcaccacaggcctaggaactctgtgaacatgtccttactttaattgacttaaagattatattagcaaaccacacacttttctttctttcctttttttttttttttttttttttgatggagtcttgctctgttgcccaggctggactgcagtggctctatcttggctcactgcaacctctgtcttctgagttcaagtgattctcatgcctcagcctcccaggtagctgggattatggatatatgccaacacaccggctaatttttttgcttttagtagacacgggtttcaccatgttggccaggctggtctccaactcctgatctcaagtgatgcacccgcctcggcctcccaaagtgctgggattacaggagtgagcctgtgatttgtaaatggtctttcagcacatctgaagatgtggaagaactaataattgttcttaactaaatttcctacaaacttaataagacagtttttgatatttaacatccaagatacattttgaaatttgataatgctggcaagcagaaatgaagatgagtttactgataggcatcttctcttccataccaagattctggaagccaaaataaaactgaagggcctttttaaaagaatcaggtgggctgcaaaggagaggctgaatgtggttcagaaaaaagatacacctggaaaataagtttggatgatggcgtccagtgaggaagattctgaaagttctatctttaagtatccgttcaagtttttccatctttttatgcctcaaagcaattattggcctacctgtccatgtaaaagagtcataagaagagtaaagttttataattgaacaaagtataagtacaaaaaatttaaagaaattacttgtcaattcctttgcttctttctgaaatagaaatctccattcataaatgttttgtaaattggcatttttatatatgagatttcattaagccaaggttttcaatagggacaattttactttagaactttagacacaattttgttttttctttttatttctgttaaaatatctgtgtttccttttcatcataatgatttgcaatgttaaaatctcaagtttcaggggagctagaaatggaagtccatgtaattttgagtatggcatagcaatgaacactgacaatgccagagctgtaagaggagttttgggttgccaaaagcacattgagaaattgtatgaccagcttgtgtgcaatgctttacagaaaagggcagtccagtttccagctcatttattcctataaacctagggagaaagtttatcgacactctaaaaggaaaagatttgtcttagcttgatacagtttgcacaagcttggcagaaaccataacttgccatgcagaaataaaatgaagcaaaaaatcacatgtatacccattagcaatatttctttatattcacaagaaagaacaagagtctggtggatctgctatatcagtcttacccagtggatatgttataataacccattgggtgttggaaatatacataatcagcttctcagcaaatgatcacatctgatttgccccattttcacccagtgatttgtggttatcccacaacgggtgtcctccttccctctttgtacagcaatgtcttcagttcccaatccctgctttgtgacttcattgtcaacacttgcacaggctgagtaatcattagactcacaagaaagagaagcttctctttaagaacataaaccattagatataaccctattcatgagattatttcatcacatcaaactctcttctagatgcctgagatatggacacttcttattaacaaacagcctgagaaaatattaacttcattaactcggtccaatgactgaactctagtctgagtcgtaaaatattttcaaagaagatattttgtcactttcacatacacatagtaaacataaaccagtggggtattgctcatcagactttatttaagggattatgaaatgctgatttctagccctttttggattatatggaggctgatgaagatgccacaaagtttcttccccgaatcaactgctttttatttattttcgtttgtctttctgttcttcccatgctacactgacgtatacataattaaccactttatgattcttctttccatctttaatttccagggaaaatatttaagatagtacaagtccagactgtgaacagaatatcaccaattccatattaatgaggtaaaaattggagtcattcactctttcttcacctgacatgatgctcaacttctgtggagcccagatgctcaaaatacagttcctactccagtggagatacaaggaaatccacaacatgtgaacatttttgctttgtcctttgactcttggttcccaagatttctgtaaaactagaatcaactagattaactatttctccacactttctctttttttcttttagttgttcaagttggtttcccatgtcttggaaaacaggatggggtggcagcatttgaagtggatgtgattgttatgaattctgaaggcaacaccattctccaaacacctcaaaatgctatcttctttaaaacatgtcaacaaggtaagcaccgatggtgattcaagagaagacatgttgtaagggcttaggtgtgatttggaccaaatatttatatctatacacacacacacacacacacacacacacacacacacatggttttttggatgatggctctataactacagcaacggaaggaggagatgatcagcacaggatttagcaacagtactaagatagacttcctctgaccttgaccccacttttaatattaggaataggaaacgtttcaaaacaccttttcttcctccctctccactcctccaacacagttgttgggagtcccagtgtatctcacccgtggtcatgaatttccccctttcttgctctgtttgctcaaggcaaggtggctcataattaccagcacttcccacttgtcccaaaggcaacactaatataacctctaatgaatatccacggaggacagactgccacctcatgccagtgatccctaccaggtcaaggcctcactcaatacctccccaccacaccccagatgcccatttaactataaaggcctggctcctttcacatccctatacaagcttttctagctcagaatttaagctctggagcatttcagtgctctaaagatgtacccataagtcatcttaccctctgaaaggggaaaggcaataccattcattcaattgcagtgggaatttaacaaggtacagtagatccataggaggagatgaaggcagaataaaatttgccttaccttcttccaagagccccctactgttggaaataagggaggcaaaatcttactctgcagcagatttagtgaaatccaagtgatatcgagggaatgagttggaagtactggtatttgatcaattatgattaattggtgggctagaacagaaatgaacactactgtctcacactggctgtgattcacccaacatgatttcaagggtgtccatataagctttgtttctctctgctgaagctgagtgcccaggcgggtgccgaaatggaggcttttgtaatgaaagacgcatctgcgagtgtcctgatgggttccacggacctcactgtgagaaaggtaagacatggagccgatttcccttgctcccttcctaatgaacatggatgtcgtgcaggagccccatgtgtattgtgtatttttaacacctgaaattattttcctggtcacaggggcagaaaattttggcacaatgccatcactttctgtggccattcctggccatctcccccaactcatcccgcttcagaaatatagccactgtactttggcataatcttatgaaaattttgaggtttttttcctcctcttaagttggatttaaaaagctagtatcaccactgatctgaaattgttccagttgaaagtagcttgattcacaactaagagtatatctaagttatgaagttatgataaggcaaaaaagtggatgaatttgtgtagtaagtacatcaatttcagggaaattaatttttaaaaataaatgaaaaaagacataagcaaggaaatgaatattaatcataagatgtttaaatactaagagcttatctgactacagtaagcaaaatatttttcatcttcaagaaataagaatatcctgtgagagacagttaaaaaataattttaaaataagtaagaaagaataatattttcttatttttcttctttgcatttatgttggaattagaagattaagcaaatggggcaaagtgaaaatatttaacagttttaagaagaccacatcttagtcaaaatgattctggggaaaatttattcaagtattcaaatggaaccaatccaaaagtcatctctaagaaattggctgagaaattgaaaaacagcctaatttataccacaaaaataatattaatatagcaaacttgtatctctgaagagtaatcattttagagtcaaccacaaagcttgaaaatgtagacctgttgtattattgacatttcaaaatggtcctgctccaaaataccatttggccttaatcagggttctctctccctataagccctttgtaccccacgatgtatgaatggtggactttgtgtgactcctggtttctgcatctgcccacctggattctatggagtgaactgtgacaaaggtaacagtttctttttaagaagaaagttatttttacttttaaaatgtttgattagaataagttactttatatgtcctcactcttcataacagctctgagaatgtatggcttagggtaaagatggctgctatagtaactgaaatcccaattttagtgtagcataatagcaaaagtttattttcattcacagaatgctccagtgcattttgcctggtcagtgggcagggcagctcttctccatgcagtgactcaggagcccaggcaccatctatctgtggtcctgcctagagctttggaactctctagatccagccaataggcagagaaggattgaagtaagcactgctaaaaataaattaattaattaaaaaatttaaaagccctggcccagaatttacccacaaaacttccacacctattccataggtaggaattagcctcatggtcctacctggtttcaggcagaagaaatgttgcccctggctggacagtggtctcccactgacatctcatattacataacgggagtgcaaatttttgtgaacaattagctggtcttgccacatggaattttagtatgtcctaaattggttttgtgggtgagcttctaaggctaaaattaaacaacctgctctacattgcctaacctagaagtttactgactcccgattcaatactctgctcacaaatcacatcccagagagattaggttcttccttcttaacattgcagcaacacagccagattttactcttagtaagtgaattcaaacttggccctaaaattgctgaacgattcatactctttacaagagacttgtttattttgcccagttcacatcttttaagtggaaaaaaataaagactatgctgtgaaatttgtatatttaatgaagttatctttgtgttaaaaatgctaattgtatgaatagagcattttttgtcaataaacatatgagttaagatagaataataaattttattctttaaaagtgtctctttagtgatcactcagttagtaccaagtaagattgccatgagcagttttttgttgttgttgttgttttttaaaggaaagctaaaggaaagagccttcagtatgagtcagaataacttaaggttgtttactcttttatgatgtacaaagtactttcctacagttatgtgattttactctgaacatcttttgagatatgtaaagtattatccatctcattcctagataagcaaagtgaggtttatggaacttgagtaggttgacccaaattcatatcctgcactgtaccatgttgccacccaggctacctaattcagcccttggttcttccacgagtgactctgaacctgggcaggcaacttgatctctctgtggaccatgctttttctatctctagacttggaattaagccattgaccctcctgtccctcacccctgagctatatattataactatattgagataatatgtgaaagcatttctgccttttttaaagtggtcttttaaaactatagtattggattaaaaatcactttttgaatgtgttttcataaagattaagcactaattactctaataagaattaacagcctgtgagtaaaattcattattgtgaatctttttgtctaaatttagcattcagtgtctctgctattttaaaactgggcattctagaggagaattaaactcttattgcctcaaaactatgaataaataaagcaaatcctccagatttagttgaagaactcatgtattcacaagagaccatttgtgagaccttcttatgtaggcgtggccattgttggtgtggtttgcataatggagtgtcaattgcagtgtttttctagtgctacggtgtcacaaacaccacatggtcacttgcaaagtaatatatctatctatattccagtacatactatattttgtaatattttatctttcaaatgaaagattttcctactcatcagactccagtaatttttttattcttttataatgtctgttgaaattccacttggtctcactggggatctgggaatattaaaaaaaaaaaatttctacctcaacaaaaagatgctttaattctccaggagggaatatgtggaggctctgaaaaatgatttaattactactatggaaatagacatcagcactatgtatttgaacaaatattaaagaataactttcattggcccttgggacatcacaacctttaggacctaaggagtttagcactggccagtggggcctcagccctagagaaagatacttcgtgtctctagctgcttgtttttctaatcaagaatcattgcacaacagaaatgtagagaagcttgctcatgacaatacaatagcatacaagtactaagagtgtggccaaattatgtaaccaaccttgccgaattctacaactttctatgaagctaccaggttcattgcattctacacatcagtaattgggcagtgcccacggggcatgggccaagtgggtactgatcccaaagttttccagggcactgatctcatcattcccttctatctcccagagaaacagaagtgaggagacaggacacacttacaaaaacaactgtccagccttagcaatactccagcaaagaggaggccccaagagcttgttctcctaaatcctaaatcctataccaaaatgctacagctcccttccacattaagaggcttgaatttttttgtgacctgtgtggacaatgtagcaagactccatctatacagaaaaaattcaaaacttaatcaggcatggtagtgtacacctttactcccagccatctgggaggctgaggcaggaagaaaccttaagcccagggatttaaggttgcagtgagctatgattgtgccactgcactccagcctgggagacagagcaagaccctgtctcttttaaaaaacaaaccaaaaaaaaaaaaaaaaagagttttgatttgccaaagtgagtacagcacttccttaaacttggagatctttgtgattttaaacacaatttatcatttaagaagcatgatactcgtagaacattttgctttgtggactttttttttcccacaaagaaagcatacacttagaacttttggatttcttttctgattttcctactggaagcttattttagcttttgttcatctatagccaattttggccaattttatatgggacaagaacaaatgggtcatataactggaattgctaaaaatccaagctctcattttaatttcctttatagaatgagccaacttgtctatttttagatatttcctctcctcccctctccatttctccatcctccctctattttaggtgctagtgagcagtgaaattccagaaactgacactgtgagagagggtttaggatgaatcacgaagtgtgattactacctggataatctggttattgggcttccactatgatacagccaacttcatcatcctctggtccctgctgtggccacactcctacctatgggatctcacctgggcccacagtctttttctgaatacagttactcttttctccgaaagtcataaaagtatattttttaaaaaacaatctcaataagataaatatctgttcatcttgtcctgaaagaaagttgcttttttgtcaggtcctgatatttatgacttctcttttatctattccaaagtaagtcttctcctttttactcttctcttatcctctaaactgatgtttacaaaaaaaatccttaggtttataccattcttttccttttaagggcatagctatgtataagaaaattaaaaagctaattttttttactgtgcctttcttcactgagatggaaactcctactggtgggtagtatatgatgtgtgtggtctcctattatgttctggagtctgcacataggcaagcaattggtacaaattttgtatttgtaaagcagcttattttattaagtcaggaaatgggcaagtagcaagcagatgcctaaaaaatagcacctcactttaagtgaaatttgtgttagatttaacctactgtctaatgcaacacccctgttactcattctaacagcaaactgctcaaccacctgctttaatggagggacctgtttctaccctggaaaatgtatttgccctccaggactagagggagagcagtgtgaaatcagtgagtattgactttctgcgttcttttgacttggggagaccttagaaaccccatataaccccttcattttatcaaggaggagtcggaagcccagagagaatgaataacttgtctaaggtcttaggccagtggtttctttttgctagattcagctaccatgcattttggctgaaggtggggcaaagagtgacacagctcacctcagaggactcagaagaaatgctctctgactcggttatgtctgggtttggattattcaacagttgcattgttttctgttagtcattttgtcccctcctcattatgtggaacccatagcttcagactggaaatgtagatcagagctctgggacagctgggatctgtttacctatgtacctgtttcccctgccgctcactgccagatatcctagactgagcctaacaacccatctaagagaaaaaggtagactcaagaaaaacgagaaaaaagaggcgcatagcaataaaaaaagaatgaaatagtagcacaaacagcaacatgaatgaaccacacagatactaagtgaaagtaaccagacacaaaaagttacctactgcatgatcccatctttttgaagttcaagaataggtgaaactaacggatgacagtagaaacgagaatcacagttggagcaaaaggaactttatggaatgctaagtatcttgattggtgaagtgccacacatctgtttatgtaaataaaaatatctgaactgtaaacttaagattggtacacactatgcctttactatatgtttgtcatacttcaatacacaaaagttaaaaaagtaagggttgaaatgtggtagcttatcattgttttcggaatcaatattccaaactgcttgtccaggctctgccattgaccagccatgtagctctcagcaagtcatgtagcctctctctttaactcagaaatgagataactccctcctagattgccttacaatccagaagaacagatagcaccaaagcacatgctcaagaaagagcaaaaggaaggtcagcctgtccactaagtgtcctgtgtccctgcctttcttgatatgtttgttgagggaaacttggtctgtgtttcatttccagctgtatctgtaaaacaccactgtttggtacagccgaacagtgttatacagtagtgtatatagtagtgtattgtagattgaaagttgaataagactaagttcctgtttgaactttcaacctctaatttatttgtgggtttttgtactttaatgagtagtggatgaagtaaccatttttatagggttcaaatgaaatacctctaaagtttccatagaacatgtaattaattgtctgggtgtggtttctattcttattaattacccttcccggataaagatatctctgaactaactcccctcaattttcccctgtacttacttcagactctgcacacttacttggttcatggttatgaatctttgttcataggctcattttccttcatgtaaatatgccctttcatgttcttaggtttatgaatcttctgttggcagagacaatgttttgtattcttggttttttgttttaccacatcaaaaaatgtgggtctttgaaagctcctgattgaccctacttcaagttttatccaaaatctttgcggaagtttcctgtttctatcacgggaactacattaccaggaaaatatggaaatgggtcttgagttgaaaagtgcctccaaaggtacagaaacaaaaaagtatagttgaattatgtattcttatttttaattaagatataagtcacaatcacataaaactcaacattttaaaatgtaccattcgggttattcacaagattgtgtagccatcacctctatcaaattccagaacatgttatcatccccaaaagaaaatctgtacctattagcagtcacctccccttcccctttccctccagacactggcaaccactaagctactttctgtttctagacttgcttattcttaacatttcacataaatggaatcatataagatatggcatttcttgtgtggcttcttttacctgggttcattctagtgttttcagtgcttacccatggtgtagtatatatcactgcattattcctttttattgccaaataatattccattttatggatttaccacattttgtttatttatcagctgttggacatttgggttgtttccactttggggctattacgaataatatggctatgaaaatctgcgtgtgagatgcttgtgtggacgtttccatttcttcagaatatttacctgggggtggaattgctgggtcacgtggtgacaacttttttgaggaactaccagactgttttccaaagcagttgcatcattttacattcccaccagcagtgtatgagggttccagtttctccacatcctcaccagcactcattgctggctctttgttttttgttttttttttaaatgaaatgtatactccgatgccatgtttattttcatttctcctgacctctatcaagaatgatgccgtctcacctgggtgcagtggctcacgcctataatcccagcactttgagaggctgaagcaggcggatcacctgaggtcaggagttagagaccagcctggccaacatggcaaaccctcatctctactaaaaacacaaaaattagccaggcatggtggcagacacctgtagtcctagctattcaggaggctgaggcaaaagaattgcttgaaccctggagacacaggttgcagtgagccaaggttgagccactgcactccagcctaggagacaagagcaaaactccatctcaaaaaaaaaaaagtaaaaaacaatgataccatctcaaactttattccgagttgattgtgagatatgcttgtaggttaacaaaactatggttagaggtatctggatggatggtgtgtacatacatcttgttatctaagactcatggatttcccaagaatctttaatgaaccttcagttaaaaagactacccaaattatttataatccttttctaatgcaaggattattagaaaaggattttaaaaataactgagtgggttcttcttattaaagttctcaatataaaatattctctgttaaaaaaatttagaatattggagaaaacaattaaaaatcacctataatcctaaaacccagagatgacaattgttggcacttaaaaacccttttatctgttttcttcatttaactgtcacttcattaaactgataatttaaattatcctacaattgcataggtagaagaaatttaatgtctttattttgtcaatgtattcttatttcattcttcttacaaggactcatctattggttatagtaaaaatgccaccagctgaaacttagtcaaatctgtttgtctttagacagggcttagtctattttttttttttctttttttgagatggagtctagctctgtcacctaggctggagtgcagtggcgccatcttggctctctgcaacctccgccttccaggttcaagcgattcttctgccacagcctcccaagtagctgagattacaggtgcccaccatcacacttggctaatttttttacatttttagtagagacaggatttcaccatattggccaggctagtcttgaactcctggcctccagtgatctgtttgcctcagccttccaaagtgctgggattacaggcgagagccaccatgcccagccagggcttagtctctttaagtaaaaatgtgccatctctcaagctgactcagttttccactatttaatgggtagaatttggttgcaaactattttcaggaagaagaaattcctattaaagatatttttccagtattatgaattttaaaacaatcagatcttcatgaattttggctcctatagtctttaaactagtaatagctttcgaatgtctaacgtctcctgcagtcacgtttctgttgtataatagccaggagagaacgtcctccttcctgactgcggtgaatctaagggtcctcacttccctgttgccatgaaaacaaaaaacttcttgaagtttatgaaaggattatctccaccagtcattttctgcattatcccagttaccaacttcacccctcatagaggaggagaaaattcgggctcaccaagtagttcacatatgagtacgctgtcttttctgccatataattatcatcctataccttgctcacttgaaaaaacctgatgcattgcagagtactgtgatatgacccaattttgtgtatatgttggggtcaggtatttatttgatgcaaatggaaatttggagttagatattccttctttttggtgagagctgagatcttaactaaacagtaaatggtattcttgtattcaaacctggcaaaaaaaaaaaggaccttcttttggtcaatgaagaggtgatattctgttattaagtttgttttcatacttgtttctggaacacctctatgcagaaaaacctcagtgtctaacggcattccaggtttgtgagagaccctaacatcccaatattgttacgtctatattgtctccacaatgactaaatactgctttggtctacttatatatgaataaagtccttttaggtaaataaaaagatgaagtgtttttagtagaatgattttcataaagaatttacttcttgtttgtcaagaatagtacttgtcagtaaaatatatgggggttgacttctttcgcagctttctttggcaataaaaagaagggcttagagagtgaaaggtgggttggtttaggataaattttcattacttctccttatgtacctagaagcctttgtaatgagtgttctgctaaagtgaataaaaagaaaagaaaaagaacaacaaaagcaatccaaactcctccactaccaaaatctacaggctacttgctgtcttcaaaacatcttatgccaggcataggatgtggtttcagctctaggtaaaaagtaacttatcttccacttcttcaaaaactaggacttaggatagcaaattctagattgcagagggataataaatagcctctggagaaagaagtgagaaatttattaaatgatttttacacctagggccttactccagctctaaaattctgtgattcaaagatctgtgaaaagcattcgtaatactcattgggcaaagagataaaagaaattaccaagtatcattatggacctagggcattccaggaaaatgcattgttgtgatattgggcaccttttgtgtcacatctcacagcctcttggccagccttgcacaccagccattgccactgcacctcgacttagcagccccatactcctgttttccacccacaaacacacttttgtgttgcatttccctccttccatttcacccctcccattcccccattcctgtttcctacaatcacttccccaaataaactagctgcatgcagatcctgctttctggggaatcctaggctaagactgtcatcaggtacaggtatagacttactttcagaaaaagtgacattcaaaaatcaaaacttggccaggcacagtggctcatgcctgtaatcccagcattttgggaggttgaggtggggggatcacttgaggtcaggagttcgagaccagcttggccaagaaggtgaaaccctgtgtctactaaaaatacaaaaattagctgggcatggtggcacatgtctgtgttcccagcaaccctggaggatgaggcaggagaatcacttgaacctgggaggcggaggatgcagtgagccgagatcctgccactgcactccagcctgggcaaaatagcaagattccatctcaaaaagaaccaaaaaacaaaaatcaatacccagtgaaaagattatttaaagggtaatttatgtcataacttttagtaaagtatatcttagcaagtatttgtgagtcagttaaaagattattctgtttattaaaaagtaattgggctgggcgtggtggctcatacttgtaatcccagcacttttgagaggccaaggcgggcggatcacttgaggtcgggagatcaagactagcctggccaacagaatgaaacccgtctttacttaaaaaaaaaaaaaaaaaaaaaaaaaaaaaaaaaaaaaaggatataaatgcagcattttggcaacacatttataatccaaaagcataagttaaaaatattatcctgtctgttccaaaaacaaaactcaaaaaaaaaaagccagagtagatctgaaataaatgaaaattgccatttaaaagcacttatcctctcaaagccttgtaattcctttgaaaaatgtaattacctctgaatgaagcaccaggttccttgtttagctgcattcttctctttttcaggcaaatgcccacaaccctgtcgaaatggaggtaaatgcattggtaaaagcaaatgtaagtgttccaaaggttaccagggagacctctgttcaaagcgtaagtaccccatacacattgccaatctgggctactaggtcgttaaactagcaggagtctctcactacatacttccgtgcttagtgcatgttgcctgggcatcacagttaacctttcttcactgacatatatgcttccttatgtagaccagaggtgtggtatgaaatctgtgcatgtaaaaaaatggatactcacacatgcaactgaacgttttaactacaaggtggtttctttgttttgttttgttttgttttttgagacggagtctctctctgtcgcccaggctggagtgcagtggcgcgatctaggcccattgaaacctccgccccccaggtgtaagcgattcccctgcctcggcctcccgagtagctgggactataggcacctgccactgcacccggccaatcttcgtattttttttttagtagagatggagtttcaccaccttggccaggctgatctcgaactcctgacctcgtgatccacctgcctcagccccccaaagtgttgggattacaggcatgagccatcatgcccagccaggtgttttcttaaggaaaataaacttccatgctccagcagtttcaaaatcctactgaatgtcttttgcgaatgaaaaatatcatgcttaaagatcattctcaggactttacaaaaagtccaaaaccaacttatgactggagactgacttaggaaaaaaaattagaggatgaagccaaaactaacacattctaaagaattgcaaggaaagcaactatgtaattctgttgaaaaaggaaagctcaggaaatactctttttatttcttttgattctagctgtctgcgagcctggctgtggtgcacatggaacctgccatgaacccaacaaatgccaatgtcaagaaggttggcatggaagacactgcaataaaagtgagtgggagaaataaaaagttgtaaacaaggaaaaaaataaaaataaaagtgagtgggagaccagaagaagggccagccttttcacttcggtttcttggcttcaaaggctaacagtcaacctataactcagccctgctttccatttcattaaaggcagctttttctctgcctcttctcccccatacttctccacctctttaaactttagagtctaagctttagtgtgtaaagagtaatgcatctttgtaaaagatcacatctgtaaaatatcacaaatattttctaggctaaattagtaatacaggttgatctaggggtaatatagtgtgttaactatgaaagaaatgacacatgaaactaagattttaaatcaaatgtagaatcagtgtctccttacctctgattttataattcatgatttgtcaagtatcattataaaacatgaagcattttgcttcttaaaatatttaaactgtactggtaatagtaagtaaatgagttcttttgagggaaagaaaaggtttataaagctgtctatgggagagatgttataatggagttgcattttttcaaaatttactaccaaaaatgagctagctatgtagataaacagctggcctattttagacacacaatgacacttgctaaattcattcagtattgattgtggtctctcctgtgctaagcatgaatccaagcactggggacacaccagtgcacagacagaaaaggccctgccttgtggagtgggaggggcagtcaattagcaaattaacaaaacaacacagtttcagcatttctggcagctagaactcagtctcctaagcatgggcccactgtccactttagtttgaaaaaaggaagacttcagtcacataccatactcttcgaaaacataattccaagctgggagtgttggcacatgcctgtagtccaagctacttgggaggctgaggcaagaggatttcttgaatccaggagtttgagatcagcctgggcaacatagaaagaccctgtctcaaaaaaaaaaaaaaaaaaaaagcaaattcacaaaattccaggttgtgtctaccatattatgtctccaaagtaatggatacaaactgaacaaatcactcacatatcagatgttttcctagatcagtagtctccaaaggttggtgcatgcaacccagtgagtgtggaaattatccactggggtgctaaaagaatatactagtttttaaatattttttatattttaaatttgatttatatttatatataaatatacatttaatatacttatggtagtctttctaatttctaagttttgcttatattttacaatgttcatattgtatttgtttaatgtatctaaaataagtgtatatgtagttatacatctgtttactttaaggtaggttggtatctggtctaggttacatgtattagtctgttctcacactgctataaagaactttcagagactgagtaatgtataaaggaaagaggtttgactcacccttccatatggctagggaggcctcaggaaacttacaatcgtggcagaaggcaaagggaggcaggtaccttcttcataaggtggaaggagagagaatgaccatagaaggagcttgccaaacacttataaaactgtcagatctcgtgagaactcgctcactatcaggagaacagcataggggaaccagccccatgattcaattacctccacctggtgtctcccttgacacacggggattatggggattacaattcaagatgagatttgggtggggacacaggcaaaccatatcactacactaagccactgatttgatgctttttcacccactgaattaactggatggttgattaaattggcttcaggtggacacaatttaataagcagtgccgctcctctggaaaattgcttctcacacagtgggaatggttgaatggtatccctgctaggacatactgataaggagatcttctttggactaaaagacctataggagactcaatatttctagtgccattttggaaaagagtaaaccgaagctcttatgccaccctcaactggagacaaaccctgaggcttgcttcagaatcaaaataactaaaaaatcctcaagcctagtccagaccacacatgcaaggacttagttacaaaggtcttctaagactcacatccagatcccagtgatccccacaagtgatgaagaggggagcacaagggcactgttacttctgatgcacccagccattcttccaaagggaaggcaagttaggggccctcgtgtggtagatgatgcctcctgacaggtctgccagcctccaaacagcacccccacttggagattatgctgctgaaagcgtctgccatcagtgtgcctccttcaaatccaagcattgcatgccaagaagatgacctggtgcttgattcaaatgcaaatgtgttttccaggagaggtcacccagccattttgtacattagctaaaataattgagctgaaagaagggggtttattttgactagacggaggtgacaaggaagctctgaggcacagagttctgctaagaacatactcccagtgggatgacacgttgggagttccagggacccaggcatgatggtggggaggaggatactggagacagaagtccccgcataggctcaccctcgccaacagaaaggtttgggcttcatgggtcacaggccaagcagcatggtagagatttactccaactcattgctggctcaggttttgaccactccacaagctactagactacatactgacaattcaaaggaacacattcaggaacaaagtattctgttctcagtagctgcttaatggcatgtttgcatttaaaaacacaaggaataaataaatgctgaatttaactcagatgcacaagaagatgcaggcagatttttacaatgtaatttgctgccttggatcagttttaggagatgagaaatgagttactgcccctgagcatcaccccaagtaggaagaagggaggtctgaagttgtgtaacttagcacattccatttacaacccatctggaaacagatagatgcccaccttgaccaaaacacaaatctctattgataaggaagagtcagttcaaatcttaaccttttccctgacacatataatggaagttcttaatttttacaaaattcctgtcttataagtgcaatagtcacacccaatcatgtgatctttatgaagagtcgggttgtcatattgaactggatcaatatcagctaggttaggtttgcagtgcagtgaaaaggatcaacgaccaaatctgcagctgcattcaaaatttcaatgctagatccttaccagcccttggatggagactatacttccattcagtcacattcacccagattttgcatcaagagtttctgcatggccagaatatatagggaatgagaaatccaatggaaacctggtttcatggagttagtaaaatgggttgctcttaacagagatctcttcattcaggtagctttttgtggtcattgcggtttttcattctggattgaaaaggcaaaaatggatttcatttgaatggttaataatgaatctgaagagcctggttttgtagtttctttccttttaagctgtgaataattttgcagggtacgaagccagcctcatacatgccctgaggccagcaggcgcccagctcaggcagcacacgccttcacttaaaaaggccgaggagcggcgggatccacctgaatccaattacatctggtgaactccgacatctgaaacgttttaagttacaccaagttcatagcctttgttaacctttcatgtgttgaatgttcaaataatgttcattacacttaagaatactggcctgaattttattagcttcattataaatcactgagctgatatttactcttccttttaagttttctaagtacgtctgtagcatgatggtatagattttcttgtttcagtgctttgggacagattttatattatgtcaattgatcaggttaaaattttcagtgtgtagttggcagatattttcaaaattacaatgcatttatggtgtctgggggcaggggaacatcagaaaggttaaattgggcaaaaatgcgtaagtcacaagaatttggatggtgcagttaatgttgaagttacagcatttcagattttattgtcagatatttagatgtttgttacatttttaaaaattgctcttaatttttaaactctcaatacaatatattttgaccttaccattattccagagattcagtattaaaaaaaaaaaaattacactgtggtagtggcatttaaacaatataatatattctaaacacaatgaaatagggaatataatgtatgaactttttgcattggcttgaagcaatataatatattgtaaacaaaacacagctcttacctaataaacattttatactgtttgtatgtataaaataaaggtgctgctttagttttctga

SEQ ID NO: 350 - DNA, 477033 bp, Homo sapiens
acagcttgcaacactcggcatcttttctggaggcgcctccttcagcagccgcagatggcatccggctgcgggctcggggctcgcaattgattctcccccttgcccacctcgagtccacggacgcacctctcccttcccctcctcccttcgcgcttctgggtctgagcccagctcgcgaccgccgggcagaggatcagtcgcggcggccgaggctgagcagcagcgctctcgctccctgacctggggagaagcgcccacccgggagagctgatccccggctgcctccagcgccccccaccttttgcactccaagccgggggctccagagaccccgctccccaggcgccactatgctggacccttcgtccagcgaagaagaatcggatgagatcgtggaggaggagagcggcaaggaggtgctcggctcggccccgtccggcgcgcgcctgtctcccagccgtaccagcgagggctcggccggcagcgccgggctggggggcggcggcgccggcgccggagccggggtgggtgcaggcggcggcgggggcagcggcgcgagcagcggcggcggggccggggggctgcaacccagcagccgcgctggcggcggccggccctccagccccagcccgtcggtggtgagcgagaaggagaaggaagagttggagcggctgcagaaagaggaggaggagaggaagaagaggctgcagctgtatgtgttcgtgatgcgctgcatcgcctacccctttaatgccaagcagcccaccgacatggctcgccggcagcagaaggtaggtgcgcctgggaggcccagggagcagcacccggacgtcgccaggcgggcggggtgaacaatgggagctggcggcgcagctggcgaggaggagcaggagaggtggagaccgcgccctggggaaagggctacgaggccccctcccagcggccgggctcgcccaggcccagcccaacccagcctggagcgctcctggagctgactgggaccggcgagggccgcggagcgcagcgccgcttgctcgagcccccccagcccgggagcgttggtgagcgaggcaggcaggtcccgctttgtggaccgagaggctcggggagtgatttgctgcccgcggcgcccagagaggccttgctcgcttgcagggctcccagcgctctccagcggcgggcggctgcgctcaactccgggcccgccctcctgggcgtgcgttcggcgggcgggggcaacggcaggtgggggcgccgaggtggagggagaagagcgtcttggagcagcgctccgctcgctggggcagagagcaaccgcaggggcaggcgggagaaagcaagcccagaaggcgaagcttcccgtgactctgcgaagggcaccctcctctccctgcccgggtcagctgatcaccgactagcgtcgccaaagtgtcctcgggcactgcttccttatggctggagttctcaccagtccccctgacccttcctcactgaccccagagcaggggcacgccctctggtccttccgtccgggtcagcccctccgccgtcctgtctttgaccctattctcctcttcccaaggtgacttcgccgccaccttctggctcgcctgggtcctccaagccctgccactgctgccttgataaagtacagctgcaaaaagcttcgcaatctgaggcatcaaaagctttttctgtctgaggctggggcaaggctgacatagctctgggctgcctttgatgttaaaaaaaaaaaaaaaaaggcgcctatttctatcagctgttctttagctggagaaagggatgaggggtactgcaagatgaggggcagtggcggggggtggggacagaagaaaagcaggcaggaacccagctggagtgagttagtgaagaaagtcagcgttctgttctcttttaaataaatttgcagcacttgagctatcaaaaaagccagtcaagccccacacagaggcagtgtgaggccagtcctaaccccatcaagactgtgagactagtgtctgaaaatagtgaatctttcagttgctgccatttaagaacaaattacatgttgctgtagtagcattaggttttccgtatttatccacccttaccttgagttagcacagatttctctgtttgttttgcttacatgtgtacacacaccacccagcactgatgatttatttcagccatcacgagcttggatatcagtttcattaaaagataaaactgatttccagggtgagagacaggaggtgggttacacacaagactctccatctttatctgtggccccttgttttttcaattcgtatttttgactgcagtagagcaaaagtatcctcagagaagtaaaagtttttgggatattattttaaggctggatgttgagtccacggggcctaatagttcacatttcagtttggaattcctattgtaattgtgcctttacagcataggaacttcaacctccaaaatctatcccagtaataacagcaccagccaaaaatattccattcctttgacaatgaaaactgtgactttaagtgttaggtcgaaaggggtgggggagatgtctagagacatttatcaaagtctctagaggtctgtcctttaaatagttgcttaagtccagagctagcatggagaaagaaatcccacagagacacagttcttctaaacagaaacttcagttactttagagattattataaggccagatttttctgatctgattgtatgctttacctgaatccactcaaagctgtggttttgaggggcatgctgtttgcatttttacacgggagcttaacctcagagagactccaggacagattgataacactgacatttggtcaaactattcttagttatcacagcaaactgttgctaaatacatatcccagtgaagctatcccagagcttttggctatactgggaagctaaatttaaacaacaacaaaatatatatatatatctccttattacaaaaagaagctttttcactgctatatctgtaagtttttaatgcctttctagaggtgtgttttgctccttcaagtagaaagcttagaactctgattttttaaaaataagcaatgattgagagtaattaaaaggtttgcataatcactgtggtaaagtttaaagccaacaaatagttgatgagctaaagttagtcttggagaaagataaactagttgtaaactaaacatgagtttgcagtagaatagaaaaggatgaactagaaaaagaggaaaaatgtagagaaagggataggatgatatggaggtcagagagagagagaacgagatctatgaaaaggaattgctgaattgtggagaaaagaccatattgtacagagtataatgcaccatatgaaaccaaataatctatatcacaatactcacaccactttttcaagtatctactatgtgcacggcacatagatcattttttgaagaatagattttatctttctgaacagctttcaattcactgaaaaattgatatacggtacagagagttcctatatactccatatctaatttcccttcttaatatcttacagtagtatgggacatgggttacaatgaactaatattgatacattattattaactaaagtctgtagtttattcagatttccttagtttttagccaaagttatttttttctgttcttaaatcattttttaaatctcctaactctaacaatgtacaaattgccatcctcgtttttaaaaaactgagacttggaaattttgttatttgcctaaagcaccacgtagatgggtaaaagatggcaattgaagtgtgaaacattctgattccaaatcctatctttttaatatgagatactggctagaaatagtctaggataaaaagagccctagaatcctaacaacatgtcaggtgtacttctttacccagagttatttctctctgaattgagagaggtcctcctttcttcccctgtacacccatcaaatatagtcactatgggcaaagtggatgcttaagtataacttcttaaagaatatgaaggagagggatgggcttttagtgggtaaatttaacactagactgtatcaactttactatgtcgtttaaactgaaaggaaaaagattttagctcggaagaacacttccgaaggaacagaaggagacagtaccatcatttggataattttggtaattactttggtttcacttttactgagaaaaagagcattccaacaatcttcctaattaaagaggggactttaaacagactatctgaaaaaacattttattatttaccgatatattatgttacattactgtgaattgaaatataacatggcgaaataatttatgaccaaaacaaaaatctccccaccagaatgtaacaatgtatgtttcagtagctcagaaatgacagtttggaaagcagttctttgctttttcttcttcttttgtcagaatggtaaagtgaatacctagaagttggcatggcaaagctataccatatgtttctaaactatgtagtaacggtgatgggtggctaccttgtgtgaactagctacttatagtgagggaatgtaaaagcaggcactgttagcaattcatgtaatatttagattgacatgaccattttttaaatgatgtaggaattattctaatagtttaaaatgagcattgtgtctacatacataggtatagtgtacatgtgtgtctgtgcatgatgggggaaaagggtaatccttaaaactgtctattacacagcaattcctatttcattcaagaggacaaatgtcttgtaagttcaagctactcatttctgtatgattcagcttgtatctgcccatgaaatgatggctaatgttgagtcatagccatagaaattctttccttattcatttacttgggcttatttgggcaagactaaaaagccataccttacataaaaagacctagtgctagctaactatatatgtgtgtgagagagagcgcaagtatgtgtgtgttttgaatcaataataaagttgtctactcagatatattttgaggcactttggtctactcaaaattcttaaggtttgctttgttagtgcaatatatgacttgcagtctaaaaaaaaattctaccttttgagagaacaaagtgacgattaaaccaatttttctttaaacagaattgtttctcttcatcaggggaagaactgaattatttaaatgggcttgttggcattctcccctccccattttccttggtacattgggaagccgctgttatgcactgatagcagagactttctgaagatgcggaataccatgaaaggttcttgcctcattacacccctagcataggcttatgattccctaaaactggaccgaagaacaaaggaaattaaatgtttcattcctgaagaattgcactgagtaaaatgataaaagtcaaatgacttagggatcttcccactgcaaaagcaaatttaataaacaatcgtaagctatcatgttgaaatataaccagcatctgtgatttggggacaggtgtctataaaacttaagctggaatgatgagagttctaacctagaaataagttctaaataactgaccagttactcattgcaccaagcgctcacccaggcttgatggcagaagaaattggtacttgtgagatgtggttcctgaactgggggagcttctagtttggaagataacatatatgtcaaataagctgaataagaaagttttagttgtaagacgctgattagaagtactaaagtggggaaggaagaaagaagagtgcatgcacacacaggattggatacagtagtagaaaaaaatcttcatagagaaagtagactagggttaggtctttaaaagttaatttcatttgagtaagcataggaaaaacaggtattgcagtctggagaagaacactaggtagcagaaatgtggaaaagagtcactgttaggcaatgtcagtcagattctgttggttctaagtgacagaaacccagcacaagtggctaaatcaaaaaagaggttgagtgacttactggttcatgtaagtgaagagactggtacagaagtgactgcaggaatggctggatctaggaggctaaatgacttccatatcagaatgaaaaaagctagatgatgaagggaaaggatatacagatttagcttccataatccaaaaacataatatctgaaatgctctaaaatctttttgatcatgacatgatgctcaatagaaatgctcattgaagcactttggatttcagatttttggattagggatgctcaaccagtatgacataaatattctaaaatcctttaaaaattcaaaacacttctgctctcaagcactgaggataaggaatactcaacctatattttgaaacctgtgttttagctcaaaccctgccactaatgaacaactgattgtaggcaagactctgggataatttctaaatctctcatgtggagatggggatggacaagctttggataatttctaatgtcctctccagatataggagttgatagttctttctggacaatgagattactttttaccaagacttacaaattcattcaaagttgtatttggtatgtttttacattacaaaataagacagtgtcttaaagaatccaagatggttagagatgaagttagatttcattagtccagctctctaaatcttcacataaggtgaaatttcaaaaggttataagacagcagactacatgagagattgcaaactgtggcctgtgggctgaaactgatctacgaatgcattttgtccacaaagcgcttttcaaattgtgaattagttctcaacatttaaaactatcaaaatatttcacataaaaaatctggatttctggcttctcttacaagtggaagatatgacaacactgggcctgagtttttatggatttgcaaaaagggatggaaataagactacccaaccatcatttaaataatagaatgttaatcacttttaactaaattggtccaagatacccatccaccatataaatctggatggtaggatataagctgtctggttcttgccaacaccatctccttttacaattgcttaacaagtatcactgatctgaccctggcccctgtaaagcatccaagagaaggacctgaaatttagaactgtgtgttccctgtctttggcaactgcagtacttttcttgttttatagtttttgccaaattggagggccgatgatcaaaattattactttttcatttgtcagtctaggcatgtgatatgatttctgtttttaacagatgaggaaagggggatgaattcagccaatgcattgagtctagcccttgctattgatatattgatggacagtgaaggacagtggttaagggtatacactgtgaaattagaatgcctgggtttgctttcttgctgtacccttatctcgctctgtgatcttagacaattaacctctctgaggctcagtttactcatgaatgaaatgggaattgtagtggtaccttgatcattgggtttttgtgaaaattaattgagataatatagtaaagctgttaaaataatatctggaatgtgtaagtgcaatacaagtgtcagctcttgttattgctaagttgatatgtgcagtgtttttatctgaaaggactgggcaagttaatatatatgaagtactagccatcacaagccttatattcattattgctattatcatcatgaaacagtatggaggagtttggtgaactaaaatgcaagaataccagaaggcaggtagttatcattagagtgttacctataaaccagatgggggtccaggctacaatacatctctgttctttcacttttgttgagacatttcacttgtatttctttgaacaaaaaacagggacccatttgtctggcttcaaaagctcactttgaacaaaagtaacatggatagaattcataggagatattttaaatggctaatgccaagcacatgtacatgggaagatttgccacaagcttatcagaagactcagataaaggggtcttgggtcactcaattggtaaatgatgggatcctcagagttccttattttcttcatagccactatgaggaaaggcactatgctcgttatcattgaataggtcacctgcctttttcaagtcctaatatttttgtcctcaatccaaatagctcttttaaaaatgttggtttacactaatgatactgactatgatattgactattaccatattgattgttaccattaaaaatgaactcataaaatgcttttatgtttgtgtagagagtaaattctaagcatatatatatatgttcaaaactttatatatctagatagagtaagactcgcataagtaggtaatatgcaatagcgtacagagactaagacctctaactctgtggactatcagtccctggttcaaattcctggtcagctctgtgacatgttgactttgtgaccctggggacattatccatgtctttacttcttagtttcctgatctgtaaaatggggaaaaattattaagcattgtaagagaaaaaacatgttagttgcttaaaatctttaatatggggtacatggacaaatattatcagtaacagtaaaaatagtattcttgcattttagttcaccaaactcctccacagtatttcagactacaatatctttgctcatactgtttcttattgcaaaatgtcgtcctcacctttcttcatgcgattcactcttgttcatcctttaattattataactcaagtgttatctcctttaggaaaccttactcaaagctttgtagtgggctaagtattgccataagtccttagtcaatcttttcttttacctcctgtagtttatatttaaattaccctttttacacatgcctatcactcactagactgtaagattcccatctcccaaaacagtacctgacatgtagtaggtgttcagtaagtgttctactgttgagacttcacactgatgctttatttcctagagagcttctaaagagaggaaatagtctaaaatacagtcacctttattacagagacgttgtctctataatttttacttttataaaagcttctcagagtgaaccaattaccaaatggcttcaaaataagttatgttacagaaacatgctatctattacctttgactttgtttgttaataccaaaaagtgacaaatttctagatccattgtagagaaaagccttctttatgaatcccttgcaatgggtgaatcctagttgaacttgaatcaccatagtgtgtgtttaagtgatcaaacattaaaatcagcagaagccaaagaaataagttttcatattgggtgtgcattttttagtgcatttcatttgggttagtgaaaattaggctgtttaatttaccatcagccacaatgttgccaaagttgtatcacagaacctgtaagttctacatattttaggcataaataaatgtgctcattttctctacttttattctcttacaggattttggcattattttctgttattttattgtaagctgcctaaagtcctttctgggtgtagttaaggtataaataaataataactacagagctactgcatattggatatggtaataagaatatgctatgtagaaaacatcaataaaaagtaaaactgcttcttagatatggacttttctgatacatttcactagtcaaagaaaattatttttgctgtgttattccttttattttaacaagtgggaaaaaggtttgaaaataaattgaattatcaagccctcaagtgttcccatctgctgtctgccattctaaaattgagagatatgaaataaattgataatatattgatgtcttttcaacagcccatgggaggaaaatattaattcatcacgtgcttctcagaattacttctgtgcagtaaaaaagttctgggataattagaagttaacttttttttttttttttttttttttaatccttaagtgttccaggagcacatgctaagttacaaaccctaaggaagtggtgatgcttttaaaaagacaatgggattttggcaaacatgccaagtggtccagagaatctactatgcctcttaagaaagcaaagggaaaatactgaaaattcctgcaaataattatgccttctgttgcccatgtagaaaaacagctttttggtgaggatggtaggcatagagttgtttaagcaaatgagttgaagtatatcctgaacatctacattggcgatttttctgacaagtatagcaactgttgtctataaggcagtgtgtcataacatactgtgttcaaaacatttcttgggggttcttccatattcaagttttgtttgttatacatcatcagacaatgttgtttgagccacttctatgtatgagaaactcactagatcctgtagaaaaagtatgtaaagtcattttagatggccttcctgatctctaggaacctagcaatctggttgagaagttgagatacactgacgtagactaagtcaggatagtgtgagtgtctgaattgtaaatattggtgttttctagatttccattcttggctcttgttatgggtttattatgttccccccaaatttatatgtcaaattcctaacccccactgcctcagaatatgactttatttggaagattaagatgaggtcattagggtgggctataatccattatgactgatgtccttataaaatggggaaatctggacccagagatatgcacacacggagaaggccacgtgaaaaggaagacagattggggtgatgcttctacaagcaaggaacaccaaagattgtcagcaaattaccagaaactaggggagaggcatggaacagattcttacgcctcagaaggagcctactctgatgacaccttgatcatcacctagcctctgacaatatctgttgctcaagctacccagttggtgattcttggttattgcagtcctaacaaagacagccctcttcttctgtccataccatctgtctcagcaacttcatccctaatcatgactttagctactaacatctctacacttaaaatttgcaaatcttttgtctccagcataggcctcttgccagactgccagacccatacatttagccatttgcatcagtgctgctaaaggtgtggccacagacaggtgcaggtcagtgaatgctttgtaaagagcttggactagaatgtaaatcaactcattaccttcttctgctaggaaagtcttcctataaaagttgtcagctgtattgagtagtatgcatagtgactaaattgatgtaatttctggtataagcactttatctcagtgagggccaataagaagtagttcacagatgacacaggtctacagagcacacttggaggagcattgacctccatggcatctcctttcaatgtcctcacaccattcaatgatacaatttttcttctcatccagattctttccccttattttctaactctgtgaatggccacccagtggcgctaccatataactgagctggccaaggcacaaatgtgcaactcatcttaaaatcttttattgttcatcctcaccaccaaagaatgcatgtgtttgcaagttgtttgataccattgtttcaaacaatggctgagaattcttctgtagctttctgttgcctgcacaggataaaatcgaaacttacttccatggcgtaagtagatctttgctccccatccatgcttaactacttcagttttcctgcacacacccttcacttcagcccattaagccacttaacatccctgtgctgtccattgctctttgtgagcctcagtgtcattgcactcctgcttgaaaagccctcccttgcctttcattactttcctaggtagaaggtaacactcagttataaagtataggaataaatagttagcattcattggccctttaccctgtgtagtcactgttctatatatttacaagccttatctcatttaatctttataacaaccttataagataggtgctaatcatcccaatcctacagaagaggaaaccaagaggaaaagcagataagaaatttgtcttaggtcacagatatagcacatgggttggggccaaggcagtctgactccagccttcacacttaaccatgtgctatgttaactacattgaggcattcatcacaccttacttcaatgtataactgttctttttctttctcctgactgcagagatcatttagtctccccaggtgtctgacagattgtatgtatatataataggtgttcaataaataggtgatacatgagttcatgattgttggttcataactattcagaatagtaatatatattctctacaatttgtagcctatccactgagattatctcattgcttcattaaaacagccctttgagtatatgtgagacgagttataaattcctgttttgtaacaagtaaaagttaggtccagagaagtcccactggttggaatgggctacagagcaccaacctgggccacttaactgcaactagggcttcctcccattgcactgtcagacttgaatttacagtaagaatggcctgggccattttagactttttaaaaaattgcttcattttatgtaatctttattttattgcagaattgtgaaagtcatagtgattcacgcttttagagggtccaccccacctcataaaacatttaaatgtatgtcacatttcacatctacttggttattgaaaaaactggaatgtatgtttttcaatcttgcttttgaagctatttgtctatataataaatgactatgatttctcaggaatcatggtgcattcagaggaatccctgaaaacttaaaccttggcagggcacagtggctcacacctgtaatcccaggtctttgggaggccgaggtgagtagatcacaagagattgagaccatcctggccaacgtggtgaaaccctgtctctactaaaaatataaaaattagctggacatggtggtgcgtgcctgtaaccccagctactcgggaagttgaggcagaagaatcacttgaacccgggaggcggaggttgcagtgagccgagatagcatcacagcaccccagactggcgacagagcaagactctgtctaaaaaaaaaaaaaaaaaaaccactgttttcaatgctatcaatatttttatgaggactaaatttaacaattaatggagtcaatatgtgtttggaagtcacttaattgaatatttagatttttcatgtttattcctacattttgaagactatatttaggatcttggatttttttttttagcgccttggagagttccaaggctccagtccctatgtctctcctgcctaatgaatgaaatagcctttggccaggctgggtggaagaagtggtatttgaactaagcctcaagctgactgagatcaagtgatagcagtgtgatacattttgagaggagggaaggatactttcaactctctttagagatgagataatgcaaagcaagtttgaggacatatgaacagacaaatataattgtataagattccagtattggatagaaaataagaacaaaggttggttcatgatggtagatgcccttcaccaaggtaaggggattaaggagtgggagacttcacactgtaggcaatggagaactgctgaagaattctgagcaggacaacgacatgaccattgtagcattttaagaagattaagtgaaatgtgtggaagctatggggaaaggagagaaaagaagaatataaatgtcttcacactgtgagaaaaggtcatgaattaggcttgaatgttttatccagcacagatcagttttataattttgtggggagatttgtacaaaaatcttagaaaatcaatgcctatatgtagaagtatcttgaatcaatagttcaaaggcatttccctacagcaattgttgatctttgtcttcattttattagagtaactttatgtacttgtcacaatgtgtgggctatgaatgttcatttttttttacaaattctaaaaatgtaaagcaaggtgcctgccctttaagttatatttaatttcagtgaccgatattctgatatgcccctgcaggtgcaaaaactcttctgcataacattgtgaaccacataatgacacttggacaaagctcatatggttgaacctagcataatttcagaaaatgtacatgtgattccatctggcttccagctgacctaaaggatgcagatggagtttaatttagccccaagaaagcataaaccccacaataaacccaggtttatgtcaagcccatagaaggagagaggaggaggcatgacttctggtgttggtttggaatctggggagaaaactttcagtgtgcccaagcacactaaaatagaatcttggatttgtcctttctccaacatgatttcatcccccaaaccaacctaaatttgcataggcacccagagaataaggaacgttcaagctccctgccctttctcactcctccccaagtggaaagagtcttatcttagtggtaagattacagaaaagttattgtatggaccacatgtagtggttagagttatttgcataaataggaagcataagattcctgatcctctgtctcttcttgcacattctttggtaccatcttttctatcttttatgtgttaatagaggtggtaagatttggatctgggcataggagtagagaaaggctccagcccagtctttgaaagttttaatatagtgattttacagctggcccttgaccaacgtgggtttgaactgtgcaagtccaaggattgaaaatataatattagcaggatgtgaaacccacacatagggagggctgacttcctatgcaggttccacagggccaacggtgagacttgagcatatgcagatttggagattttagtgtatgccagaacgggatggtcctagaaccaatctcctgcagatactgagggatgatggtattttccatttgtcatcatcatctgtcattatagctctcttaagagaataggagattttggtttacggtaagattcagatattcctgggtcaccaggtcattacatcatctgaaaggcttcagaacactacactgtttaccaaaggcttacagcctgcttcctggaggaggctgcatttgcagctgaggaacaaataggatttgaacctgggtaggaaggaaaacagatatgctagggacagcatgagcaaagacagaagccaagcaaaactacagtaaaaagcatataaaagccacatgatcggaaaggtagcttaggatcaggtagcggtaaacactgaatgttactagactgtcagttgtcctttatttggtaggcagtggggagcctttgaaaatgatctgtacctctgagtagctccagtggaaataacactaaaccaaggcagagggcccatcaaagataatgtagacttctgggtgattggcaaatagagagtgattggccttgaccttgtcttgaagtgatgtgttttcctataaggcactttgaggctttattttctgaagaatattgtcaacacaaaccaatatctcatttgcaaaggacatgatttgctccagcatttttccatggccagattagaaacaactccctatgagttttgacaaaagccccacataatttgtcagccttcctgtttgcctggcagtggagaaaagaaaaggatttctttctactgtcttctttccacaggcagcctatgtactgctgttattatgattcagcagtatagaccttcaaagtaaacagacactggttaagatgtgcacttgtttcaattaatcagaagcacgtctccccccgaagcagcagttctagacaattgtagatttgccatttagtccaaagagcttttcagttttctttctatgtggagagcccaaagctatctttcagtcaatattcaattagtatttgagtcggaaggccatgctgagctcttaaagaggggcgtaatgtgtcacttgttcccgcctccatttgcttgtgtgtggaaaacaatccattacttatcactaaagaaatacaagtctgctgcagcataagttaaatattagaccaaattaataatatgtgtttacttccttatgacctggcaataaataaattatagtgtaagaatcactggaaaggacaaaccaaattcaacattatatatattgtatatgcccaaatttagggagatttgtgatgcagaacatttaccctttccctaatcgcagcaagaactctgtgcatttctgtcttgtgtactcatccaaatgcttttatataaagctttctctaattactatcctttggcatagtcttttgtttccagcacaatctactactcaatactatctttgtcattgagctatggtttcagaacaataaaaattcactcctaagtttttttaaaaatccaaacattttctataaatatgatagcaacaaaggtatctagaatacagtaatttttttatttgcaaattaacctgcctatcataaagcagatttttaaggaaaatagtgatatgagacatttacgttggatgagaatttacacttgtttcataaccttgaactcaagcaacacatatcattaaagtaatgtggataaactacaaatttacgcagtgtgtttaatcagcatgaacagccaattgaagttcaaatgaagcttttgattgtacattttaaatataatatctacatatcccatttttagtagacacaattggttacctaattgttattcattccccaattccaaacagacttgtaattttttcaggtatgaaaaattataccccattcccagctttagaagtagatacagctgagttcagacccatcaacacacagcactatactggaatacagctggctcacaggtgcccaggtgatccaagttgatccaatcagaccaaagtggaggacttgtattccatgcttaggggagaagttttggggctcctctcctgatggactatggaaggaagcatgtatcataattggtactggcagccatcttagaaccatgaggagactcaatttaggctgaagccaaggctgaatatagtgaagttgctgaactatggaaataatttgagttcctgatgacaataatgggccacatacaccattaagccagatctggagcccacctttcatctggacttccaataaaatagtaaattttcttgttgtgtaagtcaatttgagctgtagtttttcttatttacagtaaaaatttgttgacctcctgctgtatttctctttagaacaggaattctgggatttattaatcttaactctttattttgaatatgtttagacaaaagtggaaatcatatttgtaggaagcagcttcttatttcttcctaactccctagatataatttagttaaaaccaaaaagcaaaaacttcattgtagatgtaaatcatgttttagcataaagtaacttttattataactgaagagataagcaaaatgaattcattaaaatattaaattttacagtttctataaacaaaaataaacatttttatagaaaagtatatggaaatacataaaataaaaattttaaaaagtcacctaattttaccacccaaagacatccattatgcacataatatatatttatacatctgcatggatatatagaggttaatattatatatgcttttatataaaagtaatatttctacatatattgctttgcaacctacttttttgcacaacattatatataggaaatgtttccatgtcagtaaatatgaaaaaccatgtcattcttctaaatgactttgtagcaatccattttatggatgtaacattatttaactggttgtattgatttctctttctttttttactactctatacattctgcagtaagcatctttgtgtacttacctttctacacttcttcaaatatatgtgtctttaatattaagaatatataaatttaaaatgctgttaccaatttccaaagcatctgtagaaatttacactcccactagtggagcatgagtgagtctcatttcccatgttaaaactagacattattttctgctttgccaactcgatgcgttatttttaaaattctgtatttgcatttcttttttacatatttattgtctctttatattctttgtttcacaaattctgttaccttccatccattgttatgcttatttgtttttaagagctatttctattttagtggtattaacattgtcatatttgtgaaatttaagttttgtcatttgtgatggaccgtttttatgtttgttatgttgttcgacatatttatgtctagctgaacagaatttttgaatgcagtaaaatctatctacttttcctctttataattcctgggtttcatgcaatgaaagaccttctctatccaaagattataaaactgctcatacctatcttcttctactacttatagtgttttttttttttacctttatattttttactcatttgaaatttgtattggtgtaatgaatgacgtatgaatgacctttcagttgactagccagttcaatatcatagattaaatctatttgctctctagttgtgttaaatgcataatgcaaatgtcaaatgcactaaatttttattgtattaatattattaatatttgaatttatttttgagctcctggtagaaagccattgatctaattttctcttcctgtaccataactatggtgattcaatcattgtaggtttatgacagtttggctacattgataaagttccttttattatacttttcagaatatccatgactcttcttgcatttttttattctttggaaaaataatttttaatgattttatcagttttaaaataaaagattgcttggattttcacctaaattccatggtctctgtagattaacataaagaaagctgatatctttatgacattgaaaccccatccaggaactaggaatatctctgcattgattcaaaaggttttgatgtgcctcaatttatttttgtagttttcaacatacatggcctatacatttattgttaaatttattcctaagtaaattgtaacatttactagttgatcttccttcactgacttcttgcattaaccaaagctctctattccctctgcaaaacatgggagctcagggctaatggactactctctaatacacctgagcacttctgtccctatcagctgaggtatatgctcaccaagaataattatactttccaagtgtgttccagctagtttctgtttctgttgttactgaaattccataattaaatattatataacttaatgacatattattgtgaaaacaaagaatagtctttgtttatattaaataagttgattactttgggaagattcaattctgtctaaaaatatattaaattgcagttgggcaaaactacaataaaatttttagggaaaaagtataaaaatctaaaggagttttttatcatattgccccttaagcaccttaatttttttctcttcttttaagaaacaaaaactggaaatcatagccagatatgctgtgtgttaaggaggatatgaaacttcaatcagcgaacccatgcataaaggcaaagttgaaatcctatacccccaaaatcggcaaataattataaattataagcaaaactagacatttgacaacttacgttttgtgacttgctacttcagctaaatatttttaagttaaccataattttaaaaaatatttattgcttggcattctaaatagttttaagctactcttggtgcttcctgataatcatttatggtaaatgaaattaataactttgcttggtttctaatatgtttttaccttttcttctaattcctttggctaatatttacttgtctattactactaatcatggcatgataacatagtacgtaaactttaaaaaatttaaaatcaggataattttattatggggtgttttaaaaaataatcagaacttacatttagtgaaaatcaaggatgtcttaagagagaggaatccaacttccatgctgagatatatattttgttttgaatagagctcattctaaataatccattttaggccaagcacagtgcctcatgcctgtaatcccagcactttgggaggccgaagtgggcagattgcctgaggtcaggagttccagatcagcctgggcaacatggtgaaatggtgaaaccccatctctactaaaagacaaaaaaaaaaaaaaaaaattagccgggcatgatggcacgtgcctgtagtcccagctactggggaggctgaggcatgggaattgcttgaacccaggaggtggaggttgtagtgagccaagatcatgccactgtactccagcctgggtgacagtgagactctgtttccaaaaataaataacacatctcagactaaaatattttgtattgaatacatatttccatgtttgagtctttgaaataaaaatatatgaaatataaaggacagtcaactttttaaaaaagtttagaaaactagcactccatctctattttaattttactctttgcctttttaaataaagaatttatcaagtacaaacaggaaatatttttcaggctcaatgtagatgttttacattgggaagaagatcagaaaaatagaacttcttgttacttacgactacacaatcccagccaaccagaagataacatgcaatcttttgcaacctagatttttctccacccagtgatagttctcacccacatcacataggaaagcaactataaagcccttaagataggcattagtactttcctcattgtaatatggagatattccttgacagcagagaatacccaatcctatagtcatttcccaacattgttttgtctttaataggagtgtctttcttcagagaagtgatttgaagcttaaaattacactctttatatttgaaacgatagagcaaaattgactgcaccaaaaaagatgaatgttcctgccaccagatacattgattgcttgccatgaccttcacaaagcaaaactacgaaaggaatgcatagagagaaagttacttttttaacggggaggttcataattttagtctatcaattccaaccacacaaattctctcttaatttatataacttagcaagtgttaagcttgtgagttggagttgatggcaagcaaataactttaaaaaccttctgaggtgacatttctgcattttagttcattccaaatatatattttttaatggccttgaaaatgctcagatgtagggaatggagcggcagtaggttcagcatgaaatgacaccaacatgagagaattcaatctttctttttacttactttgtcatgtattatttatttatttatttattttaatgtgacaggcttactgtctgtcgcccaggctggagtgctgtggaaagatcacaggtcactggagcctcaacctcccaggctgaagcgatcctcccacctcagccccccaagtaactgggaatacaggcacgcaccaccacacctggctaagtactttttgtagagacagggttttgccatgttgcccaggctggtctcaaactcctgggttcaagtgatctgcctgcctcaggctcccaaagggctgggattataggcgtgagccactgggcctggctgtcatgtatgttttagatgctttcttttcttttcttttcttttttttttttttttagtggagttttgctctggttgctcaggctggagtgcaatgacacgatgcgggctcactgcaacctccgcctcaaaggttcaagtgattcccctgcctcagcctcccgagtagctgggattacaggcacctgccaccatgcccacctaattctttgtatttttagtagagaggggtttcaccatgttggccaggcttgtcttgaactcttgacctcaggtgacccatccacctcagcctcccaaagtgctgggattacaggtgtgagccaccacacctggccctagatggtttctcacaagaatatcactatattcttgaccataggccataaagactgaaaacaatgtgattaaatatgatagaactcattctgacttgacctggtagaattatattttattttctggaagttctttctttttcttttcttctgcttccagaaagacatgataaaagtggtattgatcacagtgacatttcctgtttgtcctactgttcacttaggaattcagctcattttctttgtgcaatattaatatgtcaagtgcaagataaagcatttgagccactgcttagatgggctttctaggggctgtagctcatttacatctcactggagaattgggaaacagtgccagaaaatgttattagtcaagtatcttttaaacattttttaaaataaaggagtaattgaatattggaaataacagtaacatatctctgatctgagttattttatgtttctagttattcattcaatgctacatagacatgtaaatagataactcagatatgaagtgttgagggaaaaatgtcagaagaaaaaagcaaacaaggatggttcatggcctgtaaaactcctggagggaggtggcttttgaactgaggcctgataatgttcctggaattttcagaagtggaaattatggatcatcttcaacaaagtcatgaaggtagagacaggtgtcaggaaattcagagtaaactggggaccacctgggccagcttttttttttttctttttttgataagtctctctggtgtgggtaaggagaaaagattttaaaaggggaccaagtaaaggaggaactgttaacagtctcatgatggggccattatgaattgaacttgacaccgggcaaaggaaaatgaaagaagagacggatgcaaaagtaatctcaaagaaaatgctgatgggggaggagccaagatggccgaataggaacagctccggtctacagctcccagtgtgagcgacacagaagacgggtgatttctgcatttccatctgaggaacgcagttcctcaccagcaacggaacaaagctggatggagaatgattttgacgagctgagagaagaaggcttcagacgatcaaattactctgagctacgggaggacattcaaatcaaaggcaaagaagttgaaaactttgaaaaaaatttagaagaatgtataactagaataaccaatacagagaagtgcttaaaggagctgatggagctgaaaaccaaggctcgagaactacgtgaagaatgcagaagcctcaggagccgatgcgatcaactggaagaaagggtatcagcaatggaagatgaaatgaatgaaatgaagcgagaagggaagtttagagaaaaaagaataaaaagaaatgagcaaagcctccaagaaatatggaactatgtgaaaagaccaaatctacgtctgatttgtgtacctgaaagtgatgcggagaatggaaccaagttggaaaacactctgcaggatgttatccaggagaacttccccaatctagcaaggcaggccaacgttcagattcaggaaatacagagaatgccacaaagatactcctcgagaagaacaactccaagacacataattgtcagattcaccaaagttgaaatgaaggaaaaaatgttaagggcagccagagagaaaggtcgggttaccctcaaagggaagcccatcagactaacagcggatctctcggcagaaaccctacaagccagaagagagtgggggccaatattcaacattcttaaagaaaagaattttcaacccagaatttcatatccagccaaactaagcttcataagtgaaggagaaataaaatactttacagacaagcaaaggctgagagattttgtcaccacaaggcctgccctaaaagagctcctgaaggaagcgctaaacatggaaaggaacaaccagtaccagccgctgcaaaatcatgccaaaatgtaacgaccatcgagactaggaagaaactgcatcaactaacgagcaaaatcaccagctaacatcataatgacaggatcaaattcacacataacaatattaactttaaatgtaaatggactaaattctccaattaaaagacacagactggcaagttggataaagagtcaagacccatcaatgtgctgtattcaggaaacccatctcacgtgcagagacacacataggctcaaaataaaaggatggaggaagatctaccaagcaaatggaaaacaaaaaaaggcaggggttgcaatcctagtctctgataaaacagactttaaaccaacaaagatcaaaagagacaaagaaggccattacataatggtaaagggatcaattcaacaagaggagctaactatcctaaatatatatgcacccaatacaggagcacccagattcataaagcaagtcctgagtgacctccaaagagacttagactcccacacattaataatgggagactgtaacaccccactgtcaacattagacagatcaacgagacagaaagtcaacaaggatacccaggaattgaactcagctctgcaccaagaggacctaatagacatctacagaactctccaccccaaatcaacagaatatacatttttttcagcaccacaccacacctattccaaaattgaccacatagttggaagttaaactctcctcagcaaatgtaaaagaacagaaattataacaaactatctctcagaccacagtgcaatcaaactagaactcaggattaagaatctcactcaaagccgctcaactacatagaaactgaacaacctgctcctgaatgactactgggtacataacgaaatgaaggcagaaataaagatgttctttgaaaccaacgagaacaaagacacaacataccagaatctctgggacgcattcaaagcagtgtgtagagggaaatttatagcactaaatgcccacaagagaaagcaggaaagatccaaaattgacaccctaacatcacaattaaaagaactagaaaagcaagagcaaacacattcaaaagctagcagaaggcaagaaataactaaaatcagagcagaactgaaggaaatagagacacaaaaaacccttcaaaaaatgaatgaatccaggagctggttttttgaaaggatcaacaaaattgatagaccgctagcaagactaataaaaaaagagagaagaatcaaatagacacgataaaaaatgataaaggggataccaccaccgatcccacagaaatacaaactaccatcagagaatactacaaacacctctacacaaataaactagaaaatctagaagaaatggatacattcctcgacacatacactctcccaagactaaaccaggaagaagttgaatctctgaatagaccaataacaggagctgaaattgtggcaataatcaatagtttaccaaccaaaaagagtccaggaccagatggattcacagccgaattctaccagaggtacaaggaggaactggtaccattccttctgaaactattccaatcaatagaaaaagagggaatcctccctaactcattttatgaggccagcatcattctgataccaaagccgggcagagacacagccaaaaaagagaattgtagaccaatatccttgatgaacattgatgcaaaaatcctcaataaaatactggcaaaccgaatccagcagcacatcaaaaagcttatccaccatgatcaagtggccttcatccctgggatgcaaggctggttcaatatacgcaaatcaataaatgtaatccagcatataaacacagccaaagacaaaaaccacatgattatctcaatagatgcagaaaaagcctttgataaaattcaacaacccttcatgctaaaaactctcaataaattaggtattgatgggacgtatttcaaaataataagagctatctatgacaaacccacagccaatatcatactgaatgggcaaaaactggaagcattccctttgaaaactggcacaagacagggatgccctctctcaccactcctattcaacatagtgttggaagttctggccagggcaatcaggcaggagaaggaaataaagggcattcaattaggaaaagaggaagtcaaattgtctctgtttgcagacgacatgattgtttatctagaaaaccccattgtctcagcccaaaatctccttaagctgataagcaacttcagcaaagtctcaggatacaaaatcaatgtacagaaatcacaagcattcttatacaccaacaacagacaaacagccaaatcatgagtgaactcccattcacaattgcttcaaagagaataaaatacctaggaatccaacttacaagggatgtgaaggacctcttcaaggagaactacaaaccactgctcaaggaaataaaagaggatacaaagaaatggaagaacattccatgctcatgggtaggaagaatcaatatcgtgaaaatggccatactgcccaaggtaatttacagattcaatgccatccccatcaagctaccaatgactttcttcacagaattggaaaaaactactttaaagttcatatggaaccaaaaaagagcccgcattgccaagtcaatcctaagccaaaagaacaaagctggaggcatcacactacctgacttcaaactatactacaaggctacagtaaccaaaacagcatggtactggtaccaaaacagagatatagatcaatggaacagaacagagccctcagaaataacgctgcatacctacaactatctgatctttgacaaacctgagaaaaacaagcaatggggaaaggattccctatttaataaatggtgcttggaaaactggctagccatatgtagaaagctgaaactggatcccttccttacaccttatacaaaaatcaattcaagatggattaaagatttaaacgttagacctaaaaccataaaaaccctagaagaaaacctaggcattaccattcaggacataggcgtgggcaaggacttcatgtccaaaacaccaaaagcaatggcaacaaaagccaaaattgacaaatgggatctaattaaactaaagagcttctgcacagcaaaagaaactaccatcagagtgaacaggcaacctacaacatgggagaaaattttcgcaacttactcatctgacaaagggctaatatccagaatctacaatgaactcaaacaaatttacaagaaaaaaacgaacaaccccatcaaaaagtgggcgaaggacatgaacagacacttctctaaagaagacatttatgcagccaaaaaacacatgaaaaaatgctcatcatcactggccatcagagaaatgcaaatcaaaaccactatgagatatcatctcacaccagttagaatggcgatcattaaaaagtcaggaaacaacaggtgctggagaggatgtggagaaataggaacacttttacactgttggtgggactgtaaactagttcaaccattgtggaagtcagtgtggcgattcctcagggatctagaactagaaataccatttgacccagccatcccattactgggtatatacccaaaggactataaatcatgctgctataaagacacatgcacacgtatgtttattgcggcattattcacaatagcaaagacttggaaccaacccaaatgtccaacaatgatagactggattaagaaaatgtggcacatatacaccatggaatactatgcagccataaaaaatgatgagttcatgtcctttgtagggacatggatgaaattggaaaccatcattctcagtaaactatcgcaagaacaaaaaaccaaacaccgcatattctcactcataggtgggaattgaacaatgagatcacatggacacaggaaggggaatatcacactctggggactgtggtggggtggggggaggggggagggatagcattgggagatatacctaatgctagatgacgagttagtgggtgcagcgcaccagcatggcacatgtatacatatgtaactaacctgcacaatgtgcacatgtaccctaaaacttaaagtataaaaaaaaaaaagttaaaaaaaaaaaaaaaaagaaaatgctgctgggatttggtaactggaggtggcgggtaagaacattttggcatgtcaaaaagcaaagtttattctctcaggttgataagaaaaaagtcaaaaaattaacaaagtcatcaaaactactaacgtcctgtcaaaaggacttaggaggctactagaaaaggctctcactgcccaaagaaggcacagacagtttgagcattagtcaggataatgactaaagtggtttaaaacacatcaaatatattcaaattcaaatgtttttaatactaactaaaagacccacctccagccgggcgagtggctcatgcctgtaatcccagcactttgggaggccgaggcaggtggatcacttgaggtcaggagtttgagaatagcctgaccaacatggcgaaaccctgtctctactaaaaatacaaaaatttttagtagaggcgtggtggcagtcacctgtaataccagctactctggaggctgaatcaaaagaattgctcgaactctggaggtggaagttgtaatgaaccaagatcgtgccactgcactcctaggtgacacagcaagactccgtctcaaaaaacaaaaagcaaaacaaaaaaataccaaaaaacaaacaaaaaaagacccaatctttggtcacttttggagaatgacagaaaaccaacatattttgcaaattgattaatcacgggaaagaatcaagcgtttatcatgtatttcctcatgactgtacttcagaccaaccagataaggagaagtttcttcttgtaagagcacttcaagtaacacatgaagaaggaatgatagaattggaatattaccatttgcaagccctaaagaacgaataggtctaggcaacgattataatcagtgacatcataaaaagagaaataactaaacattatacatttatacattacacatggaagcacaacacgttgcttatggagtagtcttcccagaaaattgaacctgaatctgatcacttactgtattagtccgttctcacactgctataaataactacctgagactgggtaatttatttttaaaagaggctgaagtgactcacagttccacgggttgtacaggaggcaaggctggggaggctgcaggaaacttacaatcatggtagaagggagaatgggaagcaaaaatgtcttcacatggtggcaggagagagagagagagagagagagagagagcaaagggggaaatgatatacactttcaaacggccagatcttgtgagaactcactatcatgagaacaggaagggggaaatctacccccctaaaccaatcacctcccactaggtccctccttcaacattagggattacaattcaacatcagatttaggtggggacacagagtgaaaccatatcactcatctagatataactatcaaagcacaggaaatacagggagagaagcatgccacatgtcaaatggggaagaaatcaataaaatcttggctatcggaaattgttcaaaataaaataccaggtttcttcaacaataacaatatcacaggaagagatagatgatagtgggaggtgggaggggaacagaaagataaattgatagattaaaagaaatttaagggacatatcaacaaatcacatgccaaaaccttcagggcaacagagaataaatggaatttggaatttaatccaaatcctccaaatcccctctataattatgataaaggctctttcttcacaactgcactttaggccaatatattgaatacttgctgtgggcctcataactttatttatataatcttatttcatcttcaaaatgacctaatgagagatgtattatcccctttttagaggtagtggaactgagacacagagttaaagtaacttgttcaaatcacacatctggtaagtggtagattctatgtgaagggctccatttttggctgttcaacaccttaacacttctatctggggaaaatcgtgatgatgtgagccttgggatatgcagctcggtcttccaatacagaagctcaagaagccaagttcttgttctctcagactctgacagagcctgaaaatctgacctaaaattggccaacctgacagatatgtccttctgagatgaaaagtgtggaatagttgaaacaaaggagcaggaaccacttagaacttattctacccacagtgatagcatcctgtgtccagtggagctaaaggtagagctaaaagtaccaccctgtgatgacgagtttccgtgacagtttctagttataatatggctcttagcagcctagctttggttcctggctgctttccaaacctttctgccttcttgaagaccctgtggtctagccaatattttttcaacaagctccttttcctgtttaattaaccagaattagtttctcttgtttggaaccaagaaccctaattagcttagccagagtttgaccacaactttctctgaaaatgggcctgtcactttgtctcaccattaaaaaagtagtgactgctttctctagtttacacattatactaagaatcgattttcccaatcgcattagtgtgttgaataacctactgcactgagatctttaagtctctagttttggtcttcaaatagttcacaggtcatgataactatagaccccgatacctacgcttaaatttgcattcaagcttagattatttgtttttcctcaccaagcttggatgttgtgtgtccttggctttcacaggcattcatgagggttggggagtggtggtttgctcctcagtaaagtgtaaaaggaaaggaagaaagaacagcagaatgtacatgtgagttgatcatgaaaaaatgtgaactaagccatgggaacaggcaattatgtcaaaaagtaggtgtgtcaacctcagattttcctttggttgtttattccagcctgaattcttgttctcaaccagatggttttactgtttcccatttccccttcccttagagtttagtcaagtctaagatttctgctgtttgtcagctcgatgttgtaaactaaatgaactagtttgtgctgatgggagatgttgatgccggtaaacttcaccagaagagctcttaccttacaactgtgatttgtctctgctttttcccccatcctttcctagacattggtggtagaggctcaacaaaagaccatttttaaacagcataacaataataatcactcctctagagaaaagcctatctttagttctggattatgcaatttggattaaggtttcaaattttatatacttgccaagggactagattttggggtaaggatacctacagagccttagggtaatgtctcactttaaagtattgatctttttacatttttaagccctggtagtcttttaattgctttctaatgattcattttcctcttctttttactgatttttttttttaagctggcaaaacttcagtcctactcttgtagttggatattgcattgggactaggttctggtcaatgggataaagcagaagtatctgagtgacttccaggaaatgtcatttaaggaagtggcctctgcctccttcctccttctagctggctagaaagcaggactgactggctggagcttcagtggctgtcttgtactataaggcaggagttttgttttgaaaatggagcaacataatggaagtaacttggcacccagatgaggttgagtccaacgttatgctgctttcctccagctttagttttcatgtgtacacacatagacacacacacacacacacacacacaccccaactgccatcttgtatatatcactattatttgggggtattttgtaattcagttatatttctattacaaaaacacacaagataattgtctttaacatagaaatctcagatatttctgtttcatagcctcgaatcttcaatatttagtaacttcactaataatgcagaaatacttgtggctttagttataaacaaagaataagaaaatatcattaaatcttgtttctgtttaatattattaaccttcactgaaatgtttgaatatttgcctacagtatttggaagattatttcattttgactttaaactgcatcatttctgtcatagggaagatcattcttcataaaatcacctgttaatgttttcacaggtcaggaaaaaaattggaagttaattatccagtgaaacatacatgaaaaaaaattataccagagcttgatagtgccactaaatttgataatgaatcatcatttttattttaaacacatttgttatgtgctttacaaaataccatgctttccagagactagaaagaaaatgaactctcaattatgttcagggttaggtctgtgaaccttcagggaaaaccttggttacgcagtacagatatgtttgcataagtaccattaatcatatatatcatgaaaatgattataaaacttttatcataatttgaagcatcattcagcatgtctagagagtgagataggggcagtgcattctaatcagagggcatgggtcataaagcccggattctggctctctatcaccttgtatttgactttaggaaagacaataaaacttcctctctgcctcaattcttctctctgcaaatttctgccttcatggaatttttaagggattcagctaaatgagatgatcaaggcaatgtgcctattatagtgcaaggcacatcactgacatgcaataaaaacactttgattatcgttattgttaatatggtgattaaatggataattgaggcaatcatgaagaaaattaaacacatagtcttgctgtgaaattgaaaacaagattatcttgattggctgcatattggacagattactgaagaaaatcctcactccataatggttaggggtacagattctggaacttgacaacctgaattccaatcctatccctaccatttatcatctatgtgactttggatgagttacttaacttccctttacctcagtttcctcatctgaaaaacagggatgatagcgcctacctcactgggttcttctgaaaattagatgagataatatacgtaaagcgttggcactggtaactgttgttagagttcttgttcttgccaaatggatacatgagcactctaccctcttgacccataatgaatgaggtccatgtagatttgtcttctgtataaaacttcccaaatatcttggtttatttcaaatagaattatttgctgcttagatgtggtttcaataatttttaatgtttagttttagtttgaggatgtatgtggctaaatctacattcgtgtctaagatccacaaatagaactgtcatggaaacattttcagtatgtgaacaatagctttcacttgaagaaaatcttctttttaaccctcattttttagcgagagagaaccataagccagagggaaataatatattgacaaatttggcaaacagaattgtagttggcagacatagttccaaggtgccttcttagggaggtaccagtattacaaggggatgtcatgtggccataggattttccatcttattccctcttgatatgaaatacatatttttgagacaggttctcactttgtcacccaggctgaagtgcagtggtgccatcagggctcgctgcagcctcgacctcttcctgcctcaccctcctgagcggctgggactacaggcacatgccaccacgcccagctaatttttgtatttttttgtagagacaaggttttgccatgttgcctagactggtcttgaactcctggcctcaaatgatccacccaccttagcctcccaaagtgctgggattacaggcatgagccatcatgcccagctttaatatgaaatactttgtattttgcagactcaagtgccaaaataagtacctgatagtaaagaatttttccctctctaaggggaaaatacccatgcactgtgtgaatgtgcacatgtcctctgcacatatcactgtgaggaatatacagtgagaatctgacctagtggacttctgttgtttgttttagactaaagagttttcttctcttacttactagtcagtaatttttctctcaacatttctagctctggttggtgtctaacaatggatttagatgagactcagaggacatatttgccaatgatgaggactgttaaagaataaaacgtgttacagggagaaatttaggaatctctgcctggaaatggggaatggagtaaatgaggtcccatttgctctaacaaaaatggacttttagatgaatgaatacaagaactgtctgatttttggaggcaccaagattattagtacgacaagacaggattccaactaactgtttctattgtgatttcctaatcggtatatcacaagagattagcagtaattcaaaaaattagatatgcaaacaagaatctgtatcatttgggacccaaatggatttctccaaataatttgaataattgtcagtgcttaattatgatttttgattatttcctatgacacagttctgctgctccaggatatcaatggtttatattaaagtctgaaaacattttataaaaagtattactgcctcagctttattatagcaaccaactccagggactcaggcttttgactaaattgtttatttcccatctgtacatatgaaagtttgcacaattttaagcccaaacacacacacttttttatatatacatatataaaaaagtatacacatacaaaaatatacacaacattttgtcttctggaaaagagtcctcaaaaatagacatatgtcagttcaaaaaactaagttttcatttatatgattgaaagtatcatggtgatctggttcttgtgttaaaccatgtatttcagagctataactgtcttctcattattaaacattgtgtaaatcattgttgtaaactgtctcatctctttgaatttaatgccgtttaatagtatgatgtcggatttgtatatctttcccagaaagaatgtgatgtttcatagacaatttcattttatatccatgcatacttatgaattagaattggaaagtgattattatccccattgaagtagatggaaaatttaagggtgagagaggttaaataagaacttgcgaggcccatactgtaagctaatggcaataataatgaagataattagcttttttgtagtttatgaagcagtccatgaacatgatcaaatttaatctttgttagagacatattctggattcattcaatatgtcttactcagtttaattcaactcagtatgtccccgactgagctcatcattccctgcccatcccctaaacacacacttcagctctccctcccagatggtgaaatcaccatgcatctggtcatccaagctagagatctcagcaattctatttgaatgtgtctccctctcatctcatgtttaatcaatcaccaagtcattccatgtttatctcttaactgtttgatgcatctgccttccttcttggaatgaaccctgagccatgaatccagttgatgctttggccctggttcttgccgttttccatcctctatttgtcgacttcacagatctcactcaattagtttccttccctcccatcctggccttcgccaacccattcttcacactctctgccagagtcattcctctacgtaaaccctacaggtgagtcttagctcctcaccaaggcattcaggcccttcgtggtctagcctcaccctactgctcacttctcaccactcctgatcccatattctgaactccagtgacagggatccactatggcccttcacacttacaggggtgtttcacgtctcttgacctttgcatatactttctgcttgaaagtccctgaccatggagttcaagaccagcctggccaaatggtgaaaccccgtttctactaaaaatacaaaaaatagccaggcgtggtggcttgcatctgtagtcccagctactctcctgaggcaggataatcgcttaaacccgggaggcagaggttgcagtgagctaagatggtgccactgcactccaacctgggtgaccgagcaagactctgtctcaaaaaaacaacaacaaaatagtccctgaccatttcctcccctagaaatacaacttaaagcaaagcttttctggacaaatgttgaaggtcatcatccccacaactgaataagcatcttcatgtgtatccccataatcctctgaataaatctgtcattggacttaccagttaattataattatctgtgtttattttacacttatctgcctgacccaggccatgagttccttcagggaaagaacattctcttattcacctttatctttagaaggactgcccagagcctggagcaaagcagtgttcaaatgtatttgagctgggaggcatttcattttatatattggacatctgatgctcagattcctcaaatgatttgctcattaattttagggcaagatttgtccagcatccagtaatctgggacctaagcaattccttctatattcaagattataatgattattaataaacactgactatatctcaggtacttttctaagtgccttagaaatattaactcatttatcattacagtcgtatggaatacgttttactattttttccagagaggttacaaactaacaattacacagttagaaattagcaaagtcaggatttgaatttggaatctgtgttcttaacccttttgaaaatctagagaagtagagtttctgccccaaaaccacacatacccacatactgtttcacacagttttagggatttcacagattccctaaaaactgtgtaagaatcctttgagaactccagctaaatgacctcaacgctagattttcctacctctgtcttagagttctttgaccttgagaatatcatatggcttatactcattccctcctgcctcctgactttgactgctaaagttaccttctataaatcaagtgttgtctctccataacactttcaattgtgtagcccacctgtcaaatcaggagacatgcatttctgacctatctccaagcctcatcatgtcattacccattcattagtgaggtcagtaatatatgcgccgaatgaaatcagcccctgggctgatcttgggggtgccccacaagtagccacatcttttccagtgtggacacatgtagagatctcagaattcactcctgatggcatacttgaagagcgtatggatggatttcttgcctgtatcagagaatgacatttgttttcctaaaagctaacccattcatgtaaagccagttccctctgtcagcatgtgcattttgagggctgtttcactaatgcttaattaatccatctttaatcacattagagaaggaaattctatatttgttgagggctcattgtgtggcagtacttggacttgcatgcattatgtcttatagttacaattttccttcatttttacagaagaagaaacaatcagaatgggtaaatcttttaccccaagtcaactcagctagtaagtgatgcaacagagatttaaatctgtattgacttacagttcatactctttgctctatgataggatgtgctgtgaccttctaatgttgatatctattgcttggcaatatcttcatatactggcacagggtcaccagataattcattgtgaaacatgacatagggcagcactgtatcaaaacgaaacagctgtagaaagaggggagggaggaacactgagtgccccagccatgaatcaggggccattcaccattgcttctggaagaggtgcccagtccacggctatgctttctccatctttcttttttggactgactttcgtagggctattaagtgccctggcacattgctgatgctgtagttctctcaacttaacccgtcctgtgaggtcagtgggagcaaagggtgttctccatgcgggttggggaactgagcagtgtaagatgaaagagccctaactttgcagtcagataggagctttcatcacagctcagtcacatacaagctgtgcgattttggggaagttacttgacttcactgagcttcagtttccttatgtaagatgggaatacaaacatcaccttaacaaaagttagtgtaaggattaagtgtatgttaattccttggcacatagaatgtgatagaagttatcaatattaacatatttattaacgtattattactattattacctgcaagaggagctttaatgtctttcagttactaagaaaaggtgtaaagcctctcccttcattgggaagagttacctacaaaaatattgaataaattcaggctgagcaagcaaggcatctatattggtagaaagatgggctgagggagctatattccagaaaacttaattactatagacatcctggcagagaggaatgtgttcctgattctttcttttatcaaaagaagattccagtcacttttctgatgacaacggggggtgggcgaaaggaaagttccaggattggtctcaaagcccaatcttattggtttaaaattcttcagaagcttctccacagccttcaggatgaagcttcacctcccaggcatggtacagtgtactttaaaaataacctgtatctaccttctccagcttagcttccaaagacaccttttactacagccccattgattaacctgtggctcaagagatgcacatgctttctcacctttatgcttttgtagagacacacacacacgggttaacttcaactcaaccttgaaaatttccatctcacattacctccttaggggcacttttcccttaacttgcatcctggctggccaaggagccttccttttgtggtccttttgcatctagtgcgtatttttctccctgtcttatttttattgcctggtcctcaccagaccaagtgctattggaggacagggacactgtcttggttgcctctttttctggcttagaatagaaggaaggcagaaatggttccaggaatattttagcttaggtttttgtttatttgggtctggattagtttgataatttaaaaagttccctgagaacaagagagatgccttatttctcttcaaagttcatattagaccagtgagtctcaaccttagctgcatgtcggattcactcaggggctctaaaagcccaggcatcagtaagggttaacatttttcccaagtgatttcaacatgcacatccaaggttaggaaacactggattaaccagagggtgctcaacaaaactagtgattcagtcatttgatcaatacatctcacttgggcaatatgcctaaacacatgcagttgtagataaataagggaaggagaagcttgaagagaaaaagagaagggagctgcattagctttagatgaagtcatctaatgtgtttgactcccccagtaacaaaaatatttttcaaaaataatttaatgtaaacagtttcagtttctgttttctctttcaattctgctgggcattgtcaagtctgggctcagaatagggaagctgtgtttccctgaaatgttgtgagtatatcttaagaaacatcacagtatacaggagaatgtctgacactttttcctggcaatactacgcagctcaatttttgccccttctgtgatttgccacgtcccctctttgaggttcatgtagctgctctctctctcataataagacagccagtactggcctgcataattcatgattacaaggtgtatacacatgatgataaagggaactgatgtttaatttacaaggccccatgttttctcataaaagagctaagcacacccaatcacaggctcaattatgaaaaataacaagaatgtgtttgagtatcattttgcagacacatcgtgaaagagaattgaatttgaagattatatgaatacctggatgaaaataggttttttgataatttgactgaagtgtggcactttacaagaattttctagatttaacccaccaatctccctgttgttccctgattgttttaatttgctgcaaggtagcctgcaatatcagttctttattttttattttgagatactacttaatgggaaaaggtaattttatcttatacatcttcatttatttgcatgaaactaaaaaaagtgatctaatttacatttttccaattcaaaagctattactgggacagtttcttcataaagtgaatttatattttgcaaagatttagaaaattttccatttaaattatattaaagtctgttttcttatacttcatattccaaacaatgaatctgctcctttaaatattatcccatcttccaaacccatggaaaatggaagtaaaattccatatttgaactctgataacaggccagattatgatactactcaatgttaccagtgcatatttgtgtaagaattgtaattgggagaacattacagtttcttgccttagttttcccaaaagccaagtaagtcctttactgtagcattagatcatcctcttcacttggctggacctagaattaaatacaattttgatgcctccagggaaagcagacagaaaggaggagcaaataaaatttgataatgataataatacttatactactgaatacttggtgagcctggactaggtccatcatatgttagcagacatatgtaggaatattgtatctaagcctcacaggaactctctacagtaatagtatgaccttgatgtttctgatgaggaaggataaggtgtggagagagtaagtgacttacccatggttcagctggttagggtaaggctctgtctaacaaacgtctaaatccaaagttgatgtccttaccactacgttcttgcctcagtttatcactgatgaagtgctagtacccacttgatttacaggaactcagaggaccaagggtctagttctaattttctataagcagtgaggagttccccatctagttggaaatgaaggtcagtcattctagggatggtagatggggccagttgaaagccaccagcttgtcccacttatggaaatgtaagcttggaggtgccccaaagcaggtgcttccaggcctgaagtagggtattatcctcaactggcatgtctagaagagcacctcttcatgttgtatggggtctgaacagcaccccacctttacttcactgaggagttctcaaaggtccacatttgttgaaaacatgacttttactgatacgcatgattttctttttcttacaaagacccatgacagagaacttacaaaatacaaatgtgcaaaacagcaaaaatatgaatcattataatcacatcaggaagagatcatttggtgcacatgtttctagtgcccctttttctgtgtgttataaatgcacatgtatgtgtacctattttgaaaaatgagattgtactatacacatggtttataatttgatttttcccaattagtattttttagtaaccagagtagttttctcaaaaacaatcttgtacagaaccccagcagataaacagataaagatggagacactctgttttggggcaaggggtgtggagggagagcagtgagcccaggttcagcaccagcttctctgtctccctcatgccccctaatggaggatttgaaagcactgcagtattttgcagaaacccagtttgaaaactcttgttctttaatatcagttaagatcccattctatattataccagtgtaaaccccagaacattgataatgaatgtctcctccaggataaaaatagtattaaaaggtaccagtagccataagagttgaaactatcatttgttaaaaatctaagaataagctggccgtgcctcagcttcatcctcctccctcctcagcctcccaaagtggcttccacctgtaatcctagcactttgggaggctgaggcaggaggattgcttgaggccaggaattcaagaccagcctgggcaacatagtcagacctcatctctattacaatttttttaaaaaataagttagccaggcatggtgctgtgtgctgttgtcccaactattcaagaggctaaggttggaggatcctggggaggttgaggctgcagtaagctatgatcatgccactgtaatccagcccgggcaatagagcaaaatcttgtctcaaatcaatcaatcaaagaatagtagaaaagtatgtgccatatagtctcccagtctagaaaagtggactggactttctctaaagccagtcattaaaagagaactggggccaaaaagaaggcaccgtgtggctttcttaccctttcctaatttcagacatacaactgtgtttaaaacattccatacctagaggaggcaattcctccaaaaatgaacaagaagttgttggttgttgttgttttctaaaggagtggaggggttcttcattccatccaagcggagccaaatctgtagccagcatgaagcagatggcccccttcttctctgccttttagttttatgactgcgagattgggagatttttcagcagttgcaatagttggcttcatccatcacgtgaggcaacgcctcagcggcagcagcttgtgttcttacatttaggatctatagatatggactaagcaaagctttgtgttttcacatcagaagctgatgatgagcaatgtgaggagaggcagcgttaaatagattcttctctgctctccgtttcttagtcctactggtaacaagtgtgcatcaagctgaaatttatggtgctaggtgaaaactctgctccacaggtcaaatgtattctctacaatttcctctggtggaatgaaactaccttcctggtcacgttttatgctgtctaatgcagtggtagtgtctttatctcacaaatgttccctaagatctaggcataagatttctggattctactttaactttgacattattattctgtgtggccttggggcaagccctttaagctctctattcctctgagatcataatgccactttatcccttaaagcttaacataaacacttctcaaagagatttgcatggattggtggctctcaaccttaactgtacaataggatcacctggagtatttttaaaactagtagtaccaagccccagtgattctaaaatgcagccaagatttagaaacaccagccctgacaaacccattcagaattactctcaccctcctgtgttggttctgtttttcttgtataactcttaacccaataggtctcagtttgttatttccatgcatgcttacctatcaacaatgaaatgtaagcttcttaaggaaagagacagatacataatttatctttgtctgcttagcatcttgaccagagggaagctgggttcaaaaattagctttgatacttgttagccaagagatcttggtcaagactcttaactagtctgtatccctgttttctcacctgttccaaatgagcaagaattcaaatacattgcgtggtgtggtactacggtttaatacaaagatttagttaggcttatagcactgtgtaagtggtcaattcagatcagctgtgcaagttttgctgaatttactgctttttatgtagtgatttttcctttgttggatcactcatttattcagcaaatattttttagcacttcctactatagttttaggtatgtaggatactgtagagaatatactgatggaatttacattctaaaatgctacatctgtgactctatttaatttttacaaatacctgtgtttcgttatactgaatcaaatgagatcctgaaggttaaaaagagattgagtgatttagccaagacctcgcagtaatttggtaatggaaccatgccagcagtccaggttttagtgctcattccagaggacaaacccatcatcctgattccctaatcagtgactgtgacaatggaactgttgttacagaagcagcctcatgcaggggataaaagcacggtttctgaagttggtctgcctagatatgatagtgtctctgccagttattagctgtatgactttggaaaagttatttcacctctctctattagtttcctcatctggaaaatgaagataatgtttacttcgaagagttttcatgagattaagtatatgtaaagtgttgcacagcaactggcatacagcacacaagagatgttagctattataatacttatctatggttagaagtgagtagtctgttttaagacttcccaggactttaaagaggtccatgcactcctccccttaaagtggtggtgatttattatcaagcaaatttcctgggttataatctttgaaatgtacatatttgtctataactctatgtctaggaaatggaataattttgacatttgtgagtatgatggaataaatcctccccagcagattggaattgttccatggctgacagttggcaaagtccacaatttgcatgaggatatgtgaggatgttacatatccacttgtaaaaagactgactggataatagaaatatcctatagtgtctgtagcccagaatttgatgagaaggtaagaataatctaatcaagtctccacaaaacgtatcaggtcttagaaatgtctgggcccagcacaccccatcagtcagtgtgacagttttaacatcattgaaaaggccgtgtattgaaagatttcttaagtcaggtctgtacagctagctataaagctccaattttctgtagggagactttgtttatgactgagtggcattgtggggtttctaattactttagcttctagcacctgtagccattatcccctcaacttgcttttcttgtatttattcttctagagaaaaacaaggagaacaaagacacagcacaagtattttcagcatttttctcacctggtgtaccaatttggctgataagtatatccaagagggaaaaagattgtcagcagctgattgctattaaagtggactaggagaaagcttttaactcagatgggggtaaattttctctttaatgttgaagaagatcctgatttgtaaaaatgtcaaaacccggaaaagcaactttgattacttgctttgctgtgggctaggggagggggagaattattttcaaagatgagcactagttggatctttcaacagatttcaaaggtgaagatccactaggcgccagacctccatctaagacatatattacctgaagatgcttgtgttctcctgtaatggaacaatttcaaaatgaggtgataggagtcttcatagagctaagcacaggatggcatgggcagtgggggtggaaaccaatcacccactgagccacccacctaactacccacccacttacccacatggtggtggtagacagaagacagggaagaaatctcagcagaagagatgcccctgtttattgacaacaagttggctgttggtcagggataggtcctgaatgttacagtcaagtaggaggtggaaatgcagcatatcctctgacttctcttgtctccattttgcattcttctcagtagttccttctcagtaggaactattttttggctctgtatcaaagtgatggctgtcagaaatgagtattcattaacattgaatataaagccagagagccaataatagcccaacaaaagcttgacctgtttattatttttggcccagaacccagagagtgtctagtaaatggtagatcattggtgggtagggtgaatgctgcactttgatactacacctggaagagtgtctagtaaatggtaggaaccatgaataggtagacaaatgctgtgcgttgagctttatcaggatgtttttacctttattcatacaatattcactataacctgtgacatagatgaaattatagtcatctcttggtatccatggaggatatagcttccaggaccctccgcagatactaaaatctataaatgctcaagtctcttatataaaatggcatagtatttgcatgtatcctacacatagcctctcatataatttaaattatttctagattacttataatacctaatacagtgtcaatgctatataaatagttgttacactctatttttaaattttgtatttttgattgttatgttttatttttaaaaatatttttgatccatggttggttgaatctgcaaatgcagattccaccaatacaaaggcccaactccatgagcctcattttttatgctgggaaaccaaggtgtcagaaggtgaaaagctggcatgcttttaaaccattagtcatcaggtccctaagatgttgatatgccaccatttttattaatcctgaaacttcttttcttggataattagccctagactaagcatgtccacaggccatcaaattcagtacagggactacccatgtaaggtaagagtaaggtacactgaatgtaacacagttggaagtggtatgaaatggagtgtgcttatgtccactaaagaaaaccaaaatcaaattattaaagagaaaacacaggtaggccaaagtaagcatcccatttattggtagaattgggtccataagcagtcaatttgcaacttcataagcaaaattgaaatttaaaataagtcctaagcagaataagtcgaagataatttttttaaatctgctggtatatatttacatgttattaaaagcatatttaaataagtatgctttttttaaataagtatgcttttgataacatcaaatttggccctcaactgtgaatatataattaaatagaatattaaaatgttctgatgtgcaagataaacctaggcataacccttgtgttatacaaggctcttctgtgtttgtttgccctttggtgcagattctggtaacatgtttttttctttttcaagccgttatggcaaaagctattatctcagttactaattggccatttgcccagttccttgtcagtagttccacgtttttgcccaattactttaaaagaatttctctgatgattgaaacaatgggaacagttttgtgaagaccaccccaaccctggttaggctactgcacatttgatagcttaaaatagtgccatggtgggaagagtgctggaattgccatctggagccctggctccacgacttagaagaagcgtgacacccaaaccctcttacctgcaccatgtgtcagtagatctccatggggaatggagggtttaactcccagagggcacaattattaaaaatgttgaatgaccatgactgggcagagctcttggcatttaatggttgggaacccaccattgctaccgaccccacaaggcataggacagtcccacacaatgaagcagtgtcctggccaaaatacagaagttctctttctgagacacagtgctgtaggcaatttatttgccttctgtgaaccacattttccttatttgtaaaatgttctactgagtttataggatcatgatgaagatcaaatgatatatgtgaaagtgctttgtaagccctaaaacactgtatgcatgggaggtattacaatgattacactaagtggcaaagagagacaaagctctttacaacaaattgtgaactgtacagatctgtaatctccctcttttaaaaaaaatatggcttaatctggaccatctgtaacaagatggttgttttgattcattaagggcttctggttctcccaactctggaaacccctcagtgtatgtgattgtatatcaaagctatttgaaagatcagtttcctgattattcatagagtcttagaaatctaggcttggaaaatctgcagaacatacacagcataactgctaggagtatgaatttagagaccaaaggcatctcatttgaaacctgacttcaccccttccttactggctttgggaccctgggcaaattaattaacttttcaaatcctcagttatctatgaaatgggtattaaagtatgtgcctcatgggggttataagggttaaatgatagtctttggcatagtgagtgttctcaatgaaaatacactttcatcttgttcatcccccataaggtattaggtgtcccccagtatccaaccatctttacaacttttgcttgaaaagtggccatcctgacttgtttttcacacttcactaccaatggaaacatcccattttcagacttcttggaaagatctagttagggattatattgtatttccagctatgggatagatttctttacacacctgggtggggggaatcaagaaatagcacccccacaccctctgcagtacattgtctgatcttgtctgcaatcaaattatctactgggatgtggtgtttcatatcaagccttccatcaaaaccattaacaggcagttaacagttgatgtgaaattcttggctcccagcagcagcttaggtgtatttttaaatattccgtctggcagctcagaaggggaaaaaaagctaaaaaggcagcaaccagcagattttcttccaacaaagatcttttccccacaacctgtccacccctttcaaggaaggaataggttagagatgctgcacctaaatagcagagtgaccatgttacctagcaaccaaacctaaggatgggtgctagacctgcccactaattaccagagcaaggagaccctccctcagagtgtcacttaaactgtaagagcgttatgttccagtgacttccatgaaaggttaagaatgatgtgaaagccccctgtgtcatgagtttcctttcagttgctcaggagctatggagacttgaagacccatcaaggatgatatttaaagatatgaaatagcaaggttacaagttacttttcccagaccactttctgcccttcttaccatcacaccaacttctaaaaaaccttttattttgaaataaatgtacatttacatacagttgtaagacataagacagagatcctatatcccctttccccatttttccccaacaataacatgttgcatagctatcatacaatatcacaaccaggaaatggacattgatacagtccatcaacctgattcagagtgtgccagttttatgtgtagcatgacaccaattttcaggaaaacataatctcctgatctctactgaaacaaacccctctcctaacttctaggaggatctcctttctctttttgataagtctgatcaactgaatagatgaccaaagcaaaagtccttatgtctcagaaattctcaatagttccacaagaaactgactgtcatctgcctccactgcatcttctaccacctgcctcagaattcttgggataaggcaaaagctatgtcccaaggtcacattaggatttaggatcaggcacagcagcccatttttcagttatttataagtccatggcctgtgcatagaaagactggcaaagtctacattctttgaggtcaaggaatttgaagatcttattgtcaccctcgcttctcccctgatgccttaagtgctgcgaaaatctcccagctcaagtgtgtgattccgtgtctcagaatgaatgatggctgagggtaggagagaaagcttgacttggaggtgtagtcagaggaaggactattgtacctccatgcataggaagctgctttgctttcggacaaggctatgaagagctgttttcaaagtttaaagttattttctatggccagcagtgatgatatgaaaggttgcatggaaaagggcttaaggctagaagccggaacaattggagtttaaatctcagccccattatttaccatctatgtgacaaatggccttaccttttgagcctcactttcctcaccaacaagggattggagatggagataacagtgcctactccataaggtattctgaggtttacctgatagaagacggtggttttcaaacttgagcatgcattggaattacctggggggcttgctgtacctccacgcccggagtttcagagttagtaggtctgatgtaaggcctgatcatttgcctttctgacaagctcccaggtgctgcattgtagctgctggtttgcataccacactttgagagcctttgggatcccgtttatgattacactttgggaacccctaaaataaggacattaagtgcctaataacatatctgactttgggtattcacccaagggaagctagttcccctccaagctaataaggaaaaggtgcccctcccacccataaaataaactgagttctctgactttctagaaactgacggaacttcctggttgacagaaagccatgtctaaacaagcaatgtagaacaaaaggctgtgaaattatcaagcatatatgacaagtgtccatagccaattttcttatttcccagtatgacagtgattttcttttacaaaataaagcaaatttagggttaggggctttgtcctggatatacgtgcctgtgtatgtgtgtgttggtatgtaaagctgacttcatctctgacacgtaatattttaaccaagcagaaatgtaatacacagttttgtagcatgtgtatgtgggagagaatgtgggagaaggaagcttgggaaaacaagcgttcttagaagaactgcaaagaacctctcattagagaggcaaattaaaatatttcagtccctgggctattctttttaaatacaccaaattacacagcagttcgtaatggaagaataaactgcagactttatagaattaccttttttttaaaaagtggtgatatgcttcacttgtgctgtgagcaatataaagaaaattactcaaaatattttctttaccactgtggatttttgtttgtttgttttgtttttgtaagggtggatccccaggtataaacctgaaggattattttaataatttctggtgccctaaatttcttgacactgcatgcaacccttgatttctttttattagttcgctcccctgcagtctccttacattctctgacttctaacattggagggaatactctcacaactgatgataaagcttacatttgttcccatagcctaaaacatgacttccagattcaaggtgctattaaatctgttgctgccacaaagtttaattgactccattttttagctgatgataactgttgaatattcttacatcaaacaaacatcactaactctaattttctatcaaatatctgggctgtgctttgaaatgtgtctatgaagacattctttttctttctttctttcttttttcttttttttttttttttgaagttatagcaacaggtaccaaaacacaagctgagaagtatttcagaagagtagttgaatgacagtggcaatctcagccttggattatcaatttgaatttgtttttttgtccaaatcctcttgatgtgagattatttcaggctgtttttccccttgcacattatgtaatgcctgcaaagaggagaagtcagatggaggatcagagcaggagccgtggcagaaaaacatgggccgtgttaacttaggctgtcatgcaacttgtaaacctgcagccccctaaggtccagcaagatgcaactgacaggacttctgatccccagtcagtttattcccaggaaaggcaaccagcaggaattgaaatagtaattgctttcctttattcaaagacatcatggatgagacgattaaagagattaaggcttacctcattcagtgcaccggaataaatgtagtctgcttttctgataggactgtaactgtcaatcaaaggattaggcctttgggaggtagaaaaaggaggtggccttaaaatgtatttgaatttgcaaactacagctgtgtattttaatcctggagatacgcattgatctttccccctctttgaagtctgctgttagctacaggctctctggccccaaccacttttcttatatttttttaaaaagaatattttaaaaactcatttaaaaatcgtactgcattgaatcacccaaagggaaaatataattaaagtaaccatttgtattgccctcaatgaggaaaaactttggaagtgtgcttaactttggaatatacaagtctgattgtttcatcagaaattgcagcactgtatgcctaaaaatatatttttccagcaggtttgggattttgtacttataaggaggctgtttatccatttagcaatttagctgagggcctagtataggtttttaatcttagcagcacaagtattcctgttggtttaagtcttaccacctgagttagtgctgccacaacacacacattctgttttctcattagctgtcacacaattgtctgcatctattaatttttgaaaagataatagatattcttggagaaaccaagacaaagtggcagaataaatggcaggtcatttctcatgtggtggcagaacttaagcatttgcaattttctgactattgtcagtcaaggttctgggttcattatctcaaccttgacatctaggttccttatctgcaaactcaatttctttccatcatttccctgcctgaaatgtccgatcagccaagacgtgtctcttttatttttttaatttaattttaatttttatttttatttttttgagatggagtctcactctgtcgcacaggctggaatgcagtggtgcgatcttggctcactgcaacctccacctcccaggttcaagccgttctcctacttcagcctcttcagtagcagggattacaggcatgcgctaccacgcccagctaatttttgtattttcagtagagatggggtttcaccgtgtaggccaggctggtctcgaactcctgacctcaagtgatccacccgtctcggcctcccaaagtgttgggattacaggcgtgagccactatgcctggctgaccttgtctcttaatgtttctatatcaaatgagcaagctaataggtctgttagaatatttaggagaaatccatccgttttcccatctattcatccatccatccattgattcatttattcaggtgcctactctgcctcatgcctggtgctcaagacaccagctgtgaataacatgcatttattctctaccctcatggagtgtataatctaacatggaaagaaaatgtttaataagtaattaggcatttgagggaaggtgaaaaagatcaagggtgatgtggtaggcagaattataagaatgcccgcagtgacacttgcccttaaataatcccctctgctttgtgtgtgagtagaacctgttaatatgatagcattcccttgataatgctaagttctatggcaaaagggaaattatctcagttgtcctaatctaattataggatccctttcaaagaagagcattttctccagcctttagctgagagaaagagagactccaagaatgggaaggatttgatgcaccaacactggcttgaggatggatggtcatgagatgaagcatgttgatggcctttagaagcttagagcagccgccagctgacagccagcaaggaggcagagacctcattcctagaaccacagagaactaaactctgctaacaaactgagtttgggaatgaattcttcactacagcttccacataagagtccaggtcttatgataccttgagttcagccttgggagactgttatgggttgaattgtgtccagcaaaaattgaactgtgtcacccagtgtttatgttgaaaccctaacccctgatacctatgactgtgtcatcatttggagacagggtctttgtagagttaatcaagttaagatgagatcattagggtggaccttaatccagcatgactctgactggtgtctttatcagatgaggtaaattttgacacagacacagaaacacaggaagaatgccatgtaaagacacagacatagagggaagacagccatgagaagatggaggcagagactggagatgtgctactgcaagccaagaaattcttggagctaccaaaagctgaaagaggcaaagaacattcttccctagagcctttggaggaagcttgtacctgccaagaccttgagtctggatttctagactccagaattgcaaaataatatatttctgttgttttaagccacccagtttgtgatattttgttaaggcagcctagaaaaccaacacagagactctaaagcagagaacccaggtgagcctgcccagacttttgacctacagaactatgagtataataagtggtgttttaagcccctaaatttgaagctatttgttatgtaacaatagcaaacaaatacagactagtatgaaaagagtgtctaatctacctaatctgagggtggttttccaagagggatgtttaagatgaggaagaaggccaggcatagtggcttacgcctgtaatcccagcactttgggcggccaaggtgggtagatcagaaggtcaagagattgagattagcctggccaacatggtgaaaccccatctgtactaaaaatacaaaaattagctgggcatggtggcacgtgcctgtagtcccagctactcaggaggctgaggcaggagaatggcttgaacctgggaggcagaggtcacagtgagccaagatcgcaccactgcactccagcctggtgacagagcaagactctgactcgaaaagacagaaaaaaaaaaaaaaccaaaaaaaagaggaagaaagagtaagtaggaattgtctagtaaagaggagaaagggaagattggtccaaacaaagggaatggtatatgcaaatgccttgaagctgaaaagtgccagctgcattcaaggaactcaactgttcaggctttcacccttcagatagtattgttattaatgccaggcctaaactaggtgctagagacaaaataaggacctgcaacttcttccttgtccttaccgagctcatatttcagtaagagaggttaaaaacacataaccagcctaagaaataataattccacttcatacagtaggctctgaaggataaaatataggactgagggagaaaaccccagagtattggatataatattgaaaatgagagggagagtcatgtaccatgaatctggaggggtaggcaattccagatcaaggagggtgttgtgaatgtctgtttctctatttgtggaatatttcagaaaagtgctatctcccttactgaaaattcacagtagctatcctgctgtgatcatctcggcaccttgtatggtatacacctgtacattttcagattgagcccagtgtaccaaattctagaccattcccctaacccaacacaggattatacccctggggttgaaattatggcttgttcaggatcattgggcttttatgaaaactcactgctcccatttgcattgcatctttttatggcttctttaatttcaatttatttgtatcgtgtgtgcatgtgtgtgtgtgtgtgcacacatgcatatgtgtgaggtccccaactatcctcagttcaatgatgcactagaaagactcaaagatatcagaaaagctgttatactcatggttacagtttatttcagaagagatacagattaaaatcagcaaaggaaaaagtgcacagggcagagttcatgggagaccaggcacaagcttccagttttcctctccaagtgagatcacaggacagtacttattgttcccaggaacaatgtatgacaacgtgtacagaatgctgccaaccagggaagctcactcaagacttgatgtccaggatttttaaaattaggaattggttacgtagggatggagtgcccatatgactgaccttagttacatagtctccaacccaagaaccccatcgttaatcacatcattagcataaaccatctgccatggcccaatgccccaggtatacaaagacactgttatcaggcaggatattccaagagtttagaagttatctctcataagcggatgaagggggggccatgcctttctttggaatgtgtagaatttggacatcatagacctgctgaatccaccctttactgtaatacacacacacacacacacacacacacacacacacacacgcacacagattgtcattgctttaaaccttaccccaaaatttggtcttccaacatgttgtgagcatcatcactaaaaccttgggattgtagcaaaaaataaaaatcattttgcagtgtttttttaatattccttgatgtagtggtttacaaacatagattcacattgtaaatatgtaactatgcttggggacattttttcatttaattttactttattgaagaataatttacatccattcaaacaaacagatcttaagtgtacagttcactgagttttgacaaatacacacataacccacacttcttttaaaatattgaccattttcatcactctagaaagttccctcatgccccctacagtcaatccctgcccacccacctccaccaccatcccctggagccagtaactgttcttatctcttactaaacattagttttgcctattatcataaaagtggaaacatacaatgtatgatcttttgtgtttgggtttttttcccactcagaataatactactgaagttcaactatgttgtgtgtatcagtagattgtccgttttaactgctgggtacttttacattgtttggctataacacaatttacgtatctattctccttttgatggacattttggctgtctccagtttttagctattaggaataaaattgctatgctcattctcatatacgtttttctgtgcacatatgtttccatgtctcaggtaaatagctagcagagaagttgccatcttgtaggtatatgtttatctcatctgccaaaccgttatgcaaagtaaagtggttgtgctatttacacatctcccagcaatgcatgagagttacggttgcttcacatcctttccaacactggtctgtctttttaattttagctgttcaaacaggtgtggagtggtatcttatggtagtttcatttgcattttcctgatacctattgatgtggagcactttttcatgtgcttattagccactcgtgcacctgcctttctgaggtgtctggtcaagtcttttgtctattttacaaattcggtgattggactttttgctattgagttgtaggaacgctgtccctgattttgcctcccctgagattttgatacagtagatgtagtgtgggtccctgaaggactctgacatacagataagtttaaggactaatggattaatgggtctgatgtcagtttgctaagacttcaactgtatctggcagccataacttgaaatttccccatccaaagacttgcttggtgattattataaattgttaaggaagcattaaaaaaacaattctcagtaggtggtttctgtctcactctggacttggcgctgaattttaacatcaacctaaagctagaaaattcctagaattggagaaagtcacttaaaccaaatgtgggctccacacaggtattactataattattaaagggcccttgagttgatttgtagcagcatcctaaaccacatcctgtttttcttccctcaaagggaaatgtggtaatatagacatttgaacttggaaggccacatgcaatctgcattcttttctaaataaaattgatttggaaactacttgaaccttgtgttaatgttcacattgtaccaatttatctagcagacaacctccctgacccaaaatgttggcttctttctactaggtaatttcttgaattttcatactgatttacacagtacaccgaataagctacctgcttaaagacagaagagattaaacaaataattttatccaattactgagtaaaccatggacgttttctctttaaaggaaactccagatttggaagttgttttgactcatagctcatggttctaagggattaaaggaataaaaaatcagagaattaaagaatcaaaaagtttctacaaacttaaacatccaaactgtgcagtagattttttccttttccagggagccctgctgccttaattaaggcaatacaaagatggcatgtagattgtatctcatatgacagtgttgaatggtgtgacaacctgaaaaatcatgcagagacccttccctcttcctcaggaaagtgtgctgaaattgatttgcgatgctcaccatcattcagcaaaaatatacctttctcaatactgtgtatctgacctttcaagatatgaggttctgaagttagccagagagtaaactcaaacaaatggtgcagtgtctatcaaatattctgttatcgtgatgtttacaaaggctcttcagtcaacttttgattcttcatgtaatagagaggagatattttaaatcctagtgatgtaaggtgttcaaatccttagagactccaggtaacctctgctctagggacttcatatgcctttgctcttacttcctggccttggactattttatctgattcctcctaggttgaggtggagaaaggccaaaaaaaattttaactagatccttcacttcattcacaactctggttagaacattttgatgaggaggaggaggaaaacctgggcttcagcgtagcttctggatcactagtagatctttgtcactgtggactaaagagatttgaaaactagggggattagcacaagatactgaaatgtgaaaagagtgatgactacatgtcagctctgtttggtttgctctaagagaaattgcatttttaaagctctcctgtgaaaaatgtgaggctttctgaatacacaacttcttacagttctgcactaaggtaggttcctgcaaaggtagtgaggtcatgtttatctagtagtgctgggaaggcttcatttagccatggctgctttaaatatatacatagatatttaaagttaccatcaaggggaaattttcttcctttttctcaccatggagtaatgtgttttctctaaatggctgtcctaagctgcacattgatttttttgttgttgttaagtcatctcctgtaatttctctatgatatttgcaaatgaagttgttttaacacaagttactttcctgggtgggggagaataataacatacccacctttgtaaacaaatttatttgaggatcagtgggggtggtgagtgagagacaacctctaagcccacaagtagtcaattccttggggactgcctccaaagccttcagttagctaaaccttttcctaaagagacaccagttcagaaacagttaaaatgggaaaggattttttcccattacatataggctttggtatgcataacacattctgtcttccttttggccataacaatatttcttataaatatgctaagtattcatagcaagagcaggtcagagtatcatgaaactgttaatttaaagctttactaaaatatatgcatcccccacagccatactctacaggaatttgatctctcttacagcacaaattggagaatgaaatgagaaatcaacaataaatattttaaccattcaagttcttcatatcatcataaaaagaacaatttgaagatttcagatatatccccaagctgttctaatccaatcagaaaagtatagttattactcatctttccttcttttaagtaaatttgcttgaagaagagaaagacctggacctagggagtgcaggaaggcatgggaaagagaagggagagtgagagagaaggaaagacacacacacagagaaaaacatgccttttacttaaaagccctatcagttgttttgccttgatttagttagaaactcaaaaaggtagaagcaggaagcagcacaatatgaccaatttttaacagaaacacatggggcaggagtgtatgatagcaagcttctgcctttctcatgtgtctgattatttttatggaagtggtattgaagcataatgaatgtcagagaattctataaatcctacatgcacacacccatgtaatctgcacccagatcaaggaacagaatgttatctgtcccccaggagacccatcctgccccctgccagtcacttctcccccacccctggtcaccattatcctgatttctcggaccatagattaatttttcctagttttgaactttatataaatgaaatcattgtgtgatgtctaggggactggcctcttcactcactaatttgtgagtttttttttttatgtagcagtagatgatgttcattatgtgtagaattccattgactatcacacaatatttcacccattctactgctgatgggcattttggttgtttccagtacagggctattataatctgtattgccatgattaatcttgaacttaccttgttagtgaatatttacctacatattttatcttcatttattttaagaacagcagtctctcagaatactaagaagttgacatttaatttgttttacaaaactatatacatgtaaaaaggacagaacaatttcaaaagaattgactagctctgttaagagagggaccaaaaagaagacggaagtcccgcaaaacctgtcctgtgaagtttgtgtcaaaatggagttaacttttaaaatgttatagtttgtttagtgattcatttcattgactaattgctttgatctttaacgtaataaaaacagctgaaagaggaaaagagtgggtactccctgtgcttaacaattaagtttcatggaggtaattcgtaaggatggcggagcataaagcataccctagcttcatttgaaacatggtcttgcagcaacaaatttgtgttatattttcagaatatggcttgacagtttttaaggaattgtaagtttgagaaccactataatccaggttctctcatagagtaacttcttcccaggattgaattagaggtgtggaaatttataaacccataccaagatgcaccgtacatgtgaaacacacagatttagaagagattatatattaaaaaagtaaaatatcgcatgaataggtaaaagaaatttttatatgaaccgcttcacgaatttatgtcatccttgcctaggggctatgttaatcttctttgtaatctttccaattttagtatatgtgctgcccaagtgagcgagcatgtgtactgattatgtttttaaatgataatgttgtggctatattgagttaaacatattatgaaaatttcacctgtttttattttattaagggagctataaaaatttaaagttacatgtgtggcttctgttacatttttactgtgtttttagatcttcacatcacctttcaaagactggtggtttggcccagaaaacaatgagtttgacaggattggggaaatgagtttctcaggtgatatattacaagtgcttactttcagcatctaccaatagatttcagggcctatgtagatttagtgcagttgcaactatcttttaccttattatttcgaagtttctatggtatcattaatatacatttagtaagtgctgtgtgcagagataagagagatatatggccactgtctgtcgttgaaaagttccacatatttcattcattcatttgttcgttcaataaaaatttattgagcttctactctgtgttggaaacaaggcaaacatgtgagatttggtagtaaataaagcacagcctctgctgtttgttggccacttgtatgttttcttttgagaagtgtctgttcatgtcctttgcccacttttcaagggggttatttgttttttgcttgctcaattgcttaagttccttatagattctggacgttagacctttgtcaaatgagtagttcacaaataccttatcttattctgtaggttgtttgttgatagttttctttgctatgcagaagctctttagtttaattaggtcccattaccaatttttttttcttgtagcaagtgcttttgaggacttagtcataaattatttcccaaggctgatgttcagaatggtatttcctaggttttcttctatgattttaataattttaggacttacagttaagtctttaatacatctcgagtttatttttatatatgtaaaatgtaggggtccagtttggttcttctgcatatggttagccagctatctcagcaccacttattgtacaaggagtcctttccccattgcttatttttgtcaactttgttgaagatcagatgcttgtaggtgtgtggctttatttctgggtcctctattctgttctactggattatgtgtctgtgtttgtagcagtaccatgctgtttaggttactgtgggcttgtagtatagtgtgaggtcaggtaatgtgattcatccaaatttactctttttgcttagtattgctttggctatttgggcccttttttgattccaaatagattttaaaatagtttttttttaattctgtaaaaaatggctttggtaatttgatagaaatagcattgagtctgtagattgttgtgggcaatatgaccattttaatgatattcttctaatccgtgagtatggaatatttttccatttgtgtttaaacgtttttgtccagtgcccttctactcctgtgctttatccatcaaccgccatccacagcctcagaaaacagctcatttaatttccaccagaaagtcagagaatcaggagggtcactaactaaaagggtcttacacatatataaataaatcatttgcctggagaggcatgcccttggtctgatgctctctcttatggagagatgcataatccactcacttgtaattcagaaaggggtccaacatcaatttcctaaaagagctttctttcagaagatagagaggatgcattttgaaccatttaattgctcctatgagtgacttgcataatgcctgtagaactatctagacagcacatgttgcctgaagcagcacatgccagttgttttctttgctgcctttaaaatgaaattgcatgcacatctgaagctgaatgactcttgatgtgtgattgtacctttaccccgattctaaatagaaaagatggcttttttattaactcattttctagcaggaagggatcatttctaaggaatgacagtttctgttttcagatttcagctctagtactcactaactgatgaaacttggacatattagctagacagcttgaccagtgtcacctcacttgaaggccaccttatgtattaaggcaaaaggactttttaaaaagtggcattttcttgattatatagtaaaattatgcacattgtataaaatgtacacatgcaggaaagtatataaaagtaacttaacaatcacctgtctttccaccaccaaaaataaatatcatatgttaatatttttgtgtatctccttccagttgtttttgaatatttttaatagtggaagccataccgtatataattatgtattttgcctcttttacttggcattactgtgtaaatactttgcctcataatgaaaatctttttaatgtaatttgattttatatataccattacataagataaacatattatttagtcttaggaggaaatatacatagataaaagacatttaagccattaaaaaacactgaggtagataaaagcagtcttaccatattaaagccaaataaatactagtatctgtaaagtttaattcatactcccacataatgtcctttttgttgttttaagtttataaattaatttgcttaaattacgacatttagagacaatggatgtcctcattttgagaagatactttctaacaaaaatcagctgatgaggatttaatacgcaccagcccttgccctgtatgaaagaattgtgaattaccaattacagcattgatgccattgttcagctgcctgagcaaaacattaggtggcacacctgtcagagaaggaagagaagtaactgctggagaaggtcttaggaagccttaagctgggctttgaatgatgggataggattgagataagactttataatgcacggcttttaacagtcatatgccatattccttaatctacaaatggtaggtttgcaattatttctaaacaacaaatataaatccatagtgcccaatgcatgcattttcttgaggcttctggtgtggatggtgtgtgcttctgagagatggaaatgacaagcagataactctagaggtgattatgcaatgagcagctctgaaggagtgcaggagaatgttggcttacagatttttttttttataagattggctggtaggaggagtgggtggaatatgtggaaaaaagaggagagagcaattaagtaaaaatgttaggctactctcttagttaaatattaacaatcttgtggagcatttgacttgatttattcaaatgtgctttccctccaactccttttgcaatttacatcactgattcagcttttgttggggcatcaacctctaagaaagcttgatgaaagctaagaaccacgggtcccagtttaagaagggctggtttataaacagagtctggttccataaactactattcctctattctgggtttgtttccccaccaccagtaccagttcctttggattttgtatcaggttcatttgaattggaaggggaaaagaaagctcagcttaactgatagcctcctttgtgctttgtgcacagctctgtgctaggcaccaaacacacgtaagagccctgcgccctcacaatcgccctaatgggcagcatttctacttgtggaccgggagtggaaaagcaaagaaatgacagtgggatattcagcagaggaggctcacagggaacaaagacactcaagagtgaagctatggttttaggatacagctattcagttttctatgacttagcatgcaaagacatggattaattctgctacagaactgtatgttaactggataatggaagtcattttgttctctcaatgattatcagaaattcatgctctggaaaagaacagacaacagaccatttgtaaaaacaaatccgagtaataaagaaattaatcagatactttcatgagaatttccccaatgattttaatatttagtgggcatgtacttgaaaagctgcttctcagaaattgatactcatgaatgatgatgatgattatattaataataataatatatgaccactactactaatatgctttgagtgctcattataaactggtagttatattgggtgattatgtgaataaaattgctcatttatttggccatagataacattatcgtctttaccttttagaggaaaaactgaggcccatgttctcctacacagaaaatagtttttagttcaagtccatctggtaccaaaaccatgcttttgaggactactctccattgcttgtttagagctgaaagggatcttagggaaggtcatttcccagattaggggcccgtaatggtagtggcttgaccagcatcacataggtccttagcagcagagttagaattgcatcctggcctgtggttctaattagattcagaaaatatgcaggccagtgtggaccacttgaaaataatcctggtattcaaagattatttgtgagtgatatggctatattgtggcaattgcagcaaaattaaaaggcaatgttttatgttaagacgtaattgtatgtgttcagaatgatgggggtgagagtctattaaataaacacctacagtgtctttatattctgatgtgtatggtattaccatacacatattcatttcatggatattatgcatcatctactgtatgacaggcactgtgccagaggatgaaaatacagcaataggcaagacaaacctcatccctcctcttgtggacctgacgttctagtggaataagacagaagactgttcaagtaattaataagaaaaccaccagagagtgataagtgctttgtataatgttaaagctgggtgatgcaacagagacttcctgggagctactttagactgggcagtctggggagatgacaattaggctgaaacctgaacaacaaaaggaaacagtcacatgagataagaggaatgagtattcctggcaaatgtaaggatgattgctgtggaaaagctctgagaaaggacaaaccctgagattggcttgcttgaggaagagaaagaaggcctgtggcactggcatccagtaaaagagggcaaaggtagtgacatcacagaggtgcccaggggtttgctcttgtgggtatttttgagccagaggaaacagtttgaatgctattctaagtgcaatggaaagccattggaagtttcaggcaggaggagcaacgtgattcaatatatttttttttaaagatcactaacatctagaaagtatgaaaagcaacagtgggagctgggatttcaatgaggaaacatgacaattgatcagcaaaggactgtggcaaggattcaagtggcagcagtgcagatgtacagaggtagtaggatctgagctatatctggcaatagactcaacagaacttgacgatggattaagtgaaggaaaaagaaagaaaaagctaaatcaagaataatgtctacaatttttggtttgtgcagttgagtacatggtggtattgtttattgagttggaggaggaagagttggaggaggaagaggtttaggatggaaaagtccagaattctgtttgggttgtgttaggtttgaaatgcatattgtactccaccatccaggtagaggcatccgttaagcattggatctaagagtctagtgcttagtggaaggtcaaggctagagatacagttttgagtggtatttgcatagaaggtggcactgaaggccaccttttagatgataacatcgaaagagaaaggacactgaggaaaggacacccaggacagggccctggcactccccaacatttgacatcaaacagaggaggaggaataaaccatggattctgggaaggaaggtcagggagtcagaaggaaaaccaggagaatggtaccttgcaacctaagagaaattatacaaataagatacagctgggtgccactaaggaaaataaagaatgatgatgacaaatagcaatcaacctgggcctgaagcaggactttttgaccgcaccctttgaccctgaagactttaagaataggtaaccagaccaccaggagagcttcaggctctctctctttgtccacttttactttttttctcccattctctgcctcttgacctctctaagtctcatttttctggagagtcagactcaaaatcttgtacctcagttttctcataaggctagcaatcttttattatttttattccatttagatatattcagcatttcattccatttagaaacattcagcgtttagaaatatcaaattgaggctgggtgcagtggctcatacctgtaatcccagcactttgggaggctgaggctggcggatcatgaggtcaggagttcaagaccagtctggccaacatagtgaaaccccatctctactaaaaatacaaaaaattagctgggtgtggtgatgtgcgcccgtagtcccagctactcgggaggctgaggcaggagaatcgcgtgaacccgggaggtggagtttgcagttagctgagattacaccattgcactccaacctgggcaacagtgcaagactctgtctcaaaaaaaagaaagaaagaaagaaaaaagaaataccaagttggtagtacctaaaaattgatgggaaatagcaccctcttgacaaaatctagatatataacagttgacccaggaaaatgaacctcagtagaaataatggccaatgaaaaaaatcactgtggcaatatatatttgaaatcattgtgaataaaaactggcagatgaagtaaatatgtattaaagattttcaaaagaaatgagctcacccctatgaaaataattgataaaataaaaatattgaaaaattggaaatgagtttatcgtgttggatagaaacttgattgaagaatcatggccaggctcggtggctcatacctgtaatcccagcactttgggaggccgaggcaggtgaagtacttgaactcctgagtgtgagaccagcttggccaacatgatgaaacctcatctctactaaaaatgcaaaaattagctgggtgtaatggtgggcacctgtaatcccagctacttgggaatctgaggcaggagaatcacttgtacccaggaggcggaggttgcagtgagctgagatcacgccagtgccctccagcctgggcgacaagagcaaaactacgtctcaaaaaaaaaaaaaaaggaaatttgatgaaagaattaaattggcttactgatatttgtccaagaaacaactgccttgatgaagattccccagtgttgatttaagtctgattaatgtttgtaatcaagacatttagacatttgtggcattgaaatggcagggtcaaacccttgggtcaaaatgtcttattccctgatagacccgttttgtgcaataatatatcatgaaaacaaactatctttaaaatacaggaattaaagactcattgaagtcatctttaatttcaaagcccttgattttaaaaagcgatctcttttggactgtagccttcactgtcccaagactataaatgttagagaggaaataattattccagaatcttattcaggaagagttgcagattccttgcctgagcaaggacaatttctaaattagtgtcatttgaattagtgccttttcaactgcagacagttctttcaaaaatacttgcttgttcttatgcttgtttccttttttaaaaaaatcacattggtttgcaattgaggttaatattagttaaactctactttgatcattaaattcagtaacatactctgccaattactagctgtatgtccttaaatacgttacctaatttctctaatcctgtttcctcaaccataaaggggaccagtaacacacaccccacagggttattgtcaggactaagtgagagaaagactttaatgccctgtttctttttatttatttggagacagggttttgctctgttgtccagactggagtgcagtggagatcacagctctctgcagccttgatctcccatactcaagcaatcttcctgcctcagccttctgagtaactaggaatacagttgcatgccaccacacccggctaatttttttttttttttttttttaactaaagacgaggtcttgctatgttgcccaggctgaatgccctggtttaaagtagatgttcaatgaaagtctttactattgctactattgttagtatactgtacattttctatgtacacaacgtaattactttagctatttggtctgaacaatttgtctcccaaatagtttgaaaattttcccagggaagggttaggctctcatcctttattagtgtctttcattcctctgtatcagtcatagcagaacacagctggcagaacacagctgcctcgcccagactgggtaattgaggggtacattatgaagggattatttaaagaaggttggacagagcaaggaaaagccataagggatggagaaacaccctagggctagcaacagcagggagcccatagtttgcagaggcaggggaggaggttactggtgacagcttggggcacaaaagacaggccactgaacaagaactgtggttttagatagagaagtgccaaaatgctctctgggaggaaggagccagtatattaaatactccaacctctctctcttcccaccctgatctcctgctggtgcctctcattagctgagctcaacagaaaagcatcaggcaaggaagctggttacagcagtctatagaaatcagcatccctgaacacagagcagaggggaaaagggaagagaatggatctagggaagtaaaatgagattaggcagcagagcctctccagccttcagttagcacagctgctttacatatagttagtgctgatacatgtttgtggaaggaagggaaaggaaaattgattgaaggcagttcataaactatagatgactcatctttaaatgaagattgagaaaaacactacgtaatagcatagtagtttcgaggtaagatttgaagtcagaccaaccccagtgtgaaatcagaccaatcccttagtgcttcctaatggagtgatcaaaggcagttactaaatgacttagcttcagtttcttcctcagacaaagggagataaggttaatacctacttcataggttgcctttgaggcgtaactgagaggatggatacagtacactgggcacagaaagcagcgcttgagaaatgttagcaaatgaattctcaataacagtgagcggttctcaactgggggcaattttgacccctaaccccattccagggaacattctgcagtgtcaggaggtatttttggttgtaacaactggggagtgctataggcatgtagttagtagaagccatgaatcctacttaaatatcccaccatgcctaggactgccacccacaacaaagaattatctggtcctaaatgtcaatagctccgaggtgagaaatccttccctgtactgatttcatctctgtgattccatccttgggcctctatatttcttgatattggttcttaaaatccttgattatttatactttgttcactctcagtaaatttgagatttttgtcctcctcttcccattataaggtcaggacatactgtgtctatggcacttcaacactatgtgattttgtcttttcaccatttgaagtaaataaacaaatatataaataaataaagataaaatataaatcactgtgatacgttgtaatctgaactacagcctcccaatattaaagcacttatgtcaaatacgtgctatagatttgcaaggcaacaacaatacacaatacagagctatttctcggggtgtttcaaatcgccagggagcaacatattgaaacatgttgttactgcagctctcatctctgatgaacctcttcccaaaagaaaaaaaacaagccaaaaataaattcataaagctagtgagtctaaactaggtcagtggaattaaacattaatataaataagggctgtccttcaacataatgggaatgtatttcctctctctctcagtcactcacccctctcacccaactcagccctattctacccagaatcgcccctggcaacagtggcctttcctcttgagaaagctattaaaatagaatacccttggcctcaagatggctctgagtcctcactatgtgtttcatctcctccagcctcaaagggggagtggttttcccagctccccagtttcttcatttatctgtccattcattcatccgtcaagtatttattgtggtccttgaattaagcagtacagacataatggtccctgtccacatgtagcatgtaatcaactgggggatggagacattcatcaagtaagcaagcaaattaatacgtcctgattgtgaccagggctgttcaaggagcagggaggcaccagagaaaataaaatcagagtcctactgaggcagtgtggtcaggaaaggtccttttgaggtaatgacgtttccagtgacattagaaggccttccaaaagaaatgtgggaaagggtacctaggaagaaggaccagcctgtgcaaaggccccacggagggaaaagtgggatctgttgagggactagaaattggcaaatgaggcttcactggtgagaggatgtaggacaagatcagcaggagaagaacttgaagttaccctgaaaattatcctctcgtatcctgggaaaacgagaggatttttaagctacacggtgacttactatctgttaacatttagagtgctttttctatgggccaaaaacactttacagatgacaatgctaacactcacattcaccttgtgagataagaatgattgttatacccacttttacagatgaaaagtggaggcacaaggagggtaaggaacccaggatcatatagttatatatcagggtttctcatctccccactgttgacacgtggggcaagggccatcacgttcattttgagatgttaggcagcaacacagccttctacccactagatgccagtagcagtctccccctcacctccagttgtgacagctaaaaaatatgtccagacttttccaaatagccctgaggaagaggtgagcaaaatcctctctggttgagaatccctgctatatagaaaaaaaaaaaaaaaaaaggaagcatctcaaatgccattattcagtaatgcccctaccttaatgtcttacaggctctttaataagctttctctgtgttttcaaggatcattcgtctcagatcaaggcttctctccttccccagctagtggatacttgatcttgtggatctacccactcagtaaatcacccagcaggtgtagcaatgtggagttgcatggttcagctctcctatgcattaaaacacatcttgaaggcagaatagtggaggttgctaagaggaggcaaagcatagaagaggccagtgttctgtgcctcagccctgtcctttcctaagtgttcttcttgctcatctcagaagcctactcagcactactaggtgactgccttctaagtctgaaaactagtgcctcttaacagtgtggacgtattgctggaaatgacctatttggggacacagaaaaatgcctcttttctctggatcaacattctgaaccagaccagagaatagtaggaaagagcaggatggctgggaattgcttagttgacccttgggaaagattgtacaccataatgaactaacttcagtttcctgatttgaaaaactatgaaggtgtcaagcattatgaatgtccactggataagtaatctatcagtgtttgtttattcattcaattcattcaatacctgggattttaaaggtagattttgagctcttttcactttgaaaccaccaccttcatccagggtctctaaatcgaccctcatcgaaatccatcagccagagattcactgattcattcaattaaaatgttttaggtgcctatcactttgaagatgctgggcacctgttagagagattaggagaggttgacctaatcttgaagaggggtgagtgggaggtggctcagtgaatatgaaggctgtttagagatttgaagaatgagtagaagtgaattaggtaaagaaagtggtaagaaggaaaacattccgggcaaagagtacaacatttacaaagagccagcagacaagctggttttgtaggtgcagaatttttggacaatatttcaagaaactcatgagagtgtgttttacaggtatgtaggtttgtgtgtgtgcacatgtgtgcatgtgtgtcttaatttggcatcattatgcactgtccacactccataatactaggttatagtcaaaatttggcttggccttatgtgtcctgtggcttaatcatgttccactgatatatattatttgcttacacagaacagacttttgctgtgtaggtcagctttgggaggcaaagctgccaatctgaatctttctcctcacaaagacttcactggatagaaaccacaaagcaatgtttaaaacaagcaaagtgtgctaaaacaaagagtgatgtctgcacaattgtgtccaacaaaataactataaagaaaaaaattaagattcaggaaaatctagacaggctcaatgattacaacagtagaaagaacatacattttgaggtcagaaccacctgggtgtaaatctcaccttcacctccctcatgtgtgaccctgaacaaagtagcttcactcagctgggcctttttttttaatccgtaaaacggggtaatgacacctgcttcacaggtcaatttaggagtagagatgatttgtgaacaacacctggcacatattggcgttaaataagtggtagctactattatggttattaatatcaaattaaaatcaaacattaatatctaatttgctggatttaaaacatggaaccacagatttcatttacagcttcctgatagccacagcacaacaggaaagtcacatatttttcctgaataaaagcataaaaattccttaaggaaagacaagattatctgggaccttatgcatgaaataatgtttttcctgggttttcattgaggtctcactgagaaacataggagatgatatctttaacatcatccctatggcaaataaatataaattctatgtgcttatttctttttttaatctttcagagtaagccaaagtcataaaaccaaagaacagttgtggggcagagattatttctaattcaactttaaatctgccaaaaaattcttgcatcaatggcatttatggagtagatcatctgttctttcttttcttatattataagcacatatttcactagtgttcttgaagcactatctgttagttaagcctctcagtaattcttcaaggtttgtggtataatgcccactctacagatgaagaaacaggttcacagtccaaggttagtcaccacactagcaagtggggaaaccaggacttaaatcaagatccatttgactgacttgactctactcttaccatctaccccagcctaccaccttaacaaatgtagctaagctctgttttcccctgatgggaaaataagggttttgtataaaaatagaaagaaggaaaattaaactgggggctctaggtgtaaaattgttttattactaagacatcgagaacgaatgttttgtaaacgcgttttctgggaaagatgttttaatctttttgttgttgttttggtttattccaaaccatttaactaaaatgacatagataaaaagcatattaagaaacacatttaacaaaatcatggcactacaatatacataccaaattgcatgggtggctctgattttgaattctgtgccttcaaaacccagcagaaataaatgaacatgtttatattaacaaggataacgcaaatctgtaatctgtaatttaaacatatttctatatttaataagtcatgttaactcacattcagtaaacacacagtaaactcacatttaaaatatcttcccagtaaatttagttttcattttttctacatgattctggaaaagcatataataaattagtcatagtctgtatataaaagtcaaatgattagtaccttcaaagggagtggtacccctgaatcataaaaggagtttcacttaggatgatgaccttaatatttgctttcaacatttttttcacccaaaagaatgatgatgatgatgatgatggtgataatgatgatgactatcattttaaagaactgagaagggtgtacaattttactccactgagcttcctaaatgctggcagatgacacgaaactcctgtgaaagtgacaaaggactgtcctactcacagcacagcagagggcatgtgctttctgttggcacccatttcccctgttccccaagtcctggggggtaatttggaggagcccaggcagatcccacaaacagtgtgggtctatgtgacagctaaggaaccctgagcttaggaaagcccaatcttataaggtactgctagcaaacctgctcaggagagaaacattatccttattatcctagtcaggaaacaaatcttccctctgccctgcagagaagctctatctctactttccaagactgtttgacatgtaaatatccttgaaaggacagccaagaatgaaagtggtcaaagaaatgtagaaatatcatggataatcactttccaactgtgatggtggtggtggtggtaacagtggctaacatttattgagctcccatttcccaggcataatcaagccctttgcatacataatctcattcaaccccattataaaccccaaattatacagtttgtctacacttatacattaaaaatagctgaggctcagagaggttaagcaactgccccagggtcacatacacagaaactggaagagccaacacttgagtgcaggttgatttgactctagaatttgtgcctgtaatcctaacattatcttgctgcttgacaaaatgtatttagacctgaatgtattccatagaggaaacaagttatttaaaaatagagataaatttaggatcagtctgtgaaggtataatttttctcaccaagatatcaaggaagagtgtttcataggtgaacttgttgagcaagtaggtgacagagccgatttgaatctaggtagtctgcctccagagttagagcacaccaacaggctacatggctaacactggacagaggcaccctcggctacaaaagccagaatctagagttagctctgaaccagtaaccccctcatttgggtcttaacccttttgtttaagaaatgcacagttcctcagagcacccaagtaaagtgctgtcaacagtggtggacaatctgtgaagcacagtctgtgaagcattactcttctcctggagaacatgggcaagttaggcacacatgacacacatatgctgtctagaggagggtcaccacaacagggtgctagaggatgaccatcaggtaaagcttggacaagcagctctatagggtaatactaggaatggctgctgaagttcatgccaaaatatctgctgatgtctagagagactcatggcagtgggttctccatcagtacttgggagcttctgttgctttaagagccaatacaggtcattcattctttactcaacaatttcttaatgaatgtctcctatatgtgagatccttgttcataatctggtatgaatactgacaagcctgttactgggatacaaagtgaaacattgtgtaaagaagctatgtggaaagattaatgagaggaagcaggaaaaagtacctaacacatcctagggatattgagggaagcttcacaggggtaacatttgggctgaactttaaaagatgagtagaaaattcatctccctgtttgtattagtattctctagagggacagaactaataggatagatgtgaatctgaaggggagtttattaaggattattgactcacacaatcacaaggtgaagtcctacaataggccatctgcaagctgaggagaaaggaagccagtccaagtcccaaaaacctcaaaagtagataagccaacagtgcaggcttcactggtgtaagcccaagagtccaaaagctgaataatttagagtctgatgttcaagagcaggaagcatacagcttcctgctggaaggaggatgaaggctggaagattcagcaaatcaagtccttccacgttcttctgcctgctttatcttagccacactggcagctgattagatggtgcccacccagattaaggatgggtctgtctctcccagtcgactgactccagtgttaatctcctttggcaccaccctcacagacacacccaggagcaatccaatcaagttgacactcagtattagccatcacattgtttatctgcttcattgcgtttatctcagtctggaatgtttatttaatgcttacttgtatattgtctgtctgccatgtctttcatactcacttttgtatccacagctccaaatgtagtgcctagaacacagcagatgctcagtatttgttgaacgaatgaatgaatgaatgtcaaacattaagttttgcatttattagttttcatggtcgtttctaaaaaatatatatgttacatttttcagtctcaaaagatttttttgttatagattactttcaggaaaccttttatttttctttttttctttttttaacttttcagttcaggggtgcaagtgcaggtttgttacataggtaagcttgtgtcctgggggtcagttacacagattattttatctcctaggtatgaagcctagtacccgttagttatttttcctgatcctctctctcctcccacctttcaccctccaacaggccccattgtgtgttgttcttctctatgtgtccatgtgttctcatcatttagctcccacttataagtgagaacatgtggtgtttggttttctgctcctgcattcgtttgctaaggctaatggcctccagctccatccatgtctctgcaaaggacatgatcaggaaaccttttaaatttgcctttctggaaatatctatcttctctatcaaacaggagatgaagtggagtgagagttgattggataattcgttcattattcattaaatattttatgggcgtctactgcatgcaaagtgctgggaggggagcagtcacacagaaggcaagacttgatctctacccatgaggaaaccaaacaccgtcacaggacacaatttatgggccccctatataagaaagaacaaaacaaagaaatgtaactgccattcctcaagaaaagaatggggttaaagggctatttcatggacactccctgaggaaaaaaaacaaaaaacaaaaaccatacagtaactcaaactgattttccaggagaaaacttttgggttggataatacaggttaactctgtgcattaatttctccagactgtctcaatgcatctcacttctctttttctcttagaataaaggaaaaaatatgcagttggtaaaattgtaaatataagcatgcttacagttttaagaaaaataaggacttaagcttcgcaatattctagcatttatttaattagtaggtgattactaaatactaaattatgggaagcagtgttttcatagcaatgatttgtttacccaaagaatttctgtcacacattttttgattccaacatttcctacaattattcaatttttttcctctctgcagcgctaaaacacacattttattaagtagtctggcttatctgcaaatatgctgatcctgaatggttataaaatatttatgcaggtcatttaagttgaatcagaaatggtttccaatcagagtgaaatcatctcttagtttaagcaaatgatgcccatataaataagagttgcaattatgcccatgcctagactctctctgctataggccttctccagaaaaatttttaatgtctttttaagacatcatttgtcttcttatgtaactccttcacggatttcatcatcctttttcttaacttgaccaggtgcaaattgctgccattcatgagctcaagaaaaggaagttgtaagcatgcttcttaaaaattcaaataagccacagcatggtagcttgtgactgtggtccaaactactccagaggctaaggcaggagtatcacttgagcccaagatctctgggctgtagtgcactatgccagttggtgtctgtgctgaatccagcatcaatgtggttatctcctgctagcagggaccaccaggttgcctaaggagggatgaattgacccagatcagaaacagaacaggtcaaactcttatgctgttcataatggaactgcacctgtgaatagccactgcactccagcctgggcaatgtagtgagaccctgtctcttacgaaaaaatccaatgacataataccttcattttcctgaataaaaccttcatagctcctggttcttacaggatcaaattcaagctttttagcacatgattcaagactttccatgacctggcccatgccatcccttcctcacacttaaacatctaacatttaatcatgtagagtgtccccaccatcatgatttctgtacccctgttgatgttgttccctccacctggaatatggtcccagtcttctctactctgttacctcccattgatccttcagcaatcagctcctttttcatgtcttgcaggaggccttcccctactatccaagtctggttaggagcccttctgtggtccataataccagtagtagacagaaggttctgtggaaatcatctgtccacatgtggcttgcccaagagactcaaagttcttcaagggccagaatgtgttttattcctctttgacctccaatgtctggcactttgtgggcactcaatgaatatttattgagtgaatgaatgaatgagggcctatgaagaagaacctgaaacagaaagttggtaaagcgagatggaccttaaaaatacaagccttagtaaacaagaacggtctgaagaatccagctaatgtaaggagaagcaaatttatgtatttgttgatttaatgtttattgagtgtcacatgctaagatagaatgtgcagtgacgaacaagaaaaacaagggccctacctcatggagcttacatctagggcatatgctaacaagagtatttttttaatggtaagtactctggggaaatagaaaatgtgagggtgatgaaagggttgtagtggaagagatttagattaggaagagcaagcctcttagagatggtgatttcaaaaatgataccagaagggtgaggttttgccaagagctggtgggagagtattctagtgtgtgcaaaggccctgcagtgagacaagagatcaagattttgaggaagaggaagtctattcgtatatagagatctttaattatatggccattttccgtcaagagagatggagagtctgagttcttaggaagatgtcagtaaacatgagtggcttgtgggtagctctgagaccaaaagcactcagcagcctgcagagaaaggccccctgagaacccatagcgctctggcaaagagacagtgatctgaatgagagcccgccacaggataattactggcatccacattctccaaactgatgtgcaagacaagggagaaattagatttttaaaaattctttacctagactactgagaccagaatattcatcaggaagagctcttgcatttttttttttttttttttttttttaccaccttgcgtctgtcttgtaaacatgaacaacagattctctagcccacagaaacgtatccgcggggccctcccatccttagggaaaaaagatgatggaatgagggacattagcaatagtttttgttatagttttcattaccatctaccataaatacaataacaagaatagctaatatttactgattatgattatttactaaatacctgtaactatatcaaacatcttatgcagaatggtttacatgtgggctctggagtctggcctcctgagttcgaacactacctgctccacttaccagctctgttgtttttctgcaagttactaaatatatgtgtatttatatcctcatctgtatagtggagacagggagcagataactgcacatcctgtggaccactgtgaggagtaactagggaatatacaaaaagtgcttaaaggagcagttcatacatgctgatgtaaatacaagcttccatcactacttacttaattattataacaaatgtatctagttgacacagttgttatccgcattctacacacagggaaacttcagaggctttatatcatgtgccaaggtttcatggttagtagtcactggcagagctgggaactgaacccagactgattttagagcccaagctgttactcatcattccatcatattttttatttaaattagagttatcgctggattccactagtccatttattcacatgtgtatcttggcagattttgagtgtatattttatttgcttgttcatttgagagggtgagggataattgagttggaagcccaaggatctttagttttgcctggacttcttggctctaggacaccccagggagttccacagaccccaacaacaaattggatgttaattggaactctttctcttctagggattttccacagtgttatctgtaatttataacaatgattttgaggaacaaaatcatcaaacaaatatgcatgcacgcacacatgtgcacgcacgtacacacacgcacgtgcgcacacacacattcataccatatgctcaggatggtttcaatttttaaaaaaattgtatgtgaaagtccatgaatctaactattagctctcttaaaaaacagattaattaccctccaaaagtaagcccatccctaatcaatatgagataactggttttctgtagctggggtcaggatgagtcagaggaaagaacccagttacttggtacagtcattttccagcagtggtttatatcaaaaggtccacattctggtttaactgtgatgcggcaaaatgagaaatgatgcttaatggagtgatctgctgcacatattagctcaaatgctgaacgtcttcctccaaactcttctataatttttaattcaattcatggataaatttggtcaacagcaccgctgaaactgattgtgtataattcaggtctgttttggattcctttgaagaagacccagttacaaagaataccaaaaggaccatattttaaataaatagtgatgccacattctacaccatattaaattttgtttgttaatgtttcacaagcattataaatacttgttgtcacttggcattcataagttcttgcagcatttggtctgaaagctgagcaaagtaggggtagtactaatttgtgaagaaaagtacttccaaacacttcttatgctgacaagttttaggcagttttttaaacggtcattcattactgtagttttcccattttacagatgaagatattaaggtacagaaaagatttaaaatgtgctgctaggtggcagaactgggcttctgatccaagtagtctgactgcagaatccatccttaaaccttctcccaaaactaagttatcaataaatatttgttagctgtgtgcagtgacttatgcctgtaatcccagtactttgggaagttaaggtaggaggatcacctgaggccaggagtttgaggccagcctgagaaacatagtgagaccctgtccctacaaaaaataaaaaacaaattgccaagcatgatggcatgcatttgtagtgctagctacttgggaagctaatgcagggggattgtttgagcctaggagttcaaggttgtagtgagctatgattttgccactgcactccagcctaggtgacagagtgtgactttgtctctaaaaaataaaaaataagttttttaagtaaattaattataatgcgagctttcattcagaaaatataccaagatcctgtggcagaggacatgacatttaaaagttaaacaaggctgggcacaatggctcatatctgtaatcccaacactgtgggaggctgaggcgggagcattacctgagcccaggagtttgagactagcctggcaacttagtaagaccctgtctctacaaaataatttaaaaattagccaggcatgggggtgcatgcctgtagtccaagctgctcaggaggctaaggtgagaggatcacttgagcctgagaggtcaaggtcaaggttgcagtgagctgtgatcacaccattgcactccagcctgggcaacagagcaagaccctatctcaaaaaaaaaaaaaaagttaaacaccttcattagtcacatgaattgactctcttttgacattttatataatgaacaatatgtccgtactgaagtgttttatcttcctacatgctgatattgattagagtggtgcattcttggagaatgaagccacataagattcagcatcttttcagcatgggctgtagttaatacccacatgttccacaaaggtccaggtggtttaaggatgtgaatctcctgcagcttcattataagagccttgataagtaaaacaacagcaaaatgacaatttattgggtacatgctatatgccaggcatgtgctaagcacttaaagtacattatctaatttaatcttcacaaactgtttctgtttaaaggatggggaaacagagaggtaaactatcttgcttaacgtgacacatttaggaaagggcattgccagaacagtttgaaaggtaattatctgccatgctgtactgcatagtgcacattcctatatcttttccgttttcctgccgtgacttatccggtgcctggtgccatgagcagatactggtacctgctgacttattgagagatcatttggttgcttgattgactgatgcaatgaaatggaaagttgagcaattttctctagagcaatgcttctcatacatgagttttcatatgaatcaacctggagatcttgttaaaatgcagattctgattcagtaggttacaatagggaatgagattctgcatttctaacaattctgcatttctagtaattcccagataatgctgatgctgctggtccatgagacatattctatatagcaaggctgtaacctgagctgcacaatatggtagtcactagccacaggtagctatttcaattaattgaaattaaattcagttcttcattcacactagtcatattgcaagcactaactaaccacatgtagctattgtctaccatattgtacagtgcagatatagagcacttctaccattccaaaaagtcccattgcactatactgctatagaatattcagtgtgtataggaaaagaatctgctttaagattcccagttacattcatatctcatttaatggacctggaattttgtctcccctcttgttttgtcctagtcatatgtaagtcacttgaacatttgatgggaaacagaaatattgcacaaagaatactgataaatacgtatttttttttttacttaggagccaacacatgtgcttgaggataaaaaaaaaagtcaccatttttaaaataacacagaattatcatgacggtaacaaaagcatcagaactttattgaaaatattctaattagactcagaaaatatatgagggtgtatctgcaaatagacactctctggtccctttgaatcacaatgtgacttttctccatgtgtagctttgttaagagctggacttccatgaatgcccaaaggtctagaagccatagtcgttgtcaatagagcaaggaaaataacttttgatcattgacaatatccttaaaaatcactttttccaatcctttcattttatagatgggtaaaggaaggctcaaacaggagatgtaatctgaagttcttggtagttagaactggtcctaggtgcaaaatgatatttgctgaactagtatgaatctagttctgtgactccccactgtactatttgcctctaaatgacagtaatcactgaaatatagcactgtttacttccatttcttatactctttcaaaatatatatggagacattagattcagaaacaaatatacatggagacataagattcagaacaaatggtctggaatagaaatgaatagggctacaatatttataaagtaatttctcttgtatcagtagtacttattcatcataggaatttagaaaaaacaaataaaaatgcataaaatgtaaatcacccacaatccagttattcagagatactactataaagttggtgattatgtagccttcttattttttctgtgtccataatttataaaaatatatgttgcatactctttatgaacattttcctgcatcatttcataaaattctaaatcatttctagtgtctgaagtattatttcattatatgataatatcaaaaatcacatattttaaagaattttaagccttctgatgaaaatttgcaaattttcctccaaaaagcttgtattcatgtacctaaaagacaatatataaaagtaaactccctgagagcatggactatggctatttttttcaaggctctatttcacagagtttagaataggaccaaacacatagtgggccctcaataaaagtttgttgaagggagtgagagcaggaaaaactatgttaagggcttggctgagagcctagcacataataaggcttgatacacgttaattataattattactttctttggagttattattcacattctcactgcactgcaatattttgataggtttatttgaaactgtgtctaagaataaacataaaacttctgaaagactccagctactccctttgttttctcatatggattacttctgttgttgaatatctctggaacgtgttcagtgtgaagctggcttctgcacccctcccagcttctttgccagcctattggtaaaacttcttccttgctgtcaattgatagttactgagtctcaaagaacaacatactggggcaaagtagcctgagcaaaatactgttaaatttatgaaaaacaaggaaaatgctaacaggcctgccattttcaataaaatgctttaagtgtgctgattagactcacatactcctactccccttttggggtgactatataatgggtttattaagaacattggctttaggttggaacttggagtcttactccattctggctgtgtgactttggatatgttcctcagtctccttaagtcttggtttcctcacttgtaatagcagtgcttatttctcagtattgtcaagaagaacccccaggatagtacatataaagctcttggcaccaactctagctcagatagtggccattgatactagaacttcataaacaccagtgattgagaatgaatatgtgtcagttttatgttgccacagttctgctcagtgctttgaaccaccacaatctggccaataaaatcaatcattcagaaactaatatctgctctcagcaaaagtcagggagaacatatttttgtgatcattgaatgaatgtcttcgaaatcaccagcattgaatatggagccagattaatattggagcctcaactctgtttcctatttgcagtcctacttaagacgagtcacaggtaccctaagcccttagtacttcaaatttaaagttcagtggagtttatttttaaaatcctcttggaaaaatatatgggcaaaatcctgctttccttcataaggagagatttattttgcccatatttgttagctctctggtagagtacaaaaagaggggcaagacagcagtttattcaaacagaagtcaactgattgaaaatacactaataattccattatttaagaaagaccctgtctgcaggaaatccctaccaacaaggaatatcatcacatcaaaagctaaaacaggactaaagtacacatacaatagctttgcaaattttacaaatacagctgtgtcgggtcccaagatcattctgatacgtcttcaaaacacatggattgaaggcgtggatcttgtttaagatcatttaagaccttatttacgatcttgtttaagatctagacattgagaagtgtgtagctttccatgggtcaccgacttcgtggtgaagtgcgtgcttttctcaacctcttcttaactcagttggtttttatctgagaaaacctagggattcagccacacaagcagaactctagaggaaattgaagtaacaatacgtatggttataagtacttggcgtatgtcctgcccgatttcttccaagaccctcttatttttcattcatgcactttgtaaataattaagggaggtatctaatgagaaaaggtattgcattcactgcctgtccttcagttatttcagatttaactgtgtggtgtgttcatatcacatcattcaagcgggccttgagggacatctgacctagttgagcagctgtacctttaataaaactgccaaaataagtatgacattttttatacaactgtgagaaacacattaaagacacattgaagattacttatattttattattatatttagaacatgaatgactgtgactagacagcttgatttcatgatgaggatgatgatgacaaggatgagggcaatgataatgattatcgtaatagtacctaacattttggcatacttaccatgtgccaaagacagagctacaacatcacatattatctcatttaatctttataatagtcatgcagttactattagtatacttgtcttacagacaaactgaggcttagacaagccaagctattgtccaaagttcacaatagattcaaaattcaaacttaagcagtctgattccaaaatgaagacccttaatcactatatccatggtttccaagctattttgaacacacatcctatcagtaaaacattttgaggataccctcttctttgtactcatttattaataattagtattatgctaatatactatggaaaatatagataaaagtgtacatttaaaagggcgagtcatagataaaataatgttttggttgtatttatcaatggtatgataaatacattgatttatttatgttttcactcatgaaaataaagtaaaataatattttaatcaaaaatatgcttgaatatgcttcagtatttttgaaaatttttgtttcacgctttctgaattagtaacttaaaggaaaagttctggggcttttggttttttgcatgtgtgtgtgagacaggatcttgctctgtcacccaggctggagtgcagtggtgcgatcttggctcactacaacctccgcctcctggactcaagtgatcctcctgcctcagcctcccacgtaggtgggaccacaggtgcatgcaaccatgcccggctaattttttatatttttggtagagacaggttttcgccatattgctcagactagtctctaactccggagatcaagcgatcctcctgcctcagcctcccaaagtgttgagattacagacatgagccactatgcccggcttgaggttttttaaaaaaatacttgatcataactgaaaaagatgcctcagaaatatccttagattcaaatgaaagacaggcattgcttggctgcaccaagatatctgtgtttcaattctacccaccaactactccaggattttttaaaaatctgctagcaaattgctgtcttttctagtgtcgatctcttgttattattcaataaatgtttcatctttacatttttttgaaaatttctttaaaacttactaaaattcttagttcaaaacctctgagagcagattaattaagtttataagatgatttacaatactttaggaagatgtttgtgtgtgtgtgtgcacatgtgcatgtgtgtgtgtttggtagggacaggttctcactctgtcacccaggctgaagtgcagtggcatgatcatagctcactttaacctcgaactcctgagttcaagctcttatcctactttagcctcctacttcagtagctgggactacaggcatgtgacaccatacctagctaatgtatttatttttttagagatagggtcttgctatgttgccctggctgctcttgaactcctgaccttaagcaatctccctgcctcagcctcccaaaatgctggaattaccattagagatttttataagcatgtcaaatatatgggtacatcctcacatcacacactagaagagtcatttccaaaaagagtttctacttttaaattgctttctgcataacatcctttttttcactgattaacaagaaaataactttatttttatttatttttattttattttgagcagagtcttgctctgtcccccaggctggaatgcagtggcacaatctcggctcactgcaacctctgcctcccacgttcaagcgattcttgtgcctcagcctcctgagtagctgggaatacaggcatgcaccaccatgcccagctaatttttgtatttttagtagagacggggtttcaccacgatggccagtctggttttgaactcctggcctcaaatgatccgcctgtctcagcctcccaaaatgctggaattacaggcttgagtcaccattcctggccctttttttttttttttctttttgaaaagagtttttctttgtgtcctagatgcttggttttttatgtcttactaattatgatggtttcaagctatcattagctaacatctcaagacacagtatgcacaggtcatggttcagtgttgataaagatccatatatcaaatatttttcctatttgcactgggaaaggctgatcttgagagatttgaagaactcatctgttgtaacctcctaatatggccagtgagaaataagcagtgttgattctgccattttgctactcactgtgcttactttcttatcatcagcttactcaccttgagcaggtatgggagcagggaagctgatgggtctttaacagtatcacattacattctttcagtcttgggaatgaccagagatctcaccattatgtactgggtgagtaatgcagttctataagaaggttactttggtatcaacaacaacaacaaaaacgatggatggcaaagcaaggctcaaggtgtatgacattcaaaaagcagcttttcaaaatgtttgcagtgtggcacaaacaaatgaaactctcacagtgctaggaggttgagatgaaacatgatcatggtgggaaagttacattgctataaatagacctggtcactggcattccctgcctttgaccccgccaccactcccaccagagttatatcactcactaacttttaaaaacactctaaattatgaaaatatcaaacatatatacatataaacaggtagagaggttagtttaactaaccctcttgtacccatcatccaacttgttaatgatcacttcatggttaatctctttcatgtgtgctccctatgctcctgaaatgaattattttaaagcatgttccaggcataacattatatttatagatattataatatgaatctccaaaatataaagatctgtttttcaaacataacccaccgtaccattattacacctgaaaccctaacagtaactctttaatatcctcaaatattcagtcagtttacaacttccttaaagatctcacaaatattttctagttcactcattcaaatcaggttccaaatgagctgcatacattgcaatggattgatatggcccttgtgtatcttttaatctatagaatttctctctccctattttttttttttgtttttgcttgcattctttacttgaagatactagatcatttttcttggagagtttcccacaatgtggattttgctggttacacccgttggtattatttaacatagttctctccattccccataaattggtaataggatccagtgattatcacattaatatttgattcttctacaagaatacttcagaggcagtatttgtacttccatcagtagacacataataaatagttctctctctttggggactgttaatatccatcagtgacaattgcctacatctgttattttattgggagttgcaacagggtgaagagtatcattctatttttcatgtattagctggaaaaagcctataaagagaaaatttttctcatgaattatttatttagtctgagatgcaattcatatggtatgcacaaacacacacaaaaagcttgatacttatgttatcaaaataatgtattggtaccttaacatccttggaaggtgatcatttatatatttggttttatgagtaatgttacgatttaaataatttgacatcacatactgtgtagccattatttttacacattcttaaaccatctatggccagtgagagcctcctttaattggtttctgtgtcctttttaaatagaatcccagcagtctttgatagcttccttaatttccggtaagataagcgtcatcatgtacatttcatgcttaagacaggaaatcagccattgctccaaggaaccctggttaagtttcataggaaatggtattcagaggtcacactctagacatcatttcattttaagctttgctttgttttccatttttgtaatgtaagtgtgcatgtgtgcattcacacgtgtatgcatttgtgtgtatttctctccttctctcagataaataataccatgctatacatgtgtttctccacctcatatttttaaattaacaatatccaatggagttcattctataacagtatctaaagctattctcaactccttttatacttgtacagtacttgagcgtgtggagacaaaattgttatttaaccagtccccagtaacagacatttgctattataagtaatactttaacaaacagtcttacatatatatcttttttaacttgcctcccctaactttataattgtgtctaacaggttaagaaaattgcttaaggtctcacaactaataaatgctgagccggaattcaagtcccacatagttgtctagctccagaccccaggaaccccaatatatatttgctgtctttcaattttcccaggaccgctaacacatcagacctggaattagttcagtgtagaggtactgctaacctgaggctcagattaataaaaataagaaatagtcttggtttaccattacttgataaatacagagttttaggaagttgtctttcagaacttgggtctgtagaaggaaacaatagcagttcttagtggttcaaaaaaaaaaaaaagttgaggtgcaccattcccacctgtgcttgaaactagagtttgccgtttactaggaaacagagagaacacacatcactgacattgcttgcccaggtctcagactgatgacttaggtcacctttgtgcgagtaaagccacacatttttagcgtttgttttctttttggaaccataacaattttctggaggaatgtaagatgctatattaaaaaatgctagactaggccaggtgcaatggctcacgcctgtaatcccagcactttcggaagctgaggcaggtggataacctgaggtcaggagtttgagaccagcctggccaacatggcaaaaccccatctctactaaaaatacaaaaattagccaggcatggtggcgggcacctgtaatcccagctacttgagaggctaaggtaggagaatcgtttgaacccaggaggcagaggttgcagtgagatgagatcgggtcactgcactccagcctgggcaacagagcaagactccgtctcaaaaaaaaaaaaaaaagaaagaaatgctacactatatgcaaaactcctaaaatcccatgcttatgcaccaaagataattttcgaggccacttttctctgatccagggtttagcccccatgtaatctaatatttctgctctttcaatgctgtacatctttttagagaaagaaatgtgaccatcattcatggccaaatctgactcatgaagccattttgccctttggtgtcttcatgaaaaaatgtgagtccaaatttacctcttttaatgacacattaagtaaagtgttgggcgtgaactcatgtcatccattgggcctcatgatcgtcaactagaatggtagctccaaaagggcaagatcgtttgctttttaaattattactgacttttcaatgcctagaacagtgcttggcacatagtgatgcttaataaatagttgaacaggtgggtggatgtgtgcatgagtggctcgctggctggctggctggatggatgaattaggccttctgaaatttgaacagtaagtcctgatgttaaactttagagaggcttcattaatgcccaccttgtacaaaaattaccagaagggggaaatgtcttttttcccccctggtatttcttttctgtctcccacctttgaatatcttctcctttccacatatgtttttaaccaacattccagaatgatgcgtctgtccttccaaaccttcaccaaaaatccagatctctcaggagagcagatgtcaactgagtgtggtaaagggagacattaggaaatgagtgactagaaattgatatttagcttttcatagaagcttcttagaactcaaaagtctcagtcaaattgtgagggctctggggaccaaatacaaatgaagaatttcagtgaagcgaaggctgtaaggcctgctgtggtcctttatttttatttttattttttcataatcaaagagacaagcttccaaaggtggtctttgaggtgcaaagacttggaatgtgcagcttttgtatctcccctaccatcttgccgtctgcttggctttgagtactggcttccatggggcgtctcagatcacctcagctgccatgtgcccccacacacaatcgtgggtgtgttctcgctcccaggattagttttctctctagccctttggcccctcccaacagaacgtaacttgctcttttcagaatacttgtcccacattgctcccctgtccatttctgcttctggagtcttggctgcccatgctgggagtcacgtgtgtcattgtcccttctctgctgatgtgtcagaggcccaggaggctgattcagcgtatctactcttctctgggcttcacacccaacttcaaatccacttactctttgaaaggagaggtttgaaaggaggagtgacttttgtatttctaaatgggagtgtatccatggagtatgcattctgacatggcctcaagttcttcctgctagtagattcactgctcttatatttggcagcagccaactcagctgctaaagggctggtggctttgtctgctgtatgccttcagggtagcaaacattcctgagagagattgtggagtctgccctaggacaagtctcctggttatgttttatgtgaatatagcagtacgtgtcctcttaccccagaaaaacacacctcctgcaacacaagtttggttgcttatctgagtatatctcattcatattagcagacagaatcacagataatgaagcaaattgtaccctaatagtatcagccctaatagtatctttttaaaaaataaatgtacgagtcctaagatatagataacgactaacatttattggatagcactttactgccaagccctatgataagtcccttatatattgtcaaagtatatttttcacaaagttaaaaacatgactcatataaatatctaatgagctgttatcaaagatttatttaactgattaatgaaggaactagcaagatggaaaagctggttcaaagagcaataaatgatgagagatttttataggcagccagcaaaggaatggaaaaataagtttgctgagttatattcaaaattggttaatgttcattagatcaataatgctataatttgggggatcatcttttttccactagacagaaatcatttgcaacttatcagtattctacaagttaatgaatgtctagcttcatagagtctggacctaatcagtagaaaaaagtaattcaaacaaacttaagagtttttctggagaatgagaggacctcattctccaagcttgttacacaatgctcttcatcacaaactaggtgacacatttatcttttatttttattttcaagtttaatttataattttatttatttttttgaaatgtgtctctgtcacccaggctggagttcagtggtgctgtcataggtcactgcagcctcaagcttctgggctcaaacaattctcccatctcagcctccgaagtagctgggaccacagtcatgcaccactatgcctggctaattttttgaaaaagttttgaggtatgggatcttgctatgttgcccaggctgtattttcaagttttagatcatttttctatttggaaaatacccctgaggccaggcacagtggctcacgcctgtaatcccagcattttgggaggccaaggtggaaacattgcctgagcccaggagtttgagaccagcctggaagaaaaaaaaaccctatgaaataaagtaccataaactctatgtacaaggggctgtggtagccactagccctcagttcaatgatgaatcccttctaaacaagcaaatactctcaatgatgagaaactgcatcaaatgacaacctaattcatttttaaagagttccaaataacagaactttatccttatgttatccctaaatctgcttcactgtaccatctactgtctcccagtttagtcttctaaaactgcattgaaaaatctagtttccttctcactgaatgccactgacattgtgttgaggagcttcgtggaggttggccaggtaacctacatcttccttggaccttaggctggaaaactggtcacaactgtagatgttattgatcagaatggggctttggtcggtggaccttgcactcaggtaaggagacagcctatgcctttaaaatgcatgcagctcactgatttcatcctcaagtttccacacagtgcccagcagaattatgtcccataagcctggcagagggcagacaatacaaaatgggcagccacatgatgggccaagaagattgaagccagagaagggaaagccaagatggcagattttgatcattttaaagtcatgaaggcaaaatgaggaacagaataatcaagaatgaaattaagaagcttcaaaaggcagctctcctgaaagtgtctcccaaaaaagcacctgctattaagagtgctgctgctaaagttccagaaaaaaagatgaccactgcgggaaagaaggctgcaacccagaagtttcctgcccagaaagcaaaaggccagaaggcagtacctcctttggaagctcagaagggtcaaaacactccagcccaaaaagcaccagctccaaaggcatctagcaagaaagcataagaggttattataatcccagcactttgggggccgaggtaggcggatcacctgaggtcagaagtttgagacgaggctggccaacatggcgaaaccccatctctactaaaaatataaacattagccaggcatggtggcatgtgcttgtaatcccagctactcaagaggctgagacagaattgcttgaacccggcaggtggaggttgcagtgagctgagatcgtgccactgggtgacagagcaagactccatcttaaaaaaaaaaaaagtaaatgttctttctggaaaagaaaaatctagtttccatttcacatgcagttacagaatatttaactcatactaaagagaataggaaatacctttcatcctttataaaaatataccatagttgagttcgttcagcaagtgtttcttgcaatggctcttaactttggcttatgtcagaaatgctcgtgaagtttctaaacttgtacatacctgggtttctattcccagccattctgagtgagtgggtctgtggtgggtgtataggcatcaatattttctgtaagcttcatgggtaatgctgatgcaagacagacattaaagttcatgctgtatatcaatcatataataaataccaagagtcagggatgagggagttcagactaaagaggtatcattcagaggctggaaggagccatcagagagaagtgatctgaagtagcattttaatagacaaataagattttgccaagtgaagaaagtgaagggaaaatgcagaaaggcttttaaatagcattaatagcttaaaaatgcatcagcggagttactaaaaaatagacttactaaaaaatgaaatttgaacaattgttaactaaccacagggacaatgatctcgacatttcttgcaacaaaatattataaggggaaaaaggagctatctccaaagtgattgcagtagtattccatggagtatccccatgtgtttaccaatacgtgaaatatatagtttgtccattgataagacaagtggcgtcactcaacctgaggaaagttcaacctctccactgcttccaaaaggaaccaaagctatttctctgtcagatggagcaagagtcattaaatcactgatgcctttaaattatcaataatataaagtcacagagggagaatcgagccaatgataaatagcattgtaataagccagaactcatttgtgagtggagaaaagtctctgaaacctcagtacaattcagccggctcatattgccgtaagacatgagatgatgaaactcagaaatactgatggctttttactctttcctgcttctgaatatcaggacaggcttgagtgatagaattttctgttcttccctgggcatgcttaggcctgcatcatgtgtgctgctgtattcggatccctttgtagaaggtctccatgtgcacatgtgtgtgtctctttaactaatacactttattttttagaggagttttaggtttataaaaaaattgagcagaaaatacagaagagttcccgtatactccgtatccccctacctccaacagtttcccccatcattcacatcttgcattagcatgctctatttgttacagttgatgagccaatacagatacattattattaactaaagttcctagtttgcattagggtgtgcacttgtgtttttcatatttcctaatttcagatcaccttcactctttgtcctgttttttctctctgctattctggatcctgaatggcgattgttagaacaaccagccaaggtctccacattcctccacatcccccagcagcctgaaaagcgactgccaatcacttgtaccttctctctctattcatgctgacaggataatgttcttatctaaatcaatttcagtgaagctcatggtcacagtttgtgaatgttacattagcgtcacatataacctgtacatagactgcattcagatattttcagctttttctctggaaataattgctactgatgagttcactattaaaccttataagacccaagatggtgtgtggtgatttagtgatttcatatgttgctgtgctagtattttaatctgagctccagccaaatggaacaatctgtcgtttcatttttaatagttgtgactttgtttttggactcctctgttgtgcatactcacacagccgcccctaatccttgttttttgagtcggcagggtctagattgtaactgacaaaagagattcttgctgtgtcctccaagaaggtcccacagtttctcatcttgtctttcctcacccattttgtaccctcaacctggaatgccctcctcatctctctctcgccttttctccctacggccttcctcttttcccagctatccctgcctctgcaaactgagattctagatactattcagggccctcctctcttcaaatatcacagcaagcctgaaacattctcctgattctatgctaacccccagaactcattcctattccctgattctgcatgcttttgttgttgttgttgttgttgttttgagatggagtctctctctgttgtccatgctggagtgcagtggcgcaatctccactcactgcaagctccgcctcccgggttcacgccattctcctgcctcagcctcccaagtagctgagactacaggcgcccgccaccatgcccggctaattttttgtatttttagtagagacggggtttcaccgtgttagccaggatggtcttgatctcctgacctcgtgatccgcctgcttcggcccgccgaagtgctgggattacaggcatgagccaccgtgcccggccaattctgcatgttcttaaaccatgtcactctcctatgcaaaacatttcaatgctttcccaccattctttgaattaaagcccaactcttcagtttggcatgcaagcccctgtactgtgttctgttctctgcctattatattctcatgctatattctccaagactataccctagcactctcctcctgactactaccttgctggtagtagattcactactagcagattcattgattcactacagcagtggttctggaagcatagtccacatgaccctggaagtctgcaaggtgattttcctagtaatgccaagacattatatgcttttttctcactatgttaacattatcaataatgatgcaaaagcaatgatgaggaagactgctggtactttcgcacaaaccaaggcagtggtgccaaactgtactagtaatcattatatctgtcatggccatgtacttcctgcttaaaaacggccaacttcacggaatactttccttgatgaaaccatagaaagtgttaattttattaaatgttgatccttgggcacacacctttttaatattctatacagtgaaatggtaactatgcataaagcactcaggcagcacgaggaaggacaacagttgtctcatgggaagggacttgtctgattgagttgccaacttaacaaggctttttaaaaaatggaatatcatttttacttggaaaaacaatcaacagacaaatgtaggtatttcatagatgttttctagaaagtaaatggagggagcctgttacttcaagaaaaacaactgacaatattttttgctaataataaaatttgagatttcaatcaccaccataatctggacagtttcttaatacctaaagatttttttgatatcagtggcaatattaagtcatatgattttttatgtattgtgtgatgaaatgtgtgaacatttggaaaattaacataactcactgaattcatttttgatatgaccaatgtatgatttttaaaaaataaaaccacttacgggccaggcgcagtggctaatgcctgtaatcccagcactctcagaggccgaggcaggcagattgtttgaggccaggagtttgaaaccagcctggccaacatggtgaaaacccatctctactaaaaaaaaaaaatacaaaaatacaaaaattggctgggcttggtggtgcatgcctgtaatcccagctacttgggaggctaaagtatgagaatcgcttgaacctgggaggcagaggttgcagtgagccaagatcacacctatgcactccagcctgagtgacagagtgagagactctgtctcaaaaacaaaacaaaacaaaaattaaaaaaaaaacacttatgggtaaaagattcattcaaatagcaagacagatcaatgggttttaatgtaattgagtataaaaagctcactgacatggtgtctgattttacagtgcatctaactttcaagaaaataccaccacttgggctttggtatagtatcaggaagactatcccatttgtctgaaaaggctattacaatatctctcagttttccaacaacctatctgtaggaggccagattctcttcatatacttcaaccaaaacggcatttcacaacagattgaatgcagaaaaagaaatgaggatctaactgtcctctactcatctctaaaagatatttcttcactattattttgttttggaaaatattattttcataaaagggtattatttcagtttaacatatgatgggtttgttatttttaatgagttaatattttaaactcctcagttttagtatcactatagtatttgttaatagctgtaaaacaacttacataaacaaaacctccttgcagtcctcagtgatttttaagaggggaaagagacttgacattaaaaagtatgagaatgatggcaactagccaactaactcttaatgagatctttggctctagaagtccttatttgaccacatgccagaagaatccatgtgagtactgcctgagtacctccaagttggaaaagtacgtttttttttttaactgagtgcctccaagttggaaaaatgttctttttttttaatgttatcgggttcaagggtggaacatttgtcctactaaagaacaccttttaagagctttgtggccggaagggtgaaaagtagacctccttctccttctcttcttttcgtcccctttgatccttttcctcttctcttttgatcttcaatccaatctttagccccaactcaccttctagatgcatttttcctatttttttcctcttctgctagataattgttggttgggacaatcccatcttaatcaatgttcaaattatgtctccatgttcatttccctgtaggtcatagaactctttgttagagtatcatgtggccaatttataggtctttattctttctcttctgcccaaaaatagatctttaggaatagcatgctgattggtctattattaaataattttaaaattgacctcattttttaaaagtagtaattaacttatattcagctgctaccctaaattttttaaaaatgagcaagaattgttatatatagaagaattttacattttttctaaagaaacactttgtaaaatgtggtagaggtatgcaagaggatagaacatatctaatttaacaatagctactacataaaactacataaagcttatggttttggatattattgcttagaagaaagtgatttgatgtaagtttaatgcaaaaacaaaaagtaaatagtacagttagtacatggggaggacatactcatgggagtattacttaaataattgaattattatttgagtagttgaattttgggaaaccatgttccaaagggaagtctaggataacagcctcatcgtaattctccccaccttcaatatgtttttcccccttcaacttgcatttcagaattactcatttatattttgccgtgataaagtctgtcagattttttcttcaagctaaataaaagtcacttaaaatgcctttttcagagtatgttacataaatatacatatataatataaaaggtgagaagaactttatgtaaataagtaaatatttggttaagatgatgtgatttctaaattttctaaaagcaggacttcctttagagtagaaaatatttagtctggttgtagaaagggcatattttatttattaataaaattcatggcccaatataaatttttgaagtcttcaaaaaaaagaaattaaataaacattgccctaatctctctagattagctgatgatttttaaacacttgttgagttgactttttttccagttatctataataaagaaaagctttaaaaacctgtcccttttttcccagataatgatttcttttttaaaaagaaaaagcatggcttatattaaaaattgcaatatacaatgctgacattatactttaagtagaaaaggacctaatttatgtgtataactggaacatctctatacacccaaagatatttttctactcactgctgcctatgcttagaatgctgctatttgaggttccttcttttacaataagcattgcttctcccttctttctgatacagttgctgttgcaataggacacatattaaccaataagcatcttagtaagtatgccttcttccatgactattgtaaaccaagtgtatccattaggaatgcatctggctgccagtaagagaaaacatacagtgacttgaacaagtagaaatatatttattttttctcacataatgaaaaaaccagagatgggtgtttacaaacatttgttcagccacccaaaaaatgtaaggaccacatttctgcgatgctcttagcctttcctggatggtcatgagatagataccatggctatagacaatagatttgtattctcagcagaagaaggggcagcaggaaagaaaaggattataccaccaagtatgttcattttcatgaggatttcgaatatttctccagaagatgcccccagtagttttctgcatctgttacatggccacccataatagcaagcgaaactgggaagggagtaattggctttccagcctctaaactagaagggccaagaaagaatgaggtaaggaataccacatcagtgataccttcaaaaggctgagtaaataaaaaaagcattgaaagaagataaaagataaatgatagggaaaaaaataatacttcctgtattgtttttattattgagtccttactctatgccagatactatgctatatattattacatgtattataaatatatatattatacgtatattatcccacctagttttcacaaagactctgtaaagtagatattgctttcccctatttacagaggaaaaacccaaaaccagttacttgaccaaggtctcatagcaaagctagcatgtgacttgagcttgctctgacttcagcattgcctctcctgagaccgacacttagaacatgccgttttctcctcactgcagatcacatttcacacttctccagaatgcttcagtaaattacaaactgcctgaaatgcagtgggaattttcaggccttggttaatgaggtagacggaaccaagaatgcttgaatagttctagcaaacgctgctgcagcactgtcttctacaataatcaccttccatcttttcaggttttctgcttggaattcattactgcaattctgaattctgaccttgatgtacaagtggtttctatgcatattaaatgcttttagatggacttctattttaggaggattctctctctaagcggctcatcaaagcccatttgtttgtttagagttgtactgtcagctactctgggccaattatttcagtttattcgtgcaaggtcaccttttgggttcaatcctatataagtcagttaacttttaaccagatacaaactctgtcccacagttgattcttagactggcttttgcaagcttctaagtaagattttcattcactcatgcagttggcaaagggtgttaagaagtcaaagatgagtatgcgatttctgactcaattgtgagaaattcgagagctaagattgtgccttgatactgttatatcgccagagcctaacactgtgcctggtatacattaagcccttaataggctcatgtattcactcagcaaacattcgttgagagctcactgtgtgcacagcagcaaatgagacatatgtgtatagctataaacaagaagtacaacagtaaacaagacagatatggtccttgtacttgtgaaacatatattcttgtagagagatagataatgaaaagtaggtataattttaaaataaagaaggccctaatatgcatcataggaaaatggataaattgtggtatacctgtaaaatgggatactacccagcagtgagaagggaccagctattgctactcctaaccacagggatgaatctcatcatgtatgatcgtattgacaccaagttcaaaaacaggcaacactcatctgtgataatagaagtcaggctggtggtcacttttggagggagcaatgactttgggaatatccaggagcttctggggtctgggtaatgttgtttatcttgatacgaaagtttgttatctggaaaagtttagtttgtgagaatctcttataccgattgggcatgacggctcacgcttataatcccagcactttgggaggccaaggcaggtggatcacttgaggccaggagttcaagaccagcctgatcaacatggcaaaaccccatctttactaaaaatacaaaaattagctgggcgtgctggtgcttgcctgtaatcccagctactcaggaggctgagacaggagaatcacttgaacctaggaggcggagtttgcagtgggctgacatggcaccactgcactccagcctgggcaacagagcaagactctgtctcaaaaaacaaacaaacaaacaaaaaaggaattcctcatattctgtgctgataaagtatatttttctgggtacatgttataattaaataattttaccttagagaagataagggctaactgtgataatgactgtgcaggaaatgctcaggttgcagggcactgtgacagagattatctgggagaactttactgtagatggaatggtcagggaagagcttcccaggagatgctggcttggctgaatcctaaggggccaaccatggggaaaaccagaagagcatccctggtaaagggaacagcaagagcaaaggctctcaggcaagaaaagtcggggcacagctgagaagtaaaaaagacaccagtgtgctggagaccagagtaagtaaagagcaaagtggagcaagtcaaagtcagggtacgtcatgcagagccttggagcccattgagtttatcatttggctcttttatgccaggccatgtgctaagatcttgaggtatgttaccccatttccttttcatctttttagcaactttgggaagtcagttttatcatccaaattttttaatgaggaaccaaggcttagggaaagtaggttgcctaaggtcatgcagcctggaagtgagtggtatcaccaggacttgaacctgtgtctcttggaccccaagcctgtgcgctcaactcctgactcatgattctgcccctgagcacttgagtttaaataaataactacttcgccacataaaacatgcacccataggactgtgaacaaaatgctgagaaaacagcgacctccacctggggagtctggaagggagcacatgcactaaatttaaagatgtgtacatgtgaaatgtccccagaggcaggcattctcaagggaatagtatgtgcaaacactcaaagatgagaattagggtggccacagtggttcacgcctgtaattccagcactttgggaggccgaggcaggtggatcacctgaagtcaggagttcgagaccagcctggccaacatggtgaaacctcatctctactaaaaatacaaaaattagccagctgtagaggcacacacccatagtcccagctacttgggaagctgaggcacgagaatcacttgaacccaggaggtggaggttgcagtgagccgagatcacaccactgcactccagcctgggcaacagtgagactctgtttttttgtttgttttaaaaaaaaaaaaagatgagaattaatcatcacagtagctaagatgtattgagcattcatcctgtgctaagttctgcagtgagtattttgcttatcttaatcctcacaacaaccctatgaggtcagtattggccccattttacaaatgagaaaactgagctttagagaggttagtcatttgcccagggagacatggctagtgagttgagtaaataaacactaggcttgttgaattagcggtgagaaaagtagtgaattgtaaaccagtaggtggcaaaacccagacataagcaaagttctgccgctgaagtccatgcccccaactctccttctgagagcttaatgtgactaggaaagcaagggatgctttgtgtggctttgcggtgtgtgttctctgaacttgattaaaattaatgttcctgaagttccttagctcctttctcctttgagagttttatattctgtaatttctcttctctgaaatcctgaatcataatttaatgtgcttttttgtttgccttttcctctccacctagactataagatccctgaagaaaagcccttatttcttttgattccttagtgcccagccctaagaagtaacaggtgagatcaggggttgagtgtgttgaccactgaacccgtagtgtctggtgcagggctgggcagagtgtgggtgatctataaatatttcttaactaaatgagcaccatgcttatttaaggaaaggttagacagataatagatttggcctgggtcaacaatcaatcttgatcattcatatggtatgtgcataattttatttcaattaatcatttaagacaaaagcgaggtctataggcctccattcctctcctgccccatcatcccaccccactcccaaaatcacgcaaagctggtattcacactgttttagaaggaattctgagcaagaaatcctgtgagatgccttggttggtcctatactgttaggatttgtgaactagattaaagctggcctgcttaaaataaatgtatgttacgggtatcatttttatgagcaaatcaactgctacctaatatttcagttcaaatggtttcaagcacataaaaaataactgtgattttctcttcaatttcacatatcaatatgtgctctgctccatgggtcagagcaggaaagcttaagcaacttagaagtgagtttattccatgctttaggtctgaactggtccagtgcaatagccactagccacatgtggctgttgaactcctgcagtttggttactctgaattgagatatgttgtacgggtaaactacaccagattccaaaggcatagcattttttaaacgtaaactgtctcattaataatttaaatactgattacatgttgaaacgttattttggctatattgggttaagtaaagtatatcaaaattcatttcacttgtttctatttttttaatgtggctactataaaacttaaaattatacatgtggctaacattgaatagtggtgccctagaatgtaacaaatatgagtctgataaatttctaaccccttttaatctacccttgacttcactattccccaacttcttccaaagatacaaaaattaatgaaagcacccagcttccatctgtgtcacaaacaaaattctgttttgtttttgtttcttgactgagtcaaaactcatgctggctttgtgtctcctaaagctttaaactttattttctaattatattgactctaacagtaaaatcacttggatttatataaaaacttttaattttttaaaagaactcgttatgttattgaatagctataactatcccaggacaatgggtaattagaattaccaccattttccaagtgagaaaactaaggacgagataaaatttatttaaacccagccctgatccagaaaggctggctcttcactctcaggtcaatgcagaatataagtcgctttttccagatgacacagtggccaacagaactgctactggactggtcttactttttccactagaacagtggttcacagaggtagtttctcatgatctattataaagcataactttttacaaaaagtttaacttttcacaaaaatttaacttttttaagttaaaagtttttaacttttaaaacagcaaagttttggctgacttgttaatatacatattttatataaattagaaccaatgaaaagatacctgaaaataacatgtcttgcatacactccattcattcattcatgtaatcagccctgagtgtctggcacatataaggcagttagctatgccctgggaaaacttcgatgaataagatagcaagaaaagacaccgcatgtaacaaatttaatcatcatcaagcagttaaacaaacactgtgctgtggaatcacatagcaggaagacctgcccctaacctaggggctgggaaggacttcataaattagtgctgcctgcattgatacctgatggatggcatgatagagccagataaggggtgaggaggaagaatgagtaggaatcttttaggaaagttttcctaagaaagaaaggtgggattgataggcaaggaattgtacataacctagtacccaaattctctatgccacatcccagaagtatatcctgtacccaaacatcatctgtcatgtgatcatggatgtaccaacaacaataaagtttgaaaacccctgcatatggtcatactgcattcatcaaggtatttcagaccaccagaggggcatgtgcagtgctgtgtttgctgttacatgtttaacaaccatttctcaggaggggaaaaaaaaactgttttgtagcatttgccaatttccatggtctaaatattcccaccttggctgacatgaagctgccactgagacaacactgaatgtggagctgggaagagatgggtggtagcactcccttatatagaatttccctcatgcaaataccataggtgtaagtaacctcaaaagcactgatgaaagtgaaatgtggtaaaataactaggaggcaatgaattttaagtattaaaagtgtattaactttgtttttaatataatttatttatatattattttaaaataatggctgtgtttaacactggctcacagaagtttccacagattcactaatcagctgtcacacacctatacaagccagctccaatacaccaatgggtctggcatcttcagcataaagtatccatgatccttgtctaggacaagttctcacatttccctctttttctgtttcttacagatcagcaaacagcagctgcagacagtcaaggaccggtttcaggctttcctcaatggggaaacccagatcatggctgacgaagccttcatgaacgctgtgcagagttactatgaggtgagaatcactgttcagaagaatgccaagaccactcaagccctatgcctggggagtctgagctgcagggcaatggggacagtcgttttggtttactacagtatcatccttcctaaggcaaatgggttggtgattcgttacaatgttaagaaataacagtattttgttttagggaaaactaaatgtaagctactatttaacaacggaattttataccaggcaatatactgagtgtttttcatacaacatataacagtcttatgaattaggtctgattgtatttccattttactgatgaagaggctgaggctcagataggttaaattaattactcaaggtcacacagctatgaaaaatcacaacctgtgactttgagtcaggagcatttttctcaccacttacaccattttaaaaggatgttagcacctcccaaggatggtggcttcatgaacttccttattctttttttaaaaatgctgctttcttttctggagctggaaccactgtccaaaatgcagtgctgttctctagagaaaatctacaaaagagagaatatgttctgagtatgtattacaggtaaattttcaccaccagacctcagaagcttatcagtaaagtggatttgtatttctgcaaatatttttaaattttgttaagtgttctatctcagtgtgcatattggctattatttctacatgattatgaagtggacatgccataccttcctattggcaatgctttcctcatatgcacattttcaaatatgattatttggtcactgagtgacattttactttatattaatctattttaatgtgaaccaggtaaatactctctgtgtttggaatcctatgccccaaatgtcttatgcattgtcaaggttagatgacaaccattagagaccagctcctaggcactgaaagcttatgatatgctgctatatacaattcacagtaataatggtaaacttgaagataggtataagaaaaatgtaacaaaatctgattttcccctgggattgtttcattgatttccttccttccttgtttcctttatttattagatagaaaattatttcaaaacaaaaatgttggtgtgcctgctttgctggtgctctaagcacgtacttagtctgcccatctgattcagcccacaacagatgctttcaatatgttaattgattgaagcctcggtagaggcaaaatcctgatatggcaaaactcttcttcccacttgctaaagcacttgactccttccttcatggagagagtaagactgcaattagatcttgtgaaaatattattgattggtttgctaattagcatttaatagtaaacaatctttgtgatgttcgctgggaccaaccacagactccttttacaccattttcttcaagaaatttttatttggatctattttagaagtcaaatttgtttttatagttgtccaaatttaaatcttttaaaattttacaagtatcattcattatcgccaatgagtgtcaaacttgctgctttatcttatgtggtacagttttttggctgaatttcatggggagtagaaatgagatttggaatcacagtgatatatgatagtgaataacttgaatatatttaactaaggttttgtttagaaactgcctgggaatgaaattaattttccctctttgttcaagttctggaagccaatgggagagtaatggcagaacccttgtcaggccaagcagacccctatccatagttctccatatttagagtcattcaccagagtttataaatttataggttgcaaatcttaattagaaagctcatttgactaatggcataaattaaaagaaagtgtcatttctatctattaattaaatgtgaaaattaatagtcatcaaggtgctaatgagtctctggaaattaccattacatctacagtgatcccaatgttttcctctgtagtggctagtttattggaaacagtttcattttttgtctggtaagaatacaggcattgagaaattactgaatatttaatgttagcatttgagtaacataagaaaggatgtggggtattaatgatctaactgctgtcttcattagtaaatactttggagagtcttagattcacttttccagggaagtctaatcctctaaagtgaagtttctgtatcaggagatcagggttaacactttacttgggagctctccaagttgattacaccttcctttctcctttccccttcatccttgggctatggagaagctgatgtctcttcctgtacccaactctgggttccaattgcttctctgttggcccctgtcttagtcaggactctatggattataagtgaccgatacctaggtcatactggataaccctaaaaaagagatttatttcctcaattaacttaaaagtccaggagtaggcctggcttcagccatggctggatccagaggctccaaagttaccagcgggatgggtatcttccccccacctctcgactgtactcatccctgtgttgacttccttcttggtcagcttctctccatgtggaagaccttgacagccccagggcacatcctaccagtttagcacctccaggagcaaagagaacacccctgctgagctccctagcaaagacatggggtgactttgttggactgacatggatcatatgtcccttcttgagtcagtcacagtggatgggggtgaaatagactggggggttaaggcttaggacagccaccatctctggcacctgagtacaggctcagctgcactggaaccattttcaggaagaatgtaatggtttcttaataaaccgttaggctgctttttaccaaaacggggaatatatgctcagcagacaaaaccaacagatatcctccttccaaattccctctctttcacattcacacacactccaccctaccatgccacaacttcacactccagtttaccaacagcaataacgttaaaaaatagtgtaacagcaataatctcaaaatgttctgggatttctgtactttaaaaagtcagttttagatatcggtcttgttttgctaatgcatatattcattactcagtatccgcagagcattagttccagggcttcctcaaatacaaaatcctcagacgctcaagtccctgatataaaatagcatagtgtttgcatataacctatgcacatcctcccatataccttttttttttttttttttttgagtccgggtttcctttctgttacccaggctggagtgcagtcatataatcacagctcactgcagcctcaacctccctggctaaagtgatcctccctcctcagcctcccatatagttggactgcaggtgcatgccaccatgccagactaatttttgtattttttgtagagagagggttttgctatgttgcccaggctgctcttgaactcctgggctcaagtgatccacccgcattggccccccaaaatgctgggattaccagcatgagccaccacacctggccttctcccatatacattaaatcatctctagattactcataaaaactaatacaatgtaaatgttatgttaattgttgtcatactatattggttttatttatattactttttattgttatttcttattttttatattttgtatctgtagttggctgaatgcatgaatgtggaacctgtggatacagagggccaactgctgaattgatctctcagcatgctagagtagtaaagatcatcttttaataaatgaaaggagagaggaggtgctattccttttccatctgtgcccatccagcccagtctgaaccaagctagtcaccattaacaacaagttggtgaggcctgggccatgagtggggatgggagaaaggagaccaaggtccccatggttctcaagagcacacaggtttatttttgtcctttcctgatggccctgattgtcagagcggatcaagcagggcaacagattaatccattaatctcttcaattctggctttcagggccaagggctgggggctgggatgggtgctctgagatctggcccagcaattctgtctggttctcacacccctggtcctgagatatggcatcagagagccatttctctgtgttcctcacaccttttctaactatttttaagaaaaatgtccaaaatataagccctcccttgctctctccctccctcctcacactcacctcctcatgctcacctcctcacctccctgcttgattttagtttcttcacatgctggtcctggcatcagagaaaataggtggataaaaaagttttacaaaactcaaattcttcctggaagtgaacatgggggtatttgcaagaaaatgggagtgtcatatgtggcagaagacataaaaattcatttcagaacactgcatctgatgtctgaacttcagccagtgaagctcctataattgagctttgtttggggtgtgtgagtgttgtttttttgttgttgttgttatttttttgtttgtttgtattgttttggttttgttttttaataaatgcctagttcatttttgtcacactagctttgaatgttgcaacagacagacttctttagttgctagcaacagaaaccgactgtgattaaattaagccctaatcatcatcatcatcataacaacagcagaagcaacaacaacaacaatagtttgctgttgttgccagtattgttgttgttatcagaagaaacagctaagcttcagaaaagaaggaaaccagaccagtttaacttcaggaagccagatagtaagatataacagacacttaataattgggataaacctactctagcccagtccattctcatgccaacccactcggaatgtgaactcaagaagtggcagtcttactgaccaagctcagatcccaacccaccacttggctaaagaaggacaaagtcctacaattgacaatcccactgcaactatgtaatgagaaaggggttcttggaagaaagactgaggtactattatcagaagaggaagaacagttggcaggctaaaactgcaggtttcatctatgcaagaagacgtttagttattatggttgaactttttttatttaagaggagtataaatcaggtcacactggctatttttctaaaatgaagcaatatattttctaataagtagaatggctacaactattccatggtacctgagataccatgataaacaggtacatccataggggaagaataactacccactctaaagcattgattcttgcagggaaagcccagcaaggaggaggcaggaggtggcaggcagagtgattaagaggatgagtttagtgtccaaggccaggtgcagttcacatctgtaatcccagtactttatgaggctgaggaacctcagcctcttggggccagaggttcaaggctgcagtgagctgcaccactgcactccagcctgggtgacagaatgagaccctgtctctaaataaattaaaaataaaaattgtgtccgacagaggtgggttgagttctagtcctgttacacactgactctgggacctcagctatgtctgagccttagttgcttcatctttaataggaccttccttgcctaattgctctcaagactaaatgagaatatatatacctggacagttccattattaatatattaaggttagaatatattaatatattaaggttagaaatgagcatggtggtatggtgtccatatgctgcatagaaatagaagaagagagttgaaagttgatagaatcaattcactccctgggcatggaggaagggaggtgcaagatggagcaggggaaaagggcatagaaaagaaaagggaaagtacttttgctcctaatctagcaccacctaccacaaggtcatggcccaagatctgcttctgaaactttgcccagaatcctttactttttggtgaagaagatttttaagatttgaaaatacattttattttagaaatgaaaatgcaccttgcctcaaagaaggtaaaatttgtatttttccaggtagaaaagatgtgtttcaaatgaccgtgaaagtaaaacatgcccactataaaaataaaacagacaatgtagaaaaatctctgcatttacatggttaaaaaatacttgcaatcccatcatcctagataaccaaaattaaactttggtttctatctttccaggtactttcaatgtatctatgcatgtcaagataactatttggcttgcatattaaggtgggaaattaccacaaactattaaggacccacttcttttatttaacacagttgttttcagtctccttcctacctttccaaaggtcacacaaatggcatactctcatcagtaaactgtcttatttcctatggtattctaaatccagagccatgttcctatcctccaatcccacctcacccctgccattggaaggctctggtccattataaccatatatcatggacatctttggatggtaatgaaaaaatatatatcttttttcatggctgcatgatattctatttaaaaataacagctaacttgtattacattcttagccgaatagtaggcaacaggctaaccaacttgcaggcataatatcactgaatcaggattcagggatcaccaaaatcctacaaaggaaggttgttataactcccatcttaaaggtgaggaaattaaagcccaggaagattaagtaacttgctcaggtggcaaagctagcaagcaacagagccaggatttgaacccaggtgttctaataccagggcccatcctcctaaccatgatgtctacccctttcattatttatgtgcccatttattaatagcaacgaggtgtgtgtttcttgcaaaccttacttactccaacatctagatgtttttcttatttatattgaaaggatatgctttttcagaacaggaatgaatctgctgtggcttctcagcttatcagctagcaaatgggagctaggccaacctcatctgtaatgtgaacagtcactaagtactgatgtgtttgtatgtttctaaaatgaccttgaggttgcttggctctggtgatggagggaaggactgatggatgaggtcgagttgctgaattgactgtccttcacaattccatatttatttgtttatcttccatctctcattatgacctgtctggaagttggcagaaaagcagggaggatttatggatgtgcccagatagaactgggcttggggttaaagtctcttgtggcagccactaaaaagcaaaaacagaaacaaacacggatacaaaatacagacagagctcccagcacaattgagtttgaatagttgttttagagacacacaggcacatcagtacttagtgtttgtattcattatagggtgaggctggcccaggccccacttcctctttgtcagactgagaagccaagacagatgatgtgcctgtagaaatagtttcctgctgccaccttctctcctcatggctgtcttgtctccattgggcaattcatctttactgtctccccagtctttggcctctttcctccatgttcttatcattccactcatctctcctctttctgggatctggcagttgtatcttaacacaggacagatagatccctccacttttcaaagtcttctcagtttgatcctcagcaaagaagaaaggctggattccttcattgtttaccatgaaggagagtgagactgatggaggttaggtgacttgtcttccactggtaattcagaagtatttattgagtagctactatgtacaaaggaaggggctagtgaagcagatgctatgcccaggattcagggttcacctgatatggtttggctttgtccccactcaaatctcatcttgaattgtagctcccataattcccacgtgtcatgggggtacccagtgagaggtaattgaatcatgggagcaggtctttcccatgctgttctcttgatagtgaataagtctcaagatatctgatggttttataaaggcgagttcccatgcacatgctctcttgcctgctgccatgccacataagacgtgcctttgctcctcccttgacttccaccatgattgtgaggcctccccagccatgtggaactgtgaatccattaaatctctttccttcacaaattacccagtcttgggtatgtctttattagctgcgtgagaacagactaatacatcactcaaccagttacaccagctgggacccaagtgccaacatctttatttcttaccccttgttatcaggccccatggaaaatctagcctaagtctcttgttttaagagaccaatataccgtgtgctggtttcccgttgaccttctcgccccaatccagacatagtctcgctccatatttttcctgctagaggagtctgctttgctcttatagttcattcactcattccacaaatatttactgagcaccagctacatgccaggcactgtctcaggcactaagaagcagtaatagaaacaaacaacgactaccctgcctccctggaacttatagtctagctggagatcagatatttaccaaacagtcacaaaaacagtggcagatggcagctgtggaagggctttaggaaaaaagaatctggggctgagagcttataactgaggcccatttcgggtttgtgggatactaatgtgcatagatgtagaggagaatatagcttcattgttgattgaatgttttcaagtcaccccttatgtttattagcactgacaacaaaggcttaaccccttagtgtccccactgccatcacactcacccggtctcgtacaagcacctctcaactggcctccctgcctattttcttggctcccttcatcagtctcttttccacattaaagccaaagaatgtgaactggtttgtgccgtgtcccagcttaaaactttcaatggctttccaatgcccttaaaatgaagaccaacaaccctaatcccctcctcctcctgaatacctcctccttctcaatgcctccctggactctctggcccctccctgcccatcttacatctgtcacccccagccctcattgccacagccacactgactcctccttatttcttcaggcacttggggtcttcacacgtattgttccttctctctaaaataaattacagctctccattcacctatccatctttcatgcatcatctcaaaggtgttttctttcaggaaggctttcttgaccacatattagaatagattcctagctataggttcttgtggacccttgtcttgatagcacttgttccagatcgtaatcatatttgcatggcattattaggattatgtcagttggactccatgagagctaaatctgtgtcttcctcaccgttgtattcctgacacctggtacagtgtcttccacctagagagtaaccaaagaaaggatgaatgggttcatggaaaagtttataatcattacagttaaaaggatagccccaaaccttattgttcaattcctttggtgtatggataagaaattggagaatcaggccaggcatggtggctcacgcctgtaatcccaactctttgggaagcccaggcgggtgtatcacttgaggtcaggaattggagaccagcctggcctacatggagaaaccccgtcactactactaaaaacataataatgatacaaaaattagctggggatggtggcagatgcctgtaatcccatctacttgggagtctgaggcaggagaatcgcttgaacccaggaggcagaggttgagtgagccaagatcgcaccactgtacttcagcctgggcaacaaagtgagattctgtctcaaaaaaaaaaaaaagaaaaagaaaaagaaattagagaatcagagaggggagatgatttactcaaggtcacacagcaagttagaggcagacctggcctgagatcatgagttacagctcctgccacaatgctccattgcctttccagagacttcctccactagcctcaaaacactggtatttgagatctataatgtgttggttagatggagaaaccatccccattaagtgttacaggtttgcagatgaattatttagctcattaaggctcataaggcctgaggattcatttgaaactattttgtctataattaattttcaaattaactctaaggtctcatctgagtaccagttcccactcataaggaagcaggccatggcctctaccctgtgaggcaaaccctcagccatcctttctaaattagttcattaaagtcaacaataaaccggagcctttttaaaaaaaaacatctctccaccccagaaacgctttgtgatgaagcatgaggcaatgagatgcccccaggcagtgctgtctcatggccaacaagtgcatttcctgaaatctgacaggggaatgaacatttgctctgcctcttgaaggatatttatgcaccttctgaagtgtgaccaggacgcagctcaaacgtgtcagatgcttcctctccgtgaatatgaagcggcggcttcactgccttgtattacaccccagaaccatgtagctcatgtaagcttccgaatggtgggcagtggagcaaaaataagactttcttaatagaagaagtcttggtcccaggactcaaccaggtagcaccagcagaccaaccagggattttccaccaggggggagaggttttcatcaagcaggagaaccctgcagggaaggaaggaacccgggtgaagtaaaaagactacccattggtagtcagacaatttgagctaccaaaaggaagtcccttcccctctctgaagtctcagtttttcatctacaaaataaacttaacctaacacctatattcattgttaattcacttttaaagtgtcaggtgctgaagacattctaggacctgaagacattgtgaggaacaagaaggacacgttccttgcccaagtagagtttacatttcaggaaggaagagagaaaattaaatatatgtttacctgatacttgtatactttcaattaaaagtatcattgaagggataaaaggaggtacaaatagtggttaatgtttaatgctatgtgcctgatatcatgccaggcactttacatataataataataacagcaacaagtgtaacatgggccaggcactattttatgtgtgttttacacattaacacatttaatcctcattttaaaatacatactggcctaggcaacacagcaagaccctgtctctacaaaaagtttaaaaaattatcgaggcatattggcacacacctatagtcccagttacttgaggggctgaggcaggaggatggcttgagcccaggagtttgaggctgcagtgcatcgtgatcactactgaagtctggcttacataacagagcaaagtcctgcctctatttaaaataaaaaattaaattctgggtgcattgactcatgcctgtaatcccagcacttttggaggccgaggtggatgggttgcttgagcccaagagtttgagaccagcctgggcaacatggtgaaaccctgtatgtaccaaaaatacaaaataaataaataaataaataaatagccaggtgtggtggcatgcacttagtcccagctactcaggaggctgaagctggaggtcgcttgagcctgggaggtggaggttacagtgagctgtgattgtcactatagtccagcctaggtgacagagcaagactatctcaaaaagaaattaaacattaaataaatactattatccccattttataaatggaaacactgaggtacaaagaggttaacttgcccaaagtcccacagccactaaggggcagagaacctatgcagcccgggcacaggtctgtataccatgtgctgcctctcatgatagtatcatctcatttaatccttgcaccaacctggtaagtacaattgttattctcatcttacagatgtggacacagaagcagaatgtgtaagagactactctgagtttgcacagccaggaggtggtggggcagggtgagacccacagtggttcctcctgggatgcacgtgaggtggactggcccagtgtccagccccagggaactggtacctctgtggtaaactctcctactgtctttcctggccttgttcttgctcaggtgttcctgaagagcgaccgtgtggcccgcatggttcagagtggaggctgttccgccaacgactcccgggaggtcttcaagaagcacattgagaagagagtgcgcagcctgcctgagattgacggcctcagcaaggagactgtgctgagctcctggatggccaaatttgatgccatctaccgtggagaagaggacccgcggaagcagcaggcccggatgacagccagcgcagcctccgagctgattctgagcaaggagcaactctatgagatgttccagaacattcttgggatcaagaagttcgaacatcagctcctttacaatgcctgccaggtaaggtgtttctcgcctgggcctagagctgtgggtaagcagagctgcattccaacttctatgagatacttcttgatttttttaaaaaaaggattaaaacttatattttattactctactggtaaaaagttgaatacagtttaggctggagtatattcatgcttttcttctgatttaaaaaataaataaataaaacatttttatgagcccttaaaagtctcaggggccctaggcattgagctcattgtgtctaatgggtaagttggccctatgagtaaggcttgttttccacgtgtcaaaagtgctaaaaatcaattttttaaaaaatatggttctgcctttggtgtttgccagttgaagggcttgtgcttcctcagctgggaagactactgaacttagcacctgcctgtcaagaataattttttaaaatggaaagcttgcaaaaggcccgatacctgtatattagtcacatcatgaatttctgagtggttctgatggcgagagctgaggctctgcttgggtccaccccaaaatgggcttgtatttcctctagatggaggattagggaagcgaggtatctcatatcttgatatcctgcctaagcttagcattatattcatttattcaacaaatatttattacgtgcctattttgcagtctgaaattcttactggatgtctcttaggagcaatttaaaaatgcacattcccagctgctagccctagagattctcattctgcagcctcagagcatggcccaggaatctgcattttaaacaaggaccttccttcctggtaattatgttgcccttcaccttcaaagaactatcagagagattcatctttgccttgtttgctaatattcccagtatataaaatcttggcacagagtgaatgctcagtaaatgtttatcgaattaataaatggataatggaaaattattttaactagtaggtagggtcttatcaactatgatatatcaccttgaattttctggatgttttagtaagagtctgtttagcatttcataatacaacacatgcatcacattcaaagatattgctggtatctactttcatctcatccaactttaattgaaaacattgattacaaatctggagatgaaaggttttttgtgatgggtcaaaaagtattttgaaatttcacatatcaatataaaattaaatttaatcattattttatttaaaatattactacatcccaccatgtagcagttttagaatgggataagcaggtggcgttagcctccaccaccactatcacctccaccagcatttccaccacaagaaggtgtcatagcttcaatattgaaaaatcatccacctgagttataagcaagattcagaattacagagagagtcaagtgttcctaaaccttctaggtacaaaattattctagggattaatttttcttcttattgcaacagcttatgcatattttctgtgcttgctcaaactcagcttcattggagtgaatccattgttatgccatttcttgtcttatctcagtgtttttgcacttgttgaattgagtggcaggatcatattttactgttttctcctaaaaaatgaattaatccgactcattttaccctcaaaatcttttttgcgaaatagaaaaaagtacagtaatattaaagaatatcttctctctccagaataaagattgtactcttagccaaaaaagaattacaagataggccaggcacggtggctcatgcctgtaatctcagcactttgggaggctaagacgggtggattacctgaggtcaggagttcaagaccagcctggccaacatggtgaaactgtctctactaaaaatacaaaaattagccaggcatgatggaggatgcctgtaatcccagctactagggaggctgaggcaggagaattgcttgaacctgagatcacaccactgcattccaccctgggcaacagaacgagactccatctccaacaaaaaaaaattacaagataaagtacttcttcttgggacagggatacttaagacatttagtattttactctctattcatatctaaatctgattattgtttcagggtttcatatcaatagaaattagggcaaaagaacatatgaaagtaatttatacatacaaaaatacacatgaattctaaatatatggttttttgatttctatgtctttagtaatctaagtttcaggagtgtattggcaaacaaaagtattttaaaagaaagaaaatattggtcatgataatatttcacaacatataatacccatttctatgacaatatagagatggctattctctaaacttactgtggcaataaattcttagtgtagcctttctgcaatctgttagtttgcagcagaaaaccttcataatgggaaaaccttttgacctaggagctctacctttaggaattcattacaagtagatacgcagaagtgtgtgcaagagtgttaagtccaaagatgttcactgcagccttttatatgatagtgaaaaaatggaagcatgcttaattcccagcagtataggattaattaattagattttgatttaaccatacaagggaattttctttatccaatagaacagcaataaaagagttgttaaagaagaaggcttgccatgtgggaaaatgttccttagatattgctaagtggagaatctggctatgaagcacaatatgcaggcacagtcccatttctatgggaacaaaggatggaaaaaggtactggacaggcaaagaacaaaatgttaactgtgcttatctctaaaggataggattatggttgatttttatgattttcatttgtgcttttttatgtctccaaatttctaccttaaacacagttattctgtaaatgaaaacaaataccaaaagtctcaacaaagaaaccatcaaaacaatgggatatgaagaaagttatcttctgaattgttttctagacttcaggcgttaacataccaccttcataatctttgccatttccgagtactacctggatgattatttaatgtttcttattaaactaactctcaaattcacctttttttttttttttttttttttttggagcttaagagtctcactctgtcactcagggtagagtgcagtggcacaagcttagctcactgcaacctccacctcccaggttcaagcaattctcatgcctcagcctcctgagtagctgggattacaggcacgtgccaccatgcctggctaatttttgtatttttagtagaggtgggtttttccatgttggccaggctggtttcaaactctggacctcaggtgacccacccacctcggcctcccaaagtgctgggattataggcatgagccaccgtgcctggccccaagttcactttttaaacctgtctttatcttaggtaatgtacataaaatcacagctttgatatattctttttacaaaaaaataatatgcattaaagtgaaacccaactattaaaatagaaactcttcattggctggccctcttagatcatctcacaccacagtgatgcagaagacacggtggcagtagacagtgccctgacgcactgaggctggtgggacagagctctctgactccatccctgaaaatagcctcagactgaccacagcagctttcatatgaagtctgcataggcaggtagcaaagcagagatttaatttacctccctcctctttccttgctggcaggctgtatgtagacaggcagcaaagatagtatacctgtcatgccttaccatcaggtgtctgaaattatacatttactcactttctggcagactacactcagctctgcacaactcttatcaactcacagtagcaagaatacagaaatgatattgtatcactttcatcctcactctgctgaaattgtttcctgtttaattttgtattttctggaccttcttctccttaccaaacaaagcaatttctaggtgcttcccaaacccaaaatgtgcttaatgttttcctcttacgcatatcgtatcctaggggaagctgtaatctgatttctgctgctgctttgtgaaagttcccatgctctctctttatgaggttctgccagtaactgccatttttatctcaaatgagaaatgacatttatcaaagagcgattatgtcagttacatatcagttatctgttgtaacatgaaccatgtctatcaaaagataagagaaaagcaagagagtttaacaaatgtctctgaatttgcccacggagtttcttaacatctattctgtttgtttgagaattagtggataaatctcatagaagaaattcatactcaacataatatccaaagtaaaatggcaaattttattatgaatcagtgttggttttatttttcatagacccttgggaagatgcagtcaattatgtagctatttgagttgaattctaaaggtaactcaaaaaaagtaaggtaggctgagcacacagctccattccagcactttgggacaccaagatgggaaggtcatgtgagtccaagggttttagaccagcctaggctccatctctacaagaaatttaaaaactagctgggtgtggtggcatgcacccatagtcccagctactcaggaggctgaggtgggaggatcacttgagcctgggaagtcagggctacagtgagccatgatctcaccactgcaccctagcctgggtgacagagtgagactctgtctcaaaaaaaatttttaagtgagataatttgagaataggttttattatctgagaaatgaggctaagacagacctgctttccatcttcatgaaatgcaaagctgacagcgatgatgatgatgacgatatgatatttaaaaacattttcaagatgcaccatctctcccctttccctttagtaaccttcaaatttggcgtaaatttgattctcagttgtaccagctgtctgctactttctactcctctgcttaactttataagttatccttaactatctcattcaaaactgtgcggatattttcccttgaaaaatacctcaaatgtgcattttagaaggagtaaggtctacatcttaatttttttttttttttttttttttttttttgagacggagtctcgcttctcgcccaggctggagtgcagtggcgcaatctcggctcactgcaagctccgcctcccgggttcacgccattctcctgcctcagcctcctgagtagctgggactacaggtgcctgccaccatgcccggctaattttttttttttttttttttttttttttgtaattttagtagagacggggtttcaccgagttagccaggatggatggtctcaatctcctgaccttgtgatccgcccgcctcagcctcccaaagtactgggattacaggtgtaagccgccacgcccggccatcttcatgtatttttaaaggcaaatagactcttcttagtgaagcaatccagctaattttgaagatgtggtgaatatgagctaaggatgtcagttgtatctcgatgtttccattctgctctttgaaaatgccatttctggtttttctcttactgatcacactcttcccttctaaactaagtgcagcatgactctaaacttctccttggccattacatgtgcccaactggcagcagggataacatccacactccaactaataggataagacgataatctgttcatttattctctctgaatttctagaggtttttcagataagtctggaaggaagaagaaagaaatcaggaaacttgatttctcaatttataaacacctttgcattttcaatattggattctctatcattattgaactgctaattttcttaacattcaatttcctttcctccaaaccatcatcagcatggcctttgatgatgtggttatcttattacagcactatcttccttgaacttgatgaacacatggcagcttttcagatagtttattagactctgaagagaaacctcaaattatcaggccttcagctgtgacccagattgctgggttgtatccatacctcattacagagcccttaatctccatataactacatagctttttccttgtccagaagtttccggtaggtctgttgactgaacatttgctttgggggccagactctatttcttcatctcttttcttgatcctgtaacaacaatatagttcttcgcatgagtgatctttcactgaatatctacagaagaaatgttttaaaatctggagatgggaagtagtgacggaaggctaatattaaacccttttatttagaagcatactttcatcattcattcaacagattttagcatctactttgcactaggcatcatgtgttgtatgctgaggatacagcctaaactttcttactttgtcatacaatggcccatgatgtggctcctgactaattgtcctctttgttcactacacacctctcaatgactttatagttgtcctgcttagattattgtttttgttgtcttggccgtgtaacagattgccacaaatttagcagcttaaaagaatgcccacttattatctcaatttttctaggtcagaagtccaggcatgacttagccaggtcgtctgttaagggtctcacaaagctggaattaaggtgctggcgaggctgtgctcacatctggaggctcaacagggaaggatccacttctaagctccttcatgttgttggcaaaactcctttccttgcagctgtagaatctccagatccagcaacagggagagagagagtctctggtgcatcaaattttttatttatagatgcactgttaaaaggatcacctggttgggcacagtggctcacatctgaaatcccaacactttgggaaactgtggagggaggattgcttgaggccagaagttcgagaacagcctgagaaacatagggagactctatctctacaaaacatttaaaaaattagccaggcatggtggcatgtacctgtggtcccagcttacttgaggggccaaggtgggagaatcgcttgagaccaggaggtgaaggctgaagtgagccatgaaaacacccaccactgcactccagcctggctgagagagcgagactctgtctcaatcaatcaatcaatggattgcctgattaagtctggcccatgaagttagtctccctttagattaatttagagtcaactgattaagaattttacatctgtaaaatctcctcattcttgtcatatactattgattagaagtgtatactcttgatagaagttatacactattgattaggttcctcccacactcaagggtgggaccaaagtagggcataactcactgtgggaggcatccaaacattgtttgcccacaggctttcataaggctggctccttcaggtatcattttaaatgtaacctttgtagagaagttctcccttaccattctgcctaaaatgggctcctcagtgtttgctgttttccttcctgaaacaataccctgtttatacagcacttaatgcagtctgaaattgctttgcacacttattttctattattgtctatctcttcttctagatttcattgagcaaagagtgatgtctattgcgttcaccactatacagccaacacttagcacaatgctcagcacaaaatagatgcacaattaaatattgactaaatcagtaaatgcagagtccaaggcagttatggcctcaaggagcttaaatgcccacattacacaaggtgcatgtttggtcatttttttctggttcaacaaagtgcagcagtgtcacaggtcttcagtattcagcctgaattcatctgctggtactcctgttttataatgtggatgttacctgagggtcacagtaatcttccaggcataaactttccttctgaccacactcaatctgtctgttccaagacaaggttgatcaaagagggacagaaattaaccatgtcttttcaaagtcatacactgcccctagaagtcattagatattcaagggactgccagttttaagtgactttgcttgccagatgtaccttaatttcagcaatcttccaatgtgaaaatacatcaatacatatatactggccagatgtagtggctcacgtctgtaatgccagcactttgggagcctgaggagtgtggatcacttgagacgaggagttcaagaccaggctgggcaacatggtgaaatgccgtctctacaaaaaataatacaaaataatttagctgggcgtggtagctcacacttgggaggctgggatgggaggattacttgagcctgggaagccaaggctgcagtgagctgtaattgtgccactgcactccagcctgggtgacagagcaagaccctgtctcaaaaaaaaagaaagcaaaaagatgcatatactcagttactagggacaaatttagaggcattaaagatgtggttggtacagggccagagggcaatatttaatttcccagagccataattttctgaagaccccatcgtggtttttcttacttctctatcacttgtttctagaacacatggccagatatttctatctgactgcacctgctgttaccaagatgctaacagcaatggaaagtagaaattgagagacagtgggtatcctgcatctaaggagcagggaattgggcattttctatgcagccttcaaaactgctatagacatttcagcaatctctttcctttgttgccaaaatggattcataagtatgctcatttattcaaagtcttttcatatgcattgagccacaaaattgtaatcagagatgttaaagaggtatactttcagaaagatacatacaaaaataatattttctgcttttttctaccttttgccaaacaacaaaatctatgataagccatctagcacagccttgcaaatagagatattttactaacctttgaacacgtttcaccagtccagattccccatgctaataatttgaatttttcttcttccaacatgcagcctttttgtttcctcagtgattcagacctaaaattagcagaagcttgggtagtggagtatagtgtattgattaaattttgttgttagccctttgtgtttcaatcctttttttttttgaaaatatgaataaaatacattaattccctttccttgatggctagtgaatgattctacatcattcttttagagtgaactgttagtggaggcttcataatttacgtcctgacctccagtttggacatcaattatacctaccaagtattaaatacttactatgtgccagacagtaagcctaatactttatatgcatcatcaaatttaatcctcataacaagcctttaaagcagacatttgtacctacattttagtaaagaagctaaaaggggggttgtacaatttttttccaaggtcatacagccagtcagcaacaaagcttggatttgaactcaacatttcaagacttcaaagcaagctcctaagtagtcatcttttccatagagaagattttggagattaagtagaaagtttattgatcctgtctagactctaggaaggtggtagatatgtatgtattttgctaagtcttttatgaatctcttttatttggtctgctcttttttcccctaaaatttgttggaggaaaagaaagcttagttgaagactcaattctgtatattggctaagaattattttaatggacgcatctattcaatggagactacttaggtttgtttgcttcgctcatttacgttctattgtagcaatccaagtgtttcctgatttaatttttaaaaacatagttaacaaagccctgcagtcttcagaggatggttgaaggatagggaatgcttgtttttcttatcttgtcatgcttttgtgtgatctggccaattggatgacctgaaaagtgtagctatttcatgttgtttcctagctgggcaaaatttttaaaaagttgttctttggaggaagaacatacaacatcatacataaaattccaaattgcaaagcttttcagttaataaataaactaggagttggtaaatattttaggctttgtgaaccctgtggtctttgtaacaactgcttaattctgtcattgtagcgaaagcagccacatataatacataaggtatatgggcatggctgtgttcttgttaaactttatttacaaaagcaggcagctggcgtatttgactcaagggctgcagtttgttaacccctaaattaaataattatcacatcataacagcaataattatttactttcaaaaaattattccatggatgtaagatgttaccttttccacccaaaagcattcctttttcttaacagcctttccaacatctgttattttttgactttttaataatagccgttatgactcgtgtgagatggtatctcattgtggttttgatttccatttctgtaatgatcggtgatgttgagcttttcttcatatgattgttggctgcatgtatgtcttcttttgagaagtgttcatgtcctttgcctactttttaattgggttgtttgtttcttataaatttgtttaagttccttatagatgcatgatattagaccttgtcagatgcatagtttgcaaaaattctccccattctgtcggttttctgttttctcttttctctgttgatagtttgttttgctatgcagaagctttttagtttaattagatcccatttgtcaatttttgcttttgttgcaattgcttttggtgtcttcatcatgaaatctttgccgtgcctatgtcctgaatggtattgcctaggttgtcttccagggtttttatagttttgagttttatatttaagtctttaatctatcttgagttaatttttgtgtatggtgtaaggaaggtgtccagtttcaatcttctgcatatggctagccagttatcccagcaccatttgttgaatagggaatcctttgccattgcttctttttgtcgggtttgtggaagatcagatatttgtaggtgtaaagtcttatttttgggttctctattctgttccattcatctttgtgtctgtttttctacaagtacaatgctgttttggttactgtagccctgtagtatagtttgaagtcaggtagaatgatgccttcagctttgttctttttttggtaggatttccttggctatccaggctcttttttgattccgtatgaattttttaatatttttttctagttctgtgaaaaatctcaatgatagtttaataggaatagcattgaatctataaattgctttgggcagtatgaccattttaacaatattgattctttctatccatgagcattggatgtttttccatttgtttgtgtcatctctgatttctttgagcagtgatttgtggttctccttgtagagatctttcaccccctagttagctatattcctgggtattttattcttttttgtggcaattgtgaatgggaattctttcctgatttggctgtcaccttcactgttgttgttgtaagaaatgctagtgatttttgcacattgatttttgtatcctgagactttgctgaagttgtttaccagcttaagaaacttctgggctgagactgtgtgggatttatagatataggatcatgtcatctgcaaacagggatagtttgacttcctctcttcctatttggatgctctttttttctttctcttgcttcattgccctggccaagacttccgatacagtgttggatagaagtggcgagagagggcatccttgtcttgtactggttttcaaggggaatgcctccagcttttgcctgttcagtatgatgttggctgtgggtttgtcatagacagctcttattattttgaggtatgttccttcaatacctagtttattgagagtttttaacatgaatggatgttggattttattaaaagccttttctgcatctattgagatagtcatgtggtttttgcctttaattctgcttatgtgatgaatcacatttatcgatttgtatatgttgaaccaaacttgcatcccaggttgaagtcctacttgatcataatggattagctttttgatgtgctgctggactcagtttgccagtattttgctgaggattttacatcaacgttcatcaagaaaattggcctgaagttttctttttttgctacatctctgctaggttttggtgtcaagatgatgctggccttataaaatcagttaggcaggagtccctcctcctcaattttttggaatagtttcagtagaaatggtaccagctcttccttgtacagctgggatagtacccatttaataaggtggttggtgctagttattattagctaccattaattaatcaaattctcacatcttaagaaagttcctttctaatgaataatgaagtatagggtgggctggttctctggaatcagttattgcaacaattcatcaaattgtgccagggaacaatctgaagaagtgccttcaataagtatacaatgcaatttgaaggaataaaatccatccacaataaattctaactgttaaaaagtcaatatgtaaaatagtagacaattgtaatatatagtggcagtgtgaatccaggcttagctatttattatcgatgtaacctttagcaagttaattaacttttctataaaacagatattaataactatcagatagaaataaggtatgtaaggagcccatcacatgataggaactcagtaaatgatagcctgggttggtgatggtagttagtggcatggtgataggggtagtagggggcatggcagagtggtataagtttcaacagctggagcactttagagctatcagataacaatggggtttgattggtcagctgctgcttcacagagaaggtattaggtgagctgggtttgaatgatgaagaaattgtttaggctgagtaaagagagatgatctgagatgtctggtatcttcttttacccaattatagaccaaagtagagacaaatttgtatcataagtgtaatgtggttgaatgaaataattgcctcaattctttgctactgtgtattaaaattaaacaccctaccatggctcatggggcattaagtgagcttctcaaccccttaactttggtaccagccatcatgcttgctttgtgagtgggccgtcagcagactaaatgagcagaggtcttgagatgtgcttgtgcacatggttttgctgccattgcactttggggatcttccaagagaagaccatgccctatgcagttgttactcctgtagcctgggcctctgcgtgatacaaatgaaacaaatctaactgaactcacaacctggagccaagcccagctaagccaactccgaagcaacccatagtctaaaacctacagccatgctcagtctaggtcaacagaaccccaatcagttcacagacccatgaacatggcaatcaacatatattagtgtaagtcactgatttcaagggttgttggctatccagcattattgtgtaaaatagcttatgaacacaaacagcatttaaaataagtaagcattatgagtagtagatgactagtaagatacaggcataactacagtggggttctagtattaactaccaacctctctttactgtggcaactgtcctaatcggaaatctcttcctttgtctctttcattcactgttttcaacctaaattgtccacttttctaaactatactggtgtgtttgctttctggcatcaatgctgatatgctagctttaaaagactgcttctttgaaattggaagtgaggagatgataagttggctgaggtaaaggaactcaagctaagtagagttcctcattattcaagagtaagggtggaatctgagtagattttggagctggacaagagataagaagtgtgaaatccttatgtatagggaggccaaaaagatttaacaaggatcattagaaagcggcaaagcccttacctttataagggatgtgtttattttactattgtgagaatacctgtatgggttagctgttgctgcataacaaacaatccttaaactcaattgcttaaaacaagaaacatgtgttattgctaacaagcctatacatgagctgggtagttcttatggtcttggctgggctcacttattgagtttgttgtgtttgttgtcagctgtgggtttggtaggaagctttgttctattagaaggccagatgactatggattgatctaggataacttcagttggaatgattccacaccctggactttttcacatggccattggacagggttttaagtaaaagtgtgaaagtacaaggactctggaagtcttagttcagaactgtcatactgttgcttccactgtattctattggcaaaggaagtcacaaggccagctaaaattcaagcgaggagaaacagactccatctcttgatgggaggagctataaattcatattgcaaaaggtgtcgttataatcagagtggaaggttatggccacttttgaatctaccataatttctcaaactatgattattgctgacatgccctggcataaaattgtttaaagccaatatatgcccaacttattttaccaatttattttagtaaacagtcaatgttttattataaaataatgttttctattgctacagtaaataaaaccactacatataacatggaattaagacctgaaggtaattgacctctcctaatgaaaaagcaatcattttttaaaattttattttattttattttttgagacggagtttcactcttgttgcccaggctagagtgcaatgctacaatcttggctcactgcaacctccgcctcccagtttcaagcaattctcctgcctcaggctcccaagtagctaggattacaggtccctgccaccacgctcagttaatttttttgtacttttagtagagacggggtttcaccatgttggccaggctgatcttgatctcctgacctcagatgatccacctgcctcggcctcccaaagtgctgggattacaggcatgagacaccacacaatgcatcaatttttttttaatgtgtaagtatttttgttgttcagagattgttagcaaaagtagaaacataagtccaatcatgcttttaattggcagttttgagagtcactagtttgttatttcacatatctttcagaggaaagaacatattttctctctgatccttttgtcatcaagaagtactagctacttcattatgtcactctgaaatgggcaggcactgcttttccatcttaaaatgttgttttgattaccataaaatcagcaaaacctcatagaaacgtgagttgagagtgaaaataggtgtgtaagactggatgcaccattaatgataaaacaacattcaattgtgcacttattcaatgtgaattgagtgtctatcatacaccagacactgttccaggaactgaggatatagcagcaaatgtaacagatgagatttctgctctcaaaaaactgatgtttaatgggcaaaacaagaaaaaaaaagtatattatgtcatataaacagagatatgggctataaagaaaaacaaatcagaatgaggagacagaggataatggtggtatttgagattatgtagacagagaagtctctgtagggtttgtgacccttcagcagaggcctgatggaaatgaaggaacagcctggggaagatcatacctggaaaaggaagtgcttttgatgaaacaaagcaataagcttggttcaaaggataccaagacataagatcagtgtggatggagcacagagaccaaacagaaacggaaaggaagtacattcagaaggctgggctatcttaggccatacctcagagcttggatttactccaaggattataagaagctcttaggtgtttacgagtgagagactgacagatctgatttgcccagtggaaggaaagatgagaatctatagaatcttgatatgactcttctgtttacgttttcttttttttgctttttttttttgctgtaagagacagggtctcactctgttgcccaggctagattacagtggtgcaatctcagctcactgcagcctctacctcctgggctcagcaatcctcctgcctcagcctcctgagtagctgggactacaggcatgtgccaccacacctggctactatgtttttgtttttgtttttgtttttaatttttgtagacagtggatggcactatgttacccaggctggtctcgaactcctggcctcaagtgatcttcccaccttggcttcctgtatgactgatttacttagattgtgggggttatttttgtgtgtgtgtttgtttgttttgtttatttttttagatggagtctctctctgttgcccaggctggagtgcagtggcgtgatcttggctcactgcaacctctgcctccagggttcaagtgattcttttgcctcagcctcccgagtagctgggactacagcacgtgccaccatgcccagctaattttttttgtattttaatagagatggggtttcatcatgttggccacgctgctcttgatctcctaacctcgcaattaacctgcctcagcctcccaaagcactgggattacaggcgtgagccactgtgcccagctacttagattttttaagtttaataaatctgtagttcggaaatagaattgttcgccatggtatctggatttctgcaagttgtacatgtatgcaggatatagtaagaaatccactagaaagaaataaggacttcttttcatattctagcattgtttcctcagtctttctatctaattcagtctaacttcttttaaagaaacaaccaacataaaggtggaaatttaatttttcctatataatgactcaacactttccttaggtttattctaagtatttgtttctttctggagtaagatagaaagttgtagaatttatgggtcaagaatgtttatgcaagaaattataaaaaatgcttatttaaaaatttgcctactaggagaattgcatgcaaactgccccagatgattgtttaagtgtccaagatttgctctgtggatgtctcacctataaatcatattttaaataatatgttcatgtggttaattctttatgaacctactggaattaactgagtttttaatttgtttaaaaaataatgttttggggaaatggtatcaggtcgtgcagtatctttctcttcatgctaatttagattttataccaagttaggcagttggcattattttatttggtcttcacagctctacaacaaagcaaggagaacatcttcctatttccccttaaagatgaggaaaatgatacctggacaggtgaaggactggctcaaggtaacacaggtatccttggaacttgaacccaacctgtcaacctccacatgtgaatctttgcagtcttgtggtacttctcatgcctcatctctaaaactgattcccccttatggtaatcagggagatcagttgtatcagttagatcccactggtctagctgactgtattataatagctggatatagtataaactgctataacctaagagacccggagagctttattcttctgtgatgtaaaagcctgagctagtagttcttcaatttcattacactatcatctcctacagtatcatctgtgtgcatgcaaccaaagctgtctcaccaccaacacattcatattcagcccaaagaaaagaaaaggtggtagggataggcaagatgcttccttttaaggatataacccagaggctgcactcacctctgctcagatcccattggcaagagctcagtcacatgaccgcatttctttacaacaaacctgagaagtgtagttctagctgggcagctatgtactgggttgaactcttgtaggggttgagggattcaagcattgaaaagggagttaaaatggatactagcacaggcttagcagtctccaccactttctggattccttattattatataatatttaagacatgcaaaatgatacctaatatagtatcaatacctgtgtacctgttacacaggttaatgaataaatgtagtggtgcagttgaagtctccttccctcaatctcccccaagcgcagagtaacatttattgctttgctgttaatccctttcttacatttcttaatactttcattactgaaatacatacacttaacagatctatagtagtgttttgactattttaaatctttatatacatcatattgaactgcaattttctgccactgcttttttgactcatcattaaagtggagagattgatttatatttatgcatgtagctctatttttctgggtgatatctcaatatgaatataccgtcatttacttaatgaaataagtatttttttgctattacaaaaaaatgcgttataaatacttcttgtgcacatatataagaatttctccagggaacatacctagaagtataattactgggacataaggtaattgcatcttagttattggatattatccataatgtttcaattagttgtacattcccttgaatagaatataagtaactattttactctttacaaatagccatgtttcaaatgtaaaattttattacaatgaagcaactggatgttttctacattgctatggggaggataaagctcagtagttccatctcttggtaaatacccaagagaaatgagcgtatttgaccaccaaaagatatgcacaagaatatttgtagcagttttatttctaaagttagaataaaactaaatatctatcagtagtagaatggacaaactatggcatagccatacaatagaatacagtaacaataaattttaaaaagaaggacagctgctgccacattcaacagaaaagataaatctcatagacattgtattgagagtaaatgtccaaacccaaggagtatgtattctattatttcatttatataaaactcaagatcaggaaaaactaatctatggcaatagaaatcagaatagtggctacttcagagggaaaaggagggggcactgggtaagtactgatttaaaagtacaccagggagcttctgagatgatggaaatgttctatgtctgtaatgtccaaaatggtagcgactacctcagtaaataaatttcaaattcagtttttcaatcacactagccacatatctactactcaggagccacatgtgacttgcggctgctaaaatggacagcacagacatagaacatttccaccatcacagaaagctcttttgtgcagcattggtctatatctgcagttgggtggtatttatgaatgggtacataggtaaaaattcgtcaaactgtgcccataaagctcgcccttttaggagtcattatatgaaaaagacacatgcatatgcatatttatagcagcaaaattcacaactgcaaaaattatggaaccaacctaaatgtccatcaaccaacaagtagataaagaaaatgttgtacatatacaccatggaatactactcaccgtaaaacggaatgaaagaagtaactcaggaatggaaaactattacatgttttcacttttacgtgggagttaagctgtgaggatgcaaaggcataaaaatgatataatgagctttggggactctggaggaagggtaggagttggggtaagggaccaaagactacatattgggtatcgcgtatactgctcgggtgacaggagcaccagcatctcagaaatcaccactaaaggacttatccacgtaaccaaaaaccaccttttcctcaaaaactacccaaattaaaatgtaaaaattaaaaaaattttgcctcatatgtatgcctcataaacaaaatatgcttcacaataaatatgcctcataaaatgggaaggaaactaagacaagaaagataaaaaaggaaaggaataaaacaaaatatttcagtgccttttaaatttgaagtttgaatgtaatatatttcatgacctcaggagaaaaatgtacaagagctctgtacaaaagtatcaattattaagacttttaaaatggagattatttctcattaactttaattagactccttctaggtttgcagatttggcaaattattaaaacaaaatgaaaacattaggctcatctctcaggcaagtttcttcaaattctgaagcatccatagacgctcttctggcatctttgccttcattacatttctatgtaactaatttctgttgctaatttgattccatcatgaggtatcatttcaatcattttctctccgacaccagcatatttgcctgtgtagagatgggtgaccccaactgtgatcaaacgcatacagagtaatgagttaggttagagtggcctgatttctggtttatgaaagttaattggaagtatgcttaatctttgtcacagaactctgattaacccattgcctagtttacatttgcaagaaataatgcatttcagcatatagtctctagattatcagggagcataagagaaaagccatcgactattgtaggtcaaaatagtcttgcactggaaatagacacacaccctccatcacaactgaacagagcagaatgtgtcggaggagctcggtgacccttggcaacttcttaccctctctgaacctcagtctcctcacttcctgccttctctgactgcctgacagagtattatctcccttatatttgtttccaccataagacattacaaccacaggaaaagtacagagtacacatgtcctgtcatttagtaccaggtgcagcattccctctatgagtttatgagagtgcaaggtgcatgtttatttccttaggccattgcctggcctgcaggaaattgcaaaagaggtttgttgaataagtgaatcagtgaataagtgcatgaatgctatattgtctcttgtcgtgtaactttcccttgaaacatagtggtttgaaacaacacatgtttcttatcttacaatttttgagggtcaggaatctgggcgcagcttagctgagtccacttcttcagggtctctcacaggctgcaacgaaggtgttggctggagtcactgtcctcccaactagggctggatctatagccaagctctctcagtggttgttggaaggattcagttccttgtgggctgttggactgaggtcttcacttccttgccatgtgacactttccagcttgacagcttgtaccagcaagagagagtctgtttgcagtacagcagtcacaggcttttctaacctaatcactgaagtgacattccacggcttttgctgtatctgatttgttaggagcaagtcactaggtccagacctcatgcaagaagaagaggttacacaagggcatgaataccaaggcagagaaaattaggagcctgttagaagctacctaccacaaatgcctacttcacaagactatgaggaagttcaaaatgagacaatgtttgtgaaagttctgataggtctgccgtttgctctttctagattgttctttcccccttgaatgcactgcccctacatccttctcatctgttatgtttcagcttacatggctccacctctaaggggccttcatgatcccggagccatgcttttagcccagcgcccttttgttttcagcacgaattaccctttctttcctttctttcctttcttccttctttactttttttttttttttttttttttttgcatatgatcagtttctttcaccaggaagtcagctccatgagggcaggagctagcctgtctgattcactcctcattcaccagtgccttacatataatacacctcaagaaatatgtgttggcaaattgtattcctacctcacattgcaatttatttgctttgtaaaattattgccagttggagagctagtacttgtgatggcttttcagaagtttagaaccagagctgcaccagtataggggactctttcttgttctgggattagagagtatacatgccaacaaagcaaactaatttggggtacaagttattaaccacaatgacaaatgtggactacctcagtttggaaggtgagacaccattcacacacatgatactgaatttgagatttttgccatctccttaccttgccttctccagacttctttatacctccaaagtaggcagcagccttacacctctatgccatccctctcagctccaccctccactgcagaagtaaggactaaatttcacaatgctgtaatagccaccatttagtgagtgacagctacatgccaggcattgactaaagattttatacatgtccttcacaattctcatcacaacttttatacaggagactgaaatacagataaagtaaaatcaaaacttcagggccatcagaattggaaggccaaactaattcctctatgcactgtatttaacacccactcaccaagacctctctcctctccaacatagatttacaaagactaaagatgagggaatgagcatgtcttgtttctggtcatagttatatctctaatcatgtcaccttggacatgtcatttttaaacctgtgctaatcaatgtctttgaaagaggtctattagaatttcaactcaaactgctaacagttattggactgtcagaagcctgggcccaaatggccatctcatacatatgccaaattcctcttccattccaagccttcacactaaaatgtttcatgatctagaatatggtctttgtgcaattttgccagaagacgtcaggaaagtatgcaactcattggcaaaagtaacagctttgcaatggaagaacagaaagagacttctgcaggagaaagcagttttatttctcctgcagtgtctggtctcccagtctggtgcaaccctgaaggtaccctttgaaggagtggcctgcagaatattcatggcagaatgtttattggccccatcttagctcacagtgacccaagtcaccaagcttagaagcttagtaagaaatgagcatgtccctgcagtgtacctgccactccagctatattatccaaacataggaagtgagatagggtgaggagtatgaggggctgagaggagctcagtatttgactagaatactacccaaatctttcagctggataattcgatgttttaggggctgtgctgtgcattgtaggatgtttggcagcatccctaacttctactcactagataccagtagcataaccttctattggtgacaaccaaaatgtccccaggcattgtcacacatccccaggagatgtgggaggggctaaatcaccaccagttgggaagcactggaccggggtaggaatgtgacgtcagtcaggataggccagatatgccatagcaacaaccccatcatctcaatggctacaaagaagaccgtcatgaagtgacagaaggactctacttcacggatacttcacagattcacagtctacttcagagactctggctgatagagcagccaatgtatccaatatcatgaattgccatgccagagggaatagagtgctctgaaaggtctcaaaccagaaattaaatgctttatgccaaaagtttggtatcacttgctctcacaacccactggccagaactagactcactcaatacaaggagagctgagagtatagccttaccacatgcccagcagagacgagaaccagaaatacttggcaggcagcactaatggccaccacagatgcaaagaaggtctcccttccttgttgatgtagaatgagaaagtgttaaaggcaggatatacaaggttacccagcacttggcagaaaacaacaacaataataacattgaggtgatagtgactacaatttggattatgcttattatgtatcagacaacttaattctcactcaacaacccaataaggtaaatacttttattcttttcattttaaagattgtgaaattgagatgcaaaatgcttaagtaacttgcctaaaaccactctagtgagtagcagacctgagatttcatccaaggtctctctgatattaaagactgagctcttagaccccactttataaatcagtttggctggtgtgcaaaccaccttctctcattatggggctgaattagcaagtcatctcccctctaacctgctctgcacctttgtggtttcagttaagggcatttgcaaatgccttctatccttccactccctgacaatttttcttaatggattccaccattcctggagcatttggaagaagcccttagtcattccattatgagggtgatcatgctcagagaaacaagtaaaatctgtctgcaaacattgagagagagcaatggctccgcatcaatttgggtcctaagaaaactgacacactaaatcaggtagtggagtcagcaatgtgaaccttttggatgctgtcaccaccccacttgaagtagatccagatgctaaggccaaggggttaaatacaaaagcatgtaatgatagaaaggattagcatttatgccaggtattagtataagtgtgcataatcttaagtagatagtgttaataccaccattttatagatgagaaaagttgtgaaaagtgaactaatgaaggtcacccagcaggttttttgagggattccggatttcattccaaattgcaagcagttatccaccctagtggacacaagaagctgcttaaggttttaaacacacttgctcatctctttctagttttccgccgcccccaagtcaagcttacaatatttattttaaagataatagagaataaaacacagatatgtttcactttcttcttcctttggttgaaggggttatctgagaatattaaacacaagcagtcaggctttgccaagaagcctccagaatgagataactcagtcacttatgttattatcattaagagaacatttacatttggaaatgaaacaacaatgaatccaaaatctccctcaagctccagctctagttttcaatgccatatttgaggtgggtgctgaagacctttggtaacaattatttgtgaaggggaaagttaaggaaatgaagatatagtcagaaaaaggaaaactgagatttggctcagtatcttccagaaaaattaaatgaatttattttaggaaaaagtgaggtgagtgttagatatagaaaaaattttcctaattaggttgtaaacagattgttaaaggtagtaaggaacatataacatccacctccctgcagatgttcgagaggaggacaatctttgctgggagaaacagcccagatggtagaaagaacatggactttgcaaacagacccttttggatttgagtttcagctctgtcatttattagattggtgcaaaagtaattgcggttttgcccttataattgcaaaaaccgcaattacttttgcagcagcctaaatattagctgtttgacctgggacagcgacttcgtgttgataagcctcaatttccccacttgaaaaataacagtaccatatgctctattggccttgtagagttataaacataatcaaagggtgcaatgtatatatggccatttctaatctgataagagctaagcaaacacaagtagaaccaaaattgagtttgtgtcatttcttaaaacctactcttgctcctgaacttacagaaaaagaacaagactatcagccagaacattttcattttagtgtcactctgggtataagtgagctaagtatttgaggggaagcttcatcagaatttccatttcctttatccaattcccatcagatgaatcacaaactctcagaatggaaatgttagcttctaagtgaatggtagttctgtccctcaagacaatggttataagaggcctcccatggttttctcatctagtgttgtattagtattattgtttgcaaaataattcctctaaatgaggaaaagccctacatctccgcaggtgcctccttaaaagggcattgcacactttcacagacagctgttgagaatgacagttttttttgttgaagaggctacccattttagagtctgtgactattgctatggagacaactgcaaaatcagagaaaaggtgggtattgggcctgtaaaatcaacaatgctccacagatttctcaccaactaaacctgttcttacaaattagttttgcctattttgaacttcatataaatgaaattgtaaaatatctaccctcttgtgtctgccttctcttgattgacttcacatctatgagctttatttatattgttgcaggtaacagtagtttgttctccttcactgctgtgcagtattctggtttgtagtttgaagcttctagtttgaagctactatgaataaagttgttctgaaatactcctatacatgctcttcggtgtatgctagcactcaattctctttcttttgggtagaagcacaggaatggaattctggagatagatatctagatatctataaatagatactcagctttagtaaatagtgccaagaagttttccaaggtgtttttactaataagcacagctaccagcaatctaagacagtctaggtgcttcctgttttcacttccaaaatacaccttacccgtgtgatcttaaagcaatgacttctttttaaagagatgcgtgcaaaaacctgtacaagtccatgtaactcccaaatgcctaccaataccagatggaaacttgaatagagcaagaacttgactctgttgtggaaagttttactagtcttactgtgccattaagaaagaagaatttttgtctgagggtttattggttggtaggaagcagaagggttaattacttttggtaaatagtgtttttgcttcctttggctggaatcctttattattattagcaattgatcaatacacttaatgggtcactcaaagctatcgcatatcccctgcataaccagacactgagcaatcttggattcctgtaattaaagataaagcaaattaggtttcctagtagagataattccatgtctcctctagtgaggactgagtccatggcccctgacagaaggaggtagatactcaatccacctgatatttgtggctaaggcctgatctactgaggaactcagggttgttttcattcagtccaaggggtatgactctttagtctggaaccaaagttttattacaaatttgaatataggaaagtcaaggaggtacaaatccattacttatgctatgaggagaaatgaaggaaattcttccaaccagatgaattcaaaagctcttccatggacctaaagtggacatctttgtgcctgtcatccttcccaaggtggatttatgccaggccagagttaccaacaatagctgcagacagtgactgcccagaggctactcatccctccatccttcaattacccaaggatggagcttcaaaaatatctactgtgttcctccttcaccctgttgatcccctcatcttttccttctatgctctgcctttggtcagagtagcattcttaaccataggccgtcagcctcctcccttctcagtggtcagggagcaggcggtttgccaccatgtgatgagcctagtgtccaaagccagactctggcaggttctagcaatgtgaccttgggcaaactgcttatgactcaatgcctcagttaccctgtgtttgaaatggagagtggtgataatgcctgctagtaaggcactgagtgtcaactgtgatcctgtagaatgccatgataaatgtttcccttggccactgctgccatgagttagggtgactcctctaaaacattgatttaggagcaagacctaacatatttttcttcagcggttagtacagacttgcttgtgagcttcccatatagtatgaactaagtaaataataataatagcaaatgtaccggtgtttcctgtataccagcaatgtctaaatattttgcacataataattcattttatcatcatacgaccccatgaggtgggtgctattatcattcttgcttcaatggttgaggaaactgagttgttaaataaactgttcacaatcacagagctaattcgtgcaagagccagggttcaaacccagagggtctagccctgctatactaacttttcctttgaacatttatgggataattgatccgggctgaagactattgttaggatttaaatgtacagagaaatgtctaaacctgcactgtccagtaccataatcattagtcatgtgtcactaatccaactttaattaaaatttactcaaaatagaaagtaattcctctatcacactggccacatttcagatgctcactagctgcttagggctgttaactaccatcttggacagtgcaggtgtggactattcccatcattcgagacagttctactagattttagatttttgataaaggaagcaagagagagaagttgaggttgggttttgaggagaagattgggaattccgaggctggtagtccagaagtatgggaaagaagcaaaggcagaaaactggaagtcttccaacaggcagacaggctggccaggccacctggggagcctggggctcactggcacagagcactctcactacagtcagacatgcctggggttcaaacccaggctctgtcaagaattagccgtgaaattcaagcagatcattttgcatctatttccccaagtgtgtttaagcttatcctgagaatagctgaggggccattggagggttttcagcagtggagaggtatgatcagatttgtctttttcggaagctatcttttgaaggtttcgtggagagcaacagagaaatatgagttggggaaatgaggatgctggttctcatgtgtgggcccttgggctggtgacagttcttggcagagttttcactgatgcattgctaaatgaggaaggtaaagactgtgtgtgtgtgacgcataacaccacatatatgagaataccaacagtcccagttgtactttcttgagaatgctttattatttggaaactaccgcttttctacttttttttggcactaaaattccttttgtttatgaaataatgttcacagtaggatagtaaatagtaggaatttttttatgtcattaccagacaaaattaaatgtatgtctgtgccttgattcatttgtttttaaactgttattgtttcttagtccatgaaatccccaaacctgggaacttctgagctgcatgccattgcaattgtgctcaggtgagagctgatgagttcatcagtaaaagggaggcaggtttgagagtgactgagataaaagctcgtagacatgtggatgaggaaaaaatcagggaggagggaatacaggaaaggtggtggtctccaaagagcccatggtgaatgaaagtgcagcagaggcagtcagtgaggaccttgagccctgctgcagcatcatccctgtttctattttgcacctgttttggaggagctcctgagcattcttcctgagtgcagatacatcaaggttaagtgcttgcagggaaacagctggcgcccatctcactgcaccagcaagccacaagtgcagctcccttggacacagaagtgcccacataaggccacctgaactgtgacaccctccacccagtgctcttcctccaccctgccttgggcatgtggccctgagacaaagcctctccaaggcctcccactgaattctgacctctctgagaacgtggctacctcagtgcctctccagacagagcccgcagaggcaggagaggaagccagcaaagtgtcagcgtgcagggagctgccaggctcagagcagcaggcttctcgcattttaagcagcatatgcaaattaaattagcaagggttccacttcatctcctgagcggctcagacacactccccaataattcccaagccaaactgacccagtttgaaattaaaatcaggtttatttttagagggatatatttccccttgcctcagtctcagtggatttttttttcctatttagcctgataaacatctgagtacattattcccagacctgtgtagtcctctgacagctacttgatagatcaaatgcatagtagagtctagctcatgtatattcagacagcagaggtgagccccacatgccctcttacgtgaaaggaaggctgtctacactgtgtccattttcctctacccgtctgcaaccttaaggctggcatcagggtccgctgaactggaaaagctttagagtttaagatgatttagagcctggtcacactcgggttcagcagtatctactggcgttcatcggagacctacaacatcttctcttgacaaaaatctagtcgatttgaattacctcctcgcagctgggtttaagaatgtttttcatcttagctaaaggcactgtacttttcccttgtagcactttctacaagaagttattcccataattgtgtggttaacatctgctcctttttcttaaaactgggagctttctgatggccccagcttgcaccctttaccatcctcaaagcctagtactatattaagtcctcaactaatgaataaaattagctgctagatcagtggttctcaactgggggcaattttgacaccaccaccttcctctcccagacatgtgtgagttttttattcagctgggggtaagggggtttttctactggcatctagtagaggccaaaggccagcatgctgcaaaatgtctcacagagcacaggaccctcacggcccccaccacgcacacagacacacccccacaaaaaacaattacccaacctcaaatgtcagtagtgatgaggtcgagaaactatacgctggatcaatctgttcatgtgtggttatgcctaagcagggcaggtttgctctttcaattatggaaactattgggtcatacttttttggtcatggttggagagacaattgccagaaaagaagctgtttatcttagattttcctcagtggagcaaagatagaagttgatttactcaaaggcaaatgagcctgtgaaagcattgcagcaactcactttctggctccagcctccacctgtgtgacacaggatctcagccagtccctgagtctcccttagttacttctgagatgttcatgagatgttcatgagatgttcacttgggcttatatccttgtttatgaagccacttgagggtggtcttcaccacaccactgtggccactgtcctccataaaggttctggctcccttccgggatcctgtctgaagggacttccaaagctgcaaagccttgaggtgccctgcagcctttgcctcaccaagtcggcatggccgtcttccacagagaggtaggaagaagcccctctccctaattctgtgtgaaatctttgctcaacacaggccacagtgagcattctagagccagacaacctaagtgaaaattcagaggctgccccttgctgcttctgtgattttgcacaagatacttaactcttccaagcctgcatttcctcaactataatgacagtgccaaccccatcaggtggttatgagcactgaatgaggagatgcatgcatccttagtggagtttctagcacctgacagctaatatttgttgcgtgctttctattactgtggtgatgttcttatgtggttgtcattagcatcatgttttgaacccagactgggattcacaaccaggatctgacactagtggctgcatgacttgggcgattacttaaacttcccctacctctgtttcctcatttgcaaaatgcggatttaaaatagtacctacttcacaaggttgatgtgaacattaaataaattaaattaaataatgtgcataaagcctttagcatagtgcctggcaatagtaataataattattgtcatataaattatttaaatgattattaactgaaaatagttaatgttttgtttggcttttttgttgaatctaagttggaaagatctgtcaaactagatactgacaatgttgtaaagcagcagaatagtctggaagttgtctgtttcaggaagcgtcacagcagtccaattaaagtgttttctgaatctcttagaaggcggtgatacggtggtctccaaatctgtgtgcttacctacccacagcttagagcactgaacttcaattttccaactttcctactgttgtctgggttcaaggacaaactctcctccacggtaaagtaatttcctccataaaatctgctcctgagtaaacctggctaaaatgcccccctggtgaacagtattgttaggcacatgcagttaggggtcctggcggttttctcaccaacaaaaatctcttgtgggagaatggtcccactatcctgagatcccagccgctctgatgagcagaagcactttatgccttctttcctcacacagagacctgaatgtctatttttactttttcttttttcttctttttttttttaaaaaaaaaaaaaaaacctgccgggcacggtggctcacacctgtaatttcagcactttgggaggccaaggtaggcagatcacgaggtcaggagattgataccatcctggctaatgcagtgaaaccccgtctctactaaaaatacaaaaaattagccgggcgtggtggtggacacctgtagtcccagctactcaggaggctgaggcaggagaatggggtgaacctgggaggcggagcttgcagtgagccaagatcgcaccatggcactccagtctgggtgacagagcgagactctgcctcaaaaagaaaaaaaaaaaaaaaaactaacaatataatggacaatatggaaagaatggtgattaacaatatgtgggctttgaagtaaagcagaatcaggccccatctcttacaaacaagctgattttgcataatttgcttggcttccttgagcctaatttctccatctgtatactgaaattaaaaatgtttttccctagggccaggtgcagtggctcatgcctgtaatcccagcactttgggaggctgaggcaggagggtcacttgaggccaggtgtttgagaccagactggacaacataacaagaccccatttctacaaaaaataattttctaaaaattagctgagtgtggtacatgcatgtctgtagtcctagctactcaggagactaaagtgggaggattgcttgaggctagaagtcccaggagttcaatgttatgatcttaccactgcactgcagtctgagtgacagagcgataccgtgtttcaaaaaaaaacaaacaaacaaacaaacaaaagcaaaaatgcccccctgataccattcctgcattcttgtgaagttgaaatgaaatagataattcctataaagcctatgtctgacacatgttaacttttcaacaagtttttatgattgttattattgttgttgctatctatggttactttttgattaaggaagtttggattcagctcttccatgagtcagggtaagctacattgtactgtggttacagttcaaactctcagtaccttaaaagagaagtgtttatttctttgttgtgttttgtgtccatcatcagttgacagagactctgttatcctatgtcccaggctgatggtgcagccccgttttcaaatgatgctcccgctgtgccagagcaaaagaaagctctggagggtctttcaccagaaaatacagctttcagcctaaaagggacacagagcacttctgttcacaactcataggccagaagtagtcgtgtaaccccaccaaatcccaaggttaaaagtagtcaaatcctaccgtgctcccagaaggtggagagctggaaatgttttcctaacaactgaatgatgaatgaccatcacggccatttagttggtgtaatggtaggatgagcctttccttaggcaatggctacatttttcaggatgtatattttccagggatgcattacccttatttgcagattacccaattatttatatgtaacaaatccttgctaaaggtgggcactgtgcttggcactgagaatctaatggtaagcaaacacaggtaaagtccttgcactgcataccatacagatcattgaggaagacacaagttaatttaaatatcacaccagggagtttatagttgtacactgagattaaaactctgaaggaaagaaacagagctctgtgacggaatctgatatagtctgtggggtcaggggtactttctcctaattggtgcttgagtatggtatgtaaaggatgagtaggttttcactaagtgaagtagggagggcaggagaaacatttaggacagaaggaacagcatgtgccaaggccctgggccaggagagtgtctagatgtcacaggggttgaaagaaagtctgtatggctagaacagggcccaggagggctatgataaaagacagtgccagaaaggcaggcaggggctaggccatgcagatcccagcttaggtctcttcaggatctgagtcattatctctactgatctgaagcctttgagggactcagctcatttaagggattgatatataaacccagacggcatcaccaggacctctgaatgcacaaaggagtccctgtgtttggaaggccttctgattccttcccctcacgaaaaatgttctatagtcacaggtccatactttacctgtgacattttaaagcaaatatcttcagcctgtctccaaacccaaagcccggagccagcttctgtacaacaaatgtgtccctctctgtttgcacttctcacattcaaggaggcctcccacggactctgggaaggaaatgtgatatccacgcacagcagtgccactgcctgcagagagcaaaatgctcctgatgcggctgacaatatgttccctcctgggaatgtgggttgcactctgtctttcagaaatgtaggattagaatgtgtcatctccttaaccttagaggactggagtttatagatctgctgccaaactgactcaacctactgagcccaccccagtctcatgtctacacatgaatgagaataactgagcaatagttactcaactaggaaacatctaggattctccaactggcattctaggaataccacctggctatgctacagaagacaagaagcttagattttgccctttggacctgtacagaaaaacagcaagttctctggtcatttctctttgagttcaaagataacagtctagaaactctttacaggtagaaattgtttgacctacgtagcttcagaagaaagttcctggttcatagtggtctctcaaacatttacatgagtagatttttttaaaaaaatgtattcattcattcattcattcaccaagacatcatgtactgagcacctacaatgagtcagacatggtgctggaaaggtgataaatgggttcttggcactagggagctttcattctgctaagaaagcacagataataaacatgtgactaatgaaataagattgcagatggtagtaagggctatgaaataagtaaaagaagacaatagatagaatgtcaagaaaagggaggagtgatttctttagctagagtggtcaagagaaaaaaaaaattactctaagatgtgacttatggcccaagaaataaacattgagaaggaggcagccgtgagctagatgggaaataagtttccaggtagagggaacagcaagaagaaactgagtgtgatgtgttgtgggaacacatgcgacagggaggatggtggtaaatgatgaagtcagaaaggtgagtaggatctaatggggtcaatcaggtagttaatgatggtgagtttggatgcaacaggacaccattggtgaattttaggcagaatggtaataggatttcatttatgccttgagaagatcaccctggctattttaaggaaactggtctgaaatgtggatgtagggagaccaggtaggaatctgatgcagtgagagatgatggtgtcttgtgatattgagaagctgtcaaattcagcagaacaatatggaaacaaggccaataagaatgctcaactagatatggaatgtgaggggaaaaaggaaataagcatgattcccaggtttttaaatataagcaatgggttgaatgtaggtgttattttcgaagatgagaaaggaaccggtttggaggagggcggagtcaaaatttctcttttgtgcaagttatctttgatattttgattagatatctaagtggacaattaaatatacacggagctcaggaccaaagatatgattgggttattgggttgtgtaataaatgctaaacaccacaggactcatttgtgttgttaccagaccatttggcatttatctttcattcaacaaagatgtgtttaatacaacagcatgtgattctgtactgagccctagcagatgtgatttcatcttggctggtgatgagctagtaatccaactctttgttggttgttttatctgtctagtcttcaatgtagtgggtgtagtgagtgagaggtgaatgatatggagatatttgcatatagaggaaaattacaaaatcaatctattccagtatgtagattttctgtggctgttgctgacagagaaaactgccctgccaccaagaagttatgaaataaccaaaaattaaaagggtggcttgaatggtctacatcgtgagcttcactagtcttttaattatctctgccttcctaacgttgatcttatgaaccattaacatttggagaatctgcaggtgtaccaccaggaaagtagaaaaactgttccatttgggataggaacactagcttttcaagatcttgtgatgtctccaaagtatctactaattcaaccaaaaaaaatcagtcaaactacatgataggcgttagtcacaatgagcagatgatggaggaccgatatactcttcagttaattggtctgataccccataaatgtgatgtaaggacaaagatcatgtcattgctctgtcccaattctgtcatttttttaaaggtttggttttgatatagacagtaaagtcatcttgtttgggtgacagtatctaatgtaatgccaccttcagaaaagggcaaagtgctttgatctgtcagaccatgtagcaagcaaatgatatggaacattctgagtttgcataaaggtctgactttacatttttaaaaacaaaaccaagccaaaactatcatttaggtctgaaccctaagctttctagatttttccagaaacttttctaccattctctactaaatctagatttattatcataggccaggcacaatggctcacacgtgtaatctcagcactttgggaggccgagatggacggatcacttgaggccaggagtttgagaccaacctggccaacgtggcgaaaccttgtgtctaccaaaaatacagaaattagctggtggcaagtgcctgtagtcccagctacttgggaggctgatgcacgagaatcacttgaacccaagaggcaaaggttgcaatgagccaagatcatgccactacattccagcctggacgacagagcaaaactctgtctcaaaaaaaaagtgttttttaaaaaatagatttatggtcggatgcagtggctcactcctgtgatcccagcactttgggaggctgaggcgggtggatcatgaggtcaggagatcgagaccatcctggctaacatgatgaaaccccgtctcttctaaaaatacaaaaaattagccaggtgtggtggcgggtgcctgtagttccagctactcaggaggctgaggcatgaacccgggaggcggagcttgcagtgagctgagatcgcgccactgcactccagcctgggcgacacagcaagactccatctcaaaaaaaaaaaaaaaaaaaaagatttataatcattataaattgaaatgtggtaccacatattacaatctattattttcttgtccacaagcaagggataaacgtgaattagcatagtctgatggtattccaaatgtcatatgtggtattttaaataactaagggaaatgtcttaaatattatttaaggactttatctgcaagtattatagtatttatgatatttaatgtgcatatgttaatatgtggcaatgttttctaaggttcatgtaaaacattttttaccaaaatatggtatcttttgtgactcaagcaaatgtaatataatgtttaattccccagcaaaaatatatataaatatatatttatatataatacagatagatagatagatagatagataggtagatagatagatagatagggctggccaacatggcaaaacctcatctctaccggaaatataaaattagctgggagtggtggtgggcacctctagtcctggctaaatacctcacatgtgctaaaataaagagaatagtataataagccccatgtaggtatcatccagcttttatcacctaacaagtcatggtcattcttgtttcatctttgcaccccccattcttccatcctcagatgattttgaagcagatttcaaacatcatgtcatctgtatttatttcagcatgtatcttgaaaagacagcacttttacaagaacaaccacccatagtcataggcaggaaaccgttatgatgcctataacaaatttacaaacatttcttatcatctgctatcaaatatggtcacatttccatgtttttgtatatatctggaaattttttgaaactttgtttaaatttaaattgttctctgaatgagcttcatacatagtgaattgggtactatctctctcgagcctcttttagtctataggtagaaacttaattttttttaaataaaacttttactgaccccagaaaaaatttgtgtcatatgtggcaggagatcatcatcaataatattaaaatgacagtaatattttgctcctaggcatcttttctttaggagtctaacccaatcatattttgtttatatctgtgaattttgccaaatagtgtttcttgtttagctaactttttctgcccttctaagtgagtaccttatgttttgaaccacctgatactttgcaggcaggcttctttctatgtcttgctttacaccaaatgaccttcctcccttcacccacactgctccccaccctcatgtcttccctttgcctttggaatcacagccgtgtggtaattggctttcccatgatctttctggcctccatttaccaaagctaaacagcagttccaaaacagtaagtggaagggaagagtattcttctaatgtgatctctccacattagaaacatgtacagtacccagtcacaaaaatgaagaaaatgagcaatgaattaaccatgatgcaaagttatgtaatgtatatataattcctttattatgaaaatgactttttaattcaactgctttgtaacagagaaattaatagaaactaccaacatgttttgcttgcttgtctgcttgcttgcttttcttttgtaccaactagctgtgaccttgtttacattacctgcatttaagagtttcttggtattgaacagatgttttgtagttcccagctccttaatttataagttggatgagcctcaatggcctcatctataaaatggggctaataatactatataaatactgaggttgattgaaccaaaggtcgaggtattggaataatataaagaatatagagaaatttttttaaaaagctgcatatgaggttcagaaaaggcagaaattcaggtggctataaggctataagtagcaggaatgaatgatctcagggcacaacccctgagaaacatcagctccaacaggaaagattccaagtccctggagagtgacactgaccagggctgggttacagtatcactccttgacaaggctccttaatggacaggtcccactgatgcagggcaggcgagccccaaaactgaggcttagcccaggaggggtcttggcttcacccagaaaagaattcaatggcaagccagtggtgttaaacagcaactttaatggaagcggcagggtacagcagcagcagagcagggctaacgcacaggcagtatgcccagaatagcagcccaggggcagttctgcagtcatatttacacctacttttaattacgtgccaaataaggtgtggatcatgcagagatttctagaaaaagttggccacttccaggtcattgccctgaaaaggggtgataactgccaggtgttgtcatggcaatggtaaattgacaaggccttggtgggcatgtcttatggagaggtggttttgtctcttccttgtttcagccagtcttcaatctggtctggaccctgagccccacctcctacctcaccgacacaaataaatacagtgaggaagaggtcatccccctgaaagaaatggtagtcctttaccaggagaaggagaaatggtctgggcaacaaaaaaaccaaaccaaaacaaactcccatcacattatctcacagagttttaatgaggattaaagaagttaatacataatgttcacaatatctggcatttggtaaaagctcagcaaattgtagtcagtattattattacagtataaaagagaaaatgagcaacaattcagccatgctgcaaggctatataatcattagcaattccttcaccatgagaaagtcctgatgtggttactctagaattctcagaattggccaggtttgaggctggctcatttgcatccattaactatatggccttcagtcttaacctttctggcctgttcctcctctcacaaaaggtggtaataataccaagctaagtcagaggactgccctagagcacaatttatgaccagttgtcaaagtctcagggaaatccacagattttagtgccaaacatctccagtggaatcaaagggaagaactgaggcaagttacacacaaccatgtttcacatatttttaaaagtgcattttatttataaccctgcctcattccaaaaggatttttggctgctcatattttatataaatagcaaatgtttcaactcttagctaattaaattaaggatgcaagctggagaaacgacattaagaggtgaacaacaaggcttcatttttaattcatcatttaagaaacgcatctataacctaaatagaaaatgagcaaagggcataaacattgaataagtacaaacatgcaacaagcatatgaaaaaagtttcaacattgtgagtacacaaagaaatgaatatttgacagcagtatcagatttttcgccttattggaaggatttaaaataaagactaccaatatccgtgttagcaagggtgcaggggacttgtaccctcacaccttgctggggggaatagaaacaggcagtctttctggagaacaaataagatgggatctatcaaaattaaattaaaaaataccatttgacccaagaatttcacttctagtagtcttctttaaagaaatattcatatgtgtgatcaaagaaatatatacacaaatatacattatttttaatagcaaaaaaatttaaaacaattaaaatgccatcaattaagttgtttaaaattttcatacaataccgttgaaattttgtgtagtcattaaagaagtgtatatatctcctgaaatagaaagatgtcaaaatatatattttaaagtgtaaatactaagttgcagaaaattggcagtatgatcccattttataaatatgtatttctagatgttttagaaggactgaaaagcttttactcaggattgtgttggttttttaagttgctgttgagtagccacgatgggattagtgaggtaacagaaggatactaaattgttcagtcatgcatatagctcttagaatataaagcaataccatagatgaatgaatcaataaacaaacaaatgaaatgagcaaacctgctacaacccaaaagatcagatcataaccaagctgctaggagtgttgacctgaggggagacttgggattcagttttacctaccagtttcagctaccagtggacaatcacttcagccttcctatctcagctcccttgcagggaaaatcaccaagctggccaagctaatcactctcactagctaaggctcataatccagaaaaatagcaattagacaagaacttgaaactatcttacacaaagaattcaggggtattttggaggagtctatgaattatatttaggaggtccatgaattcaactgaaaatcaaattgcatctttatttttactaacctttacctgaaatgtaacatttcattcagttatgaatgtaggcaacaaaccaaaataatactagcagaaacatttatatcgtgttaacaattgctgctgataccttgaaacactgtttacacttatcactataccagattaccatagatattaggtttgttgctagatcttgtaatttaatgaataaataaatacctattattaaaaatgatgtttaaaattattctgatatatgtatatcaatagaattggatgcctttataatatcatatattttatgcattttaaaaccttacactgaaaagaggtctataagctaaataggactgtactgaggaattcttggccccaaagaaattacaaatcccaatgctttgctttttattgtttgctttcctgttacagaagcaacagtgactggcttctgggggaggggcacaaacctcacaaaggtagcaattcactgggggatcctgaaggaataggcacagaggaagtcataagacaggaattaaaagaaatgataagcacggggaggaggcagcgataataagctccggttagcctgagtgtttaatttcctctttgctctgataattaatttaattaagattaatcttactatttcctattctttatcacctcatgaagaaattgcccaaagacaagttcacaaatgtggtgggaggtggcagaggtgggaagtccaatgttctagaatctaaattggtgactcggagccctagctgtgcatcagaatcacctggggagtttttaaaactctctcagtgggagggaatagggataatgtatattactgactgagagaggcatgagggggccttctagaaggctgaacatattacacatcttgatctggcctgtggttaaatgtgtggatccatatataaaaattcattgacctatatatttaagatttgagcttatgaggaacgtgaagcatggagaggttcggtaactttcccaaggtttatctcagattttttttttaattatatctcaactttttaaaaaaatagcagttttctggccccacctctgaagagtctaatttaattgtctgggccagggcccaggaatcagtatttgtttaaaaacacctgcccctcccccaccccagttgaggccagcgtgcatccaggattgagaaccacctagacgcttcatgagatggaatcattcactcagtcaacaagttcacggagatttcagtgctaagtagtgaggacagagagaaaaataatctctgttctcaagacttttaattaacggaataaagtaataattactttattagatattaacatagatattaacatagaacctggccaggcacggtgactcatgcctgtaatcccagcaatttgggaggccgaggtgggcagatcacttgagttcaagtgatccagtctggccaacatggtgaaaccctgtctctactaaaatacaaaaaaaattagccaggtgtggtggcaggcacctgtaatcccagccactcgggaggctgagggatgagaattgcttgaacccaggaggtggaggttgcagtgagccgagattacaccactgcactccagcctgggtgacagaatgagactctgtctcaaaaaaaataataaatacataaataaaataaaaataaaacccagtggtcctccatcttcagtgtccatcctcagaatcacttggggagcgtgttgaaattatggcttccaggctccacccagagattctgattcaataggtctggactgaggcctcaggaatctgcttaagggaacagtaaataagctaggtcgggcatatgcctaacgcatagtaggagagcaacaaatagctactgaaggtaggagttgctgggccaagtgctttgtatacagtatctaagtgaatgataaacaacaacccaataagggtatgtactaaagaaaactcacaggaggaaactgtagattggagacattaaacaaaacaaaacaaaaatattgtccaaggtccaacagttaataaaatcagggagtggagatttaagcacatgtctctttaattctccaaaagtaaagccctgcaccctgaaccagagctttgccacacattttctacaattctaagagtctacataaacttttcaaagtctgatcacgcatgaagaaacgtggttttgttctgcttgaccctgaggaaagttagtgttaggggaagagaagagggagtgacccaatttgtcagattattgcttgccacaccctttgtttgagccagagctggaggtaccctaaatgaagccagtattaactgtcagatgttgggacagggaatctagaagctgttgttagaattaggctcttataagtaccttcaaatgcctttgcagtgaaaaggaaggtgttccagcatgggagctcattttttcacattgcacagagcctcctcccagggtggagcccttgcaaagagagaggctccagtagctaattgtgttctgtgtctgcacttgctttctgcttgacttccagtcccaaggcttccctgaaagtcgaaatgctcttactccgcccctacccctttctttatcctgttcagctactgcagatgtcacagctgctcagcatttggcttcctcattgatcccacagtggaggcaattatagcagggtcacaagcgacttggctcagcttctttgttatgtctgctttggctctctcctaataaagactgggaaggagataggattctcctacagatttctacattccccaactcagcccatcttcgtgttttaccctctccacagagatagctctctcatgaaaatgaagcagggcgtgtaggagagggctcaggggacaggatgcctgagttttcatctctacatatagtaaccttgggcaagttacccaacctcttggtgtttcacttttctcatctgtgaaatgaggataagaataataatattaacacatcagatcataaaaattaagggtttgcatatacttagcacaatgttggatatgtactaaaatatatatccacacatatatatacatcaacagtactatatacacgtgcatactgttacacacacaaatacatataatacatatacaaataacatcattgttatttcctggcttttttttctctccactttaacacttccttgtgctagaccaggcacagtggctcatgcctgtcatcccagcactttgagaggctgaggcaagcagatcacttgagctcaggagttcaagaccagcctgggtaacaggtgagacttcacctctagagacaatttagaaattagctggccatggtgttagtgcctatggtcccagatactcagaaggctgaggtgggaggattacttgagcccagggggcagaggttgaagtgagccaagatcatgccactgcactccagtctggacaatagagtagagactctgtctccaaacaaaaacaaaaacaaaaacagtactgtgtctgtgctccaaactctccttataccaacactgttcaatacaaatataatgcaagccatacatgtcattttaaatttcctagtagctccattagagaaaaaaataagcaggtaaaattaattttagtaacatatttaacatatctaaaatattacttcaaatggtcagtagaaaaattaagaaattttatattgtgttttcttatgttgatgttttttaaagtctaaactctggtatatattttgcaataacaactcaacttagattagccatatttcaagtgctcagtagctacagtgaaccattgactacataatggaaaacacaaccttattctatcacccaactttatgaaaacttgccaatccagtattttcccttcaggtcccactatcagcttttgattcattcattcagaaagggtttattcagtacttactatgtgttaggcatcgtgttgagtgttatggatataatggtgatgtagtcctatgaattttgtccccctaaaacagtgctccccaacctttttgggatcacggactggttttgtggaagacaatgttttcacagacccggggttgcaggggatggctttgggatgaaactgcttcaccccagatcatcaggcattagttagattctcataaggagcatacaatggagatccctcacatgtgcagttcacaatagggttcgcgctcctataagaatgtaatgtcaccactgatctgttgggaggtggagctcaggaggtaatgctcagtcactgctgcagcccggtttctaacaggccaaggaccggtagtgggtccgtggccagagggttggggacctctgctctaaaattcatatgttgaagtcctaacttccggtaatagaatataactttacttggagatagaatcctttttttgtataaatgtaaggggtagaaatgcagttttgttacatggatatattacatagtgaggaagtctgggcttttagtgtagccatttcctgagtggtgtacattgtacccattaagtagtttctcatccctcaccccgcttccacccttctgagtccccagtaattattccactcttggatattgtcttttcagaggtaaacaagttaaatgaggccagtagggtcagccctaatccattatgatgatattcttataaaaaggggaaatctggatacagacacacagagaaatcaccatatgaagacagaggcaaagatgagggtgttaattctgcaagccaagtaacaccaagggtggctgccaaagcatcagaagctagggagaggcccagaacagactctcccttgtggcctcagaggcaaccctgccaacaccttgatcttggacttccagcccagtattgggagacaatacatttctgctgtttaagccacccggtcagtggtacttgtgacagcagtttcagcaaacccatatagttcttttctctcctatttcaagatagggaggcctccaccttcacgagtggtaaagggccctactgcaaagtccgtgatcaaattaatgaggaaagtaaaggtaattgcaagctaatagggacaaaggcaatacatgtgtaaagaaagaaatatacaatcacaaattatgttaataaggtgtagtgactgagaataatattggggtggcagaaaatttactatgatgaggacatcatggtaggcttcattagagaggtgccattcaagtctttatctaaaggaagcaatgttctggggaatcccaagcaaaaggaatgcctaccaaagtccctaaagtggaaaagcagctgccacactctggaagctgtcagaagccatgtaaccccgagggtggcagcccagatagtgacaacattacttgagggtgggtgagaagccaggagccacaaagcagggccttggacgccatcactaaccatgtgggttttattaagtgcagcagaatagctttaaaggaggcaaatgacatgatgtgatatatgttttcaaaagaccaccatggctgctgagagcagaaaggaatggaggagaatcccagtgtattagtcagtgttctctagagggacagaactaataggatagatgtatatataaaagggagtttattaaggagtattgactcacacaatcacaaaggtgaggtcccacaataggccatctgcaagctgaggaagaaggaagccagtctgagtcccaaagctgaagaacttagggtccaaagtttgaggccaggaagcattcagcacaggagaaagatgtaggcttggagattaagccagtctagtttttctatgttcttctgcctgcttttattctggctgcactggcagctgattctattgtgcccacccagattgcatgtgggtctgcctttcccagcccactgactcaaatgttaatctcctttggcaacaccctcacagacacacccaggaacaatactttgcatccttcagtccaatcaagttgacactcaatattaaccatcgcacctgggatatcccttgttatgcctgtctgctaggaaatgaggagcaactgaggaaagatgctggaagagatggatatctgtgggcaaaggaggattcctcagtttgtcttttgtgggagctacctataggataaggacacttactgcctcgaaagggagagaagaatctcaaatgacctcaccccagacactgtttggtttcttcaattagagcacaggacacaaatggtgagagagttactcaaagtctatcatcaagtgagggcacagcaaatgaaaccagttccattagtgtctcccagagcccctcctctgtcttacttgaaggaatgttacttttaacccaggttacttttaaggctaagctggaatcccaagcatcatcaaggtgcaggtatggtgggcttggttcactgatgaggggtgttcctgtgcacttgatctttccactttgttgactccattgggggcattctcccatatggtgctttccaggtgtgatacaacaaagagagggaaagagatctttccatgctgtgattcgttaattgatttggaaagttgtcagaaaatagtctacacaatgcctacgaattctgaaaaagcagaaattatcaggtgctgtttgatactggatccttccatacctgataaaatttgatggcacctttttatacttccagtaatgctatggctgactgatgttatttaccttatacaagaggaataaaccatcccaaataatccctagcatttgtcagtgatgataacttcaacttcagtgtagcaaatccatcatcatgacaaagtccaatgcagagtgggcagaagaaaggaagccagccaggtaaaaggtagaccaaattagggattctagttgggggcacaaaaagtaaataaataaaatggtagttgaagtaaatagagccccattggataccaccaaatttccttagatatcattaaatcgtatgtgagcaacagggtgaatcaaatcaaagtcaaatttatactcacatgattatagcacagacaagcatctcacagctataatttaccaggagtgattggtggaacagattcagagagcagggaaggaatattctgtgagggtaatgaagaatgaagttaccttctgtcattcaggccaggagaaatgcccctgtgcaattaaactactgtctcaaaccctattttattttctgcaacacaagtgtaattatctgaaattttcttcttggtctaatgttcttgtttattgcctttttccccctactagaatgtaagctccaagtaagcacagaccttgtttgacgcattcattgctatgtccccagtacctaaaatcttgcctgacatggagtacttaatatccctggtggtaggaaggaatgaagtcagagttaagtcctgcagcatggtgagttgacattgcttgactaaaaattccctacattccaggaattcatttgtggacaccctattacagatgagggaactttcagaggaacatgctttgctatgaagataagtcaactggattgaacattgttttttatgtgccgactgctgcattggggatctttactcttctttcaaaattacacctttttcaactaaaggaaaatacaaccaggcatttcatctcagcatgatttgccttcttttcatcctgaagtaacacatcatgtgacctttgctggtctcctgtagctgtgccacattaccctaggagccactggttcaaatctattttagagctcatgattcattctaactccctcctcagggcatgtcacttctaagatttttctcttcaacttgccactaatcccactgaagaaaaaactggcgttagaattcaattttagcttcctggcaggacaggccaaatgtcagcaatatttgaggactgtagacagacgttcccagaagcattctcaaatccacacaacagagtccctggctgtgagctctaatgccaattccctacactagaagtcaaaaaatacccactgattttccttaaattaactaaggaccattctccattcctaccaagagctccctccctggattaagtgacttctggtagaaaagcatctggagttcccagaatttattcattcattgggtcgttcagctagagatgtgaattgtctcaagtaaatgttcatagatttctcaaagagttgaagggcgtacacacatgaatttatttaaagagtaaactgcattaatagcttgtaaataattctagttccaaaatctcacaagtttttaataatatatttgttttataatggtgcttatatctgtaaaaagatgcttatgaacagaattctgacataattatgaaacagtcgagaacatgggctccggcaccaggatatctcagctaaaatcccacttactggctatgtcatcctgggcaagagacttcacctctctgtgcctcagcttcctcttccatgaaatggggctaatggtgatacctaactgcatgggatcattgtgaggattaaatgaagtaattcatgtaaagtgcttaactatagaactctgctgtccaacatggtagcccctacccatacagaactgatttaaacttaaattaattaaaattatatgcaagtttaattcctcagttgcactagccacatttcaactgttccatagtcatgtgtgactagtagctgtcataatgaagaaggcagataaaacatgtctaccattgcagaaagttctactggacagagattgccagaacagacttaaaaccatcccagtaactccaacatttcctttgtttccatgcagtcagtgacccggtactatcgagtccttaacatttcacgtttgttcccttgtctgtgttcccatcatcaccaatctatttattccttgatgatactgctcaactggtcttctgacatctctcctcctctgtggcaccctgcagagtctcccaggcctgaactccactatcattcttcccccgacaggctcagttcctagaattggaactggcagcttaagccttggtcttcatgctccttgaaggcagaggccacattttatttatatctgtatctcccacaatctttggcttataataagcattcaaatgtttgcatgcatcaatgaatctgtaaagcaaaagtatctgagacaggcctgaatttatttagaagtttatttggccaaggttaaggacatgccctggaagaggtttgtgactttctccaaagatgattttgagggcttcagtatttaaaagggaaaagcagactagaggggaaaaggcgaggatatggtagcattactgaatcctcatgttgcaggataaaagaagcaggtagggaaatagtcaattaggtatacatctggcactcggtaaataagcattttacataaggtaagctgaacatagagtagctacctgtggagatatttaacttttaatctatagctatctgcttaggaataaaaggaaaagcagtttcttgcatgactcaacattcagcttaaccttttccttttgacatagtgagttggggtcctgagtttttgttttcctttcacagatctatggataaatgagcaaaccatgctcttccagggaatagaaggctctacctggttcatagtcattctacaaggcatctttctctgaaccacatctgtgccctgaggcagtgcctacaggtgtgagcctgcaggtgctttgaaatcagagggcaaacagggcatcttttcttttcttttcctttctttctttcttttttttttttttttagactgagtcttgttctgtcaccaggctggagtgcagttgtgcaatctcggctcactgcaacctctgcctcccgtgttcaaacaattctcctgcctcagcctcccgagtagctgggactacagggcatcttttctaagcatcactttgcccttgggctttggaaagagactcctcagtggtcacagagttccctgtcatagtccagaagcagtgctcttatccacattccattcatacctgtaccttaagtggggtggctttcagcccatgtattgggatcttcagtcctgcagccccaatccccacaaccactgacatcagcagtaatgatggttccccaaaattgcttccctctttttcttgtcctaaaagagtaatgtgggtgtaacggcagtttctgggatccaactaagggtttctgttttagactgaatgtttgtgtccctccccccaaattcatatgttgaaatcgtaacgttcagcgtgatagtattatgaggtggggcctttgggagataattaggtcataagaatagagccctcatgaatgggattggtgcccttctgagagaccccagagagcagagagctctcttgctctttccaccatcttgtgaagataaaagaacttggccatctgcaagcctgaagggggcactcaccagatcctgaccatgctggcagcctgggctgagacttccagcctccacaactgtgagaaataaatttctgttgtttataagccacccaggctatggtattttgtgatagcagcccaaactgactgagacagttcccatgctgcttctactactaactgtgcagccttgagttcagttaaaaatcctgtgctcagttttcccagccctaaactgagcataagaatgggatgtccttcatagagtcgctgtgacaattaagggagacaaagcacgtgaagtgcaagtgcatttcttgaggtatggcaagaggtaaacagaggttagggtgtcagctctagagttctcactttaatgtcaccaatgagtcataagattaggtccccaattcctccctataaaatgtacatatcatctctagtaggatgactcactattagggattttgttaagaccattgtaataatgagaactaagattttacttaaggaacacttactattaccaaacacaatgctaaatgtccgacctgcattatctaacttaataacctgagtaatccaagagatagctaccaagatgaaaaccaaaatgcctctttatgaccaagttttcagtgtcacaaaccatcacttctgctgaagaattacaatccttagaagcatgtcgccaggtccagcccatactaagaagaattaagctccacctcttgaagggaagaccatcaaagactttgtagacatgtgttttaaaccactacagatgtaagatatatttcttaccataggtcttagcctaaaaagtttgaaagccactcctctgggtggtttatattatttaatttatcagataggaatcttagatccatagcatggtagagatagaggacccatagagttcatacagacttgtagaataggggttggcaaacattttctgtaaaggagcaattagtgaatatttgaggctttgcaggccacgtggtctgtgttgcaactactcagctctgcttttatagcacaaaagcagccatagacaatatgtaaacaaataggtgtgtctgtgttccgatacaactttacaaaaacaggccaggcacggtgtactcccagcactttgggaggccgacgtgggtgaatcacttgaggccaggagtttgagatcagcctggtcaacgtagcaaaaccccatttctactaaaaatacaaaaattagccgggtgtggtggcagatgcctgtaatcccagctactcaggaagctgaggcaggaaaatcactagaacctggaaggcggaggatgtagtaagccaagatggcaccactgcactccagcctgggcaacaaagcaaatctctgtctcagaacaaaacaactttacaaaaacaggtcatcagccagatttgacccaggggcacattgatgaacaatgtttattaattctgactttacagtagactccaagggttttttacttaatgaccacgtctaggtcacacctcagttcacttagattagaatctctgggggtgagaacccaaatatcaatatttgttttaaagaaagttccttagtgatactaaagtgcagccagagctaagaagaaccacggacaccaggcacagtggctcacgccggtaatcccagcactttgggagactgaggcaggaggatcaattgagcccaggggttcaagatcagcctgggcaacatagtgagaccctgactctacaaaacagatttttaaaaagttagctggggaagctaagctatgaggatgcaaaggcatgagaatgatacgatggactttggggactcgggatagggtgggagaggggtgagggataaaagactacacatccggtacagtgtacaatgcttgggtgatgggtgtgccaaaatttcagaaatccccatgaaagaacttgttattcatgtaaccaaacaccacctgttccccaaaaacctactgaagtaaaaataaagtgcttgagccgtagtgacaaaaaacaaaattattatcagtcagaaattttaaaaaaaatagctgggcatggtggtatgtgactgtagtcccagctacatgggaggctgaggcaggaggattgcttgagcccagaaggccaaggctgcagtgagcaatgatcatactactgcactccagcctgggtgacaaagcaagaccctgtctgaaaaaaaaaaaaaaaaaaaaaaaaaaggaagtggggaggaaaggaaaggagaggaagaaggagaagaaggtgaaggagaaggaggaggaggaaaagaataagaaagagaagaaggagaaggagaagaacaagaacaagaataagaaccaccactaatgtgggagatgatgactctacttaaggaaattgaggtcccacagggcaaaagacgagccctgagtcacacccacattggtgtgcctggaccagctgatgtttaccagaaagatgcacctgagcaggtatttgcagacagaaactaagtgtaaagtgttgcctacacaaaacatcgtacctgggcaggccagggtcctgcacccctcatagaggggcttccagaagaactgtgtcacacatgaaacagtgggaagtaacttgagtgcaaagagacaagtgcaagtcctggatgcctcatgtagtaactttgggcaagtatattcagctcttcagttccctcttttctcattcatgaaacagtagcaaacattttagagcatttattgcatgaggcaatatgctaagtgctttatgatctctctctgaatgatactttctgtctctcaaccattacaagagacctaaggtgggtgatgctacagcatccattttaaagaagaggaaagtaaggatcaaaatatttaagtaaaaggaatagtcagcagagtaaacagacagcccacagagagggagaaaatctttaccatctatacatctgacaaaggactaatatccagaatctacaaggaactcaaattagcaagaaagaaacaaccccatcaaaaagtgggctaaggatatgaatagacatttctcaaaagaagatatacaaatggccaacaaacatgaaaaaatactcgacatcactaatgattagagaaatgcaaatcaaaaccacaatgtgataccaccttattgctgcaagaatggccataatttaaaaattaaaaaaatagatgttggcatggatgtggtgaaaagagaagacttctacactactggtaggaatgtaaactagtgcaaccactacggaagccagtgtgcagattccttaaagaactaaaagtagatttagcatttgatccagcaatcccattcctggatatctatccagaggaaaagaaaccattatacaaaaaagacgcttgcacacgtatgtttatagcagcatgatccacaactgcaaaaatatggaaccagcccaaaagtccatcaatcaacaagtggataaataaattgtggtatatatacgatagaatgctactcagccataaaaaagaatgaattaatggcattctcagtaaccaggatggaactggagactaagttactgaagtaacttaggaatggaaaaccaaacatcatatgctctcactcataagtgggagctaagctgtgaggatgcaaaggcataagaattacacaatggattttggggactcaggggaaaggatggggagggggtgagggataaaagattatgaattgggttcagagtatactactcggctgaagggtacaccaaaattttacaaatcaccactaaagaacttactcatgtaaacaaacaccacgtgttccccaaaacctatggaaataggaaatgtaaaaactatatttaagtaatttgcccaagatcccatgagtgggttgattgaggcaagatttgcactcaagtctttgtgtctccaaagcggatatatttgactgccttgctacatctctcagggttcttctaaggattgattcagataatttgtgaatatgtgttataaatattagggtactgtacatatgtcagcctttatcacagaaggtcaattttcacattccaggatatcaaggaggggtgctctagatatgctattgatcagaacatcctcatgtgcaaatgatcctattctggtcagccaatcctgtgtcccctaattgatgaggatgccttactggatcagtaagggccagtcaagaaacagaagccagtctgttatgtgaacagaggatcgaacatcaagaattgttagcaatatataaagtagttaactgggtaactacaaaggtaaaaggataactttaagatatcatataggcagcaatgacgggcagcagcccccatcccctagagttgaggaaacaaagggaataggttggaattatttaaacttagtttaagggagggtagaggcacacaaagaaaaaccagccctcagaggagagatgctgggcactgatgctggtgcctctgagctcagaggcagggccctatgggtctaatatgcagacttctgaggcagggatgcaatgaggtgcaaagagggtgtatctgcaagtattgacagtgtggcaaactggagttcactgctgctggggaaggcactgtggctgccagtggcagggggtttgcaggaatgtaaaagaagaaaccaggaaggagcaagtacctgttccctctcccaccctgcagctttccccatagcatcactaattggcagaacccagcaaggagcagctggcagagcagaagcctggtttgcagagtcctggccccaatgtcacccagccaaatacagggtttgtagctgagggagagtaacttaattagtggcccaggtcacctctttgactactgggcatccagacctacacttttatatgtaggggtcaaggcccttggccccctgaagtttccctgataactgacaaaaggcagattaatcgaagaaaagacatacaaatttatttaacgtgtatacgtgggagcgttcagaataaagacccaaccccctaaaagaggttcagaagcttatatactaacttgaagttgcagaaataatatgggctcagagcatggccaaaaacaggtttgggggccaggctggtggctcatgcctatagtcacagtggctcatgcctatagtcccagctactggagaggttgaggcaggatcattggagcccaggaggtcaaggatgtggtgagccatgatcatgccactgcattccagcctgggtgatagagtgagaccctgtctcaaaaacaaaacaaaacaaaaaagcaaccaaaacagttatggtggcaaattaggttttagtgacaagacaacttacaggaaggagaaaggaggaggcttggctagcaaaggtattcttgttatgtatcatagctgaaatttcacaggtaccaacccttagagaggatagtcaggtaaatgtttctttcagatctttaaggtgtcagactcagtttatctttcctagatatggataaagcctggccgtattaatgcagattctctatagatgcaaatttcccctacaacagacagctttgcagggccacttctgtttgctggctctctgtcagcgatctcaaaatatgtcaaataaatatatttgggggtaaaatatttttatttccttcatatgcatatttgaatttccatacaacagcaaaacaactgtcttctccttgtaagatgcaactatcctttgtacaattgagaaaacattctttccctaatcccaaaatcaggtcaaaaaatctcagcaatcatcacatctatctttgtgttctgttaattccttaaaagctgagttttctgttatctaaagactaaactgtaaatttaatctccaataaaactcatataatataatgagtggaaggaaaaactaagatgtggaaaccagcagagctcaaagttgcaggatgggaagacaatattctgtgaatgtcttaacagtgagagcagaccttcccacttccacccttgattgctgggcccgtgaattctgtggtgctggagaaaacagcaccatataattatctgattgatggcatctacttcattctgtaagacagagtcccatttttttagggtggtgtctcctaaccagcaatataactgagtcttcagtaaaccattctacctttaagttgggccatttcctttcagatactggggtatgggtaaggacctgttaattctatgggcagaagcctgttgctgcacttactttgctgtgaaataagttcctggatcagacataatgctgtcaaaatgctttgtcagtggatcaggcattctgtgagtccataaggtagtgctggtagaagcattgtacaccaagaaggcaaattcatttccagaatattacaatgaggactgatttctgtcccttctatgatggaaggggtctaatgtaattgatcttcccccaggtaactggctactcctccagggtatggtgccatattaaggactcagtgttggtctctgggtttgcctaactgtgctaactgaagtacaaagacaattaaaaagtttaaagtaaacaacattgacagtgatagaattagttaggacacccttaaataaatgcaccaataagataaataccttagagcatgatcaaaccaattatggcacagaattcagttaaacatagatttatctatgacctgatccaatggactttgataatcaaaataatgttattttcaccaggttattgttatcttaatattattgccatagagattttctaagagtgtcactaggcagtcagcagtggccttagctaggccagccttcgtgagaggaagtctgggttaagcccatgtgtagcttctatccctgccaccatggccactgagtacctaggcccattgagcgagcactggggtgaccagataaagaggcttattgacatcaacagaacatgtcactttgtcctcctatcttgtgatatcctttgtgactgtggttgtcctttggtgagccttcatgcagaacacaaatgaaatgggttagaactgatgaacataaacttagcagataggatcatgaaacagaaagtgaagaaactcagagtttttattgttagctcatcctggtgatagacatgaaggaaaatagaattttttttttttttttaagatggagtcccattctgtcacccaggctgtagtgcagtgatgcaatctcggctcactacaacctctgcctcctgggttcaagtgatcctcctgcctcagcctcctgagtagctgggactacgggcatgcgccagcatgcttggctaattttttttgtatttttggtacagacagagtttcaccatattgcccaggttggtctcgaactcctgacctcaagtgatccgcctgtctcagcctcccaaattacagatgtgagccactgctgggattacagatgtgagccactgcacctggcaaaaacaaaatttaaaatatgttcccatcaatttattcatcaaatatgtatcgagaacctgctctgtgtctggcttgaggctgggttctgtatacacaattgataagcatgacagatgctgtccctgtccttgtcatgtgtagcttacaatccagggtgagaagcaggccatttaaaagtgaaaaagtgaatacacaaaataatcgtggctcatcagaaggactgtgaaggaaatgaacagagggagttacaaagagcaatgaggtgggggtgatgagcacttctggggatgaaatggtcagggaggacccctctaagaaagtggactgaagcagaggcctgaagggaggggcaggaacttgagtggaaattgggagggaccgaatgttcctgagagagggacgagaaattgtaagcagggctctgggatggggaaaaacttgatggccaagaaattggtaaacgattgaagaaaaaacaaccagtgaaggagagagtgcctcaagatgagaggtgatattagcgagctttgtagaggtcacatcatctactaagaggccatgatcattctagatacagatgagaagagacctggatggttttgaagtatgggcatgacatgaccttctttacataacaaagatgtcagctgtccctaaattaatctaaaattcaaactgatcctaatttaaaagcaccagcagtttctatttcattgctttaaaaacctaatttgggctgtgtattacaggagtgaagcatcaaagcagagagaccaggtagatggtattgttaccatcttggcaggtaatgatggtagcttggactaggttgatggcagtgagagttgaaaggaatggcatctttctaaaatatggctatagcggcagatttatgtttgtgataggccagtgagatgtaggtttatggatttccaaaagactggaataatatatgcataagttttatctcctgggccaacaaataggtttacctcctaagccaaatgtcttcaaatggtagttgtggtgagcaattctgaggttcatgggaaagaatgcagatgaattagtgatgtctgctgctattcaggaaaaaaccgtactcataagtgtgcaaggcatttgctttctctggactaaatggttcctttcacctcagtgattcttatcctttgttgagcagaagaattaccttggaagtggggttaaaatgcagggactggcacttcatccttttgaaattttaatcaaaagctttggggtgagttctgggtagctatatatatctatatatatgtatatagatatatttttttaaacaaactccaaggcagttcagatgttgaccagtttgaggactgatctaaaataccatcatccatatttcaagagtttttgtaaagacagtggtgttgaaaatttcagatgatggatgctaagtgacaatgtttctgtaagaaaatcacatgcatctggagttataaatttatttcataagataagaccatattattatcaaaaaatcctatcttttttttcttcaacttttatttttagttcaggggtacatgtgcaggatgtgcaggtttgttccacaggtaaatgtgtgccatggtaatttgctgcacatcaacccatcaccaaggtattaagcccagcatcttttagctattctttctggtactcttcctcccctgaccatacaccgacaggccccagtgtgtgttgccctgctatgtgtccatgtgttctcatcattcagctcctgcttatgagtaagaacatgcaatgtttggttttctgttcctgctttagtttgctgaggataatggcttccaactccatccatgtccctgcaaatgacatgatctagttcctttttatggctgcctactatctctttattcactattttaactcaggaacctccaggaaaggaagcaccattactgactgctgttgaaagaatttttttttaagtaaaccttatttttcagagaagttttaggctacagcaaaattgagcagaaagtagagatcttctatattcctccttcccctacacagacacagcctcccctactaccaacatcccccaacagaatgatgcatttgtaacagttgatgagcctacactgatatatcattatcccccaaagtccatggtttacattagggttcgctcttggtttacattagggttctgtaggttttggcaaatacataatgacatgtctctaccatcatgacatgatatagagcagtttcgctgtcctaaaaaatcctctgttctctgccttttcatcactccctccccctcaaccactgacaaccaccgatcttttcagtctccataggtgcactttccagagtgtcatatagttgaaattacacagtgtgtagccttttcagattggctttcctcactcagcaacatgtaactaagcttcctcgacatcttttcaaggtttgatagctcacttctttttcatgctgaataatattctattgtctaaatgtaccacagtttgtccattctcctactaaggaatgtcttgtttgcttctaagttttagcaattacaaataaagctgctatgaatatctgtgtacaggtttgtgtgtggacataagctttgactcctttgggtaaataccaaggagtaaaaggaaacattgttgacatgtgttttcctttgtgtacaggtggatggacctttaagaaattctgtgagtaggcaggtgggttctctccctcacccctctgttagactcatacagtaatccagcttaagcattaatttaggtttctggacagcaatcttaagatccaggacccagcaaggttggtgggtaccaagcagaatttggtgggcaggagtgtgcttcctaccatgccgcatggacacagggacagtccgggttctctttttaacttaacacagatgagaatggacctgctgcattgtattgacaagtcaggcactgacttccctgtggccttggaaagttacttagcctttccctatctagagcagggctcatgatctctaatgctgaaaaagttcacacaaacgagtgaagtgaacttgatataagaaaagtcaactgtattttccgtgacctacagcataagaacaaaacaatatgaccatgcatcatcttggagattatgatactctgtcataagaaaaacttgacaataagtcacaacttttgttctccctctcagtatattgggaatggtggggactatggccaactggacagttaacatcccacttaacaggggcagctgccaatcagctccagctccagcattgttgacagatcttccagaaagggaagagaagccaaaaatttccattaaaaaaaatgtagattgcccagtacagtcaaacacacctttactccaaacatggttgacatggtagctgcttgggactctagtccagagaagaatcagtacctctcctagctaaaatgcttattactcctttccagctttgcccagtgtccaacccaaactagtaatcattctgctgaacttgccatgggatctcctcgaacatactttgcttttcctgttttctcctgctagaacgccgccccccctcatctctcattgtcaccttttgaaatcttacccatcctcccatctcaggagctacttctttctagaagcttttccacttgcctcaaggagctattaacacattgtgtgaattgatttaacaaccagaaggaaaacctaaggctttgaaagattaggacaagggtctgataaatttcggttacttggcaggaagaaattctataatgtcaggtacatttgcgtccaaagggttatacaaacatgtcatccaaatacaatctaattttttatgccctacaacccccctccagagaatggtataaaaaaagactacattttataaagcagtgattcagttatcattcggggagccccaggacactggcattcaagtgaaagtcttggctaacacccagcctgtatttctagacatcagtttgcttctccttgcacacttttacagcagttggaggtcataacctcaagatggcatcctattctcttggcattatctcttgattatgtttacattacaattttaaagttcattgtgtatggtctctttagattcacatttcctcttataaggaaaatgtttataagccacctaaggtcataacaggaaaataaatggaatggaggaatgcattttttttttcagctcaggtacagcatggaaaaattaattgtgctgttctgcctagagaaaaacactttagtgcttgaaggaaatcaaatgtcagccattccttattcaacatgtgttcactgttagaactaagaaatttttctacgaataaatatcactaaaactcttgaaagctgtcaaatcacagcctagtaacaaaggaagtgaaaagaaacatcatttatcacactgttattcctattcacacgctggaaagattttttttctgggactcatctggagaaaattgctgtcaatgtcaacttgaattgtcctcttcctcccttcccacattacccattgctgtaccatggatgccctgtggaaagtgggttacagtcttctgaatcccttctgccacccagacactctgagggctttatgatccattgtgagggttattagtgagaagggagagcaaggtgacactgagtgtctgaggatggcaagttcttagaggtcagcctgagaaaagccttttcaaaacttgaacatttccttataactttggcaacaagagatgatgacagactaggacaggaaggtatttaaagatggcaagagcaagaataaaatgaggctcttaactagctgggtgccttagaagagttggcaactggcagagcagatggaacactctatgtggaagttaagacctgagtttaaagcctgagtcttcctccaccttcctgtttgcagtggcacatagtaggcaccttaaaaatatctgatgacctgggtagtaatagcaaaacagtaacaacatctcctacttattgaccacttccagacaattcactagctataacaatgctattagagactgctattcccatcttagagatgagtaacaaaggctcacaaaactcacttagctccatggttctcaatagagaatattttgcccctaggggacatttgccaatgtctaggaatatttttggtttttttggttagcatgacaggggaaagaaagctactggtttacattgggtagtggccaagtaggctgctaaacatcctacaatgaataggacaggccctgcaacgcagaactattcattccaaaatgctagtagtgctgcaatggaaaaagcttgattctcgattaactgatggaagcatattcttctaaccacagtgccttaccacctgaccagtataatatgattgagcacctagcaaagcacatgctcaataaatacttgttgaataaatgatgaaagggatttgaagaattgttttactttaggaatttttctttacctttctgggtctcaatttcctcagctgtaaaatgggttagtgacttttttcacttgcacctgcttcacagtattattacgcagtttaggtggtctaatatatttgaaagttctttattagttgtagaaaaagactgcataataagagctttttaccatagaagcaagcgttaagatagaagcaaaaaaaaaaaaaaaaaatgcgaagggaaccccggaagtagcaatgaaaactcaatacacaatgttgaaatttaaggataagatttcagtatacacaatagataatattagcagaaagaaaaagtactcatgataatcacccctgaaaactgaaaatcttcaagccaattcatcctggccctaagtccctggtaccctggggtctcacaaccttccctttctgattatttacttcctagtcatttaattaaaaacaacaaagtcctttcattggcagcagttaagtgctttttcttaggtcttattaacgttcactcaataaaatgcccctggctgttgatagaaattatttctacttgaatcaaatggcattttgcagtatttcttgccccatttgggactgtttcacaaattccctgaggtggtcatcgtgaacttacaaacctatgatctgatgttgaaggcagttttctttccttgattcgagtggtgaattttagccattttaaattgctgagtgacatcagccctccagaaaaacaagaacagatgggagggatttgccacccccgtgttgggccccctcaaccctgatctaagcaaacaagactgttgatccctcttgtcttccataacaaatctcctttcggtgttttgcccttggccataaaggaagaaacccatgcttgtggctgttcccaggctgttgctacagctgctgcagatgtgctacttggtggcagcccacagctgtcaccatcattgcaatcattttagtaagaactagcatgaggccagcaccttttgagcattactatgtggggaggaacaaaggatacatgtaataatgacaaattctctagtccctgatggcttaaaatacatttctgcctaactacccaatgcattctgggaaggctctgtaagcaaaagatgctatcaaaatgcataatgttaaataaaaggtcattttaaaatcctactgaaataaaaatgagttgggctttacttattatgagtcaccaatacaagacagacaaggtacattacgaaatatattccataaacaggacattcaaaaaggcaaaatcagaaagaatgggaatgacacacccttaagtacatgctattatgaaatatggggattatgttagcctttgcttgtctgcagatctgcagattgacaatatttttatcttatatcatcacttgtagtgtacattagctccatttctcccctctagccacaggacaaaaaagagaaaaacttcagaaattcaaggaaaataactttctagttcacatttagcatttaaatgtatttctattatttgggggccaaagacgcctttctgtccactgatgtcagctgacccattgacttcctcccctacctgactttctgaaagaactttaaatagatggggtttttaaattgttgttttccctctgcaggaagacatagatattttatgcctctgaagtgttataatacatagagaaaacgaaaatgttcttctgtttgctaaaacatgcagggttttttgtttgtttgtttgctcactggaatatagttaacttattttcttagcctcattcttcgtaattgtcttgcttaaaaatttgtttaattgacacataataatcgtacatatttatgggttacatagtgatgttttgatatatgcaatgtatggtggtcagatcaaggtaattagtatgtccatcatctcagattttatttctttgtgttgggaaacatttaatatcctcctcctagctatttgaaactatataatatattgttaattatagccatcctatagtgctataaaacaggggtccctaacccccaggccacagtcaggtaccaggcattactgcctgagctccacctcctgtcagatcagtggcagaattagattctcataggagcgcaaaccctactgtgaaccgcacatgcgagggatctaggttgtgtgttccttatgagaatctaatgcctgatgatgtgaggtgaaaagagtttcatcccgaaaccatccccccaaccaatccccccacccccccgatgaaaaaattatcttccacgaagtttggtccctggtgccaaaaatgttggggaccgctgctataaaacactagaagttatttctcctatctagctgtaattttgtatcctttttttcttgactccaccactttctagctatataaataagtcacttcacattctggacttcagtttattaaactccaaactgaaacgttaggattagtctgtttttaaggtccctctctcttctaaacattaacattattatcaccagtttttttatttatatggcacgtttatacttcaccaaacacttccatataaactctacgcattgtttctttgattatagattccttaatcttgatcacttgtgtcaggaatgtctacctgtttgtgtgccttagtgggtgttaccaggccagctaggaactcaaaattttgtttttgctcaatttcagtaagtttccttagttgaagtttttgagtgaaatcaccactccgttttcatctaattcagagatctgttgcactgtgccttgtttgcttttgtggaagcaaagtaggtgtgttgtgaattacaaaagttatcaaatgggtgaatcccttactatctttcattgatagcgacttttcaactctatgaaatcaaagtagtaaaatcagtctactttgattgtgagctataagttcagggacagagtttccctcaaaatgagctgcataatcttaacctgccatagggttttcttacagttcctttcacttctatcaagaagagagaattctcctccagcatctttctcagaagagtctgaaagcccctttcccagaaactgtctagtaaatgtcgtcttgcatctgattggtgcatgtactttgtactaaagtatcctgtccctaattccattactctgaccaggtgcatagaatctgctgaatgtcttaaaccagggaagacactcacctagaactgaggatgggttgagctttccccaaagtgtgtagaccactgaggaaatggtggatgtggattgaaatttaggatatttttacaaaggaaaatgaagagaaggatgtttagttgaatcttgggtatgccctttactcgggcaagtcacttaaactccctaaccattaatgttctcatctgaattgaggataaaaatctttctttccccagtaacagtgagtacatccagtgtccacatcttagtttgcaatatccttctcccataaaaagagccagggctccttgtttgaaatggctgattctacggctggggtaggcaatacacaagctgagcctggatcatcattagagccaaaaagttgaaaagtgctccaaaaaatccccccaaatgatggacatatgtcaaggggaactgggagccaacagaaagaattttcaatgcccaaatttgagcaagaaattaaataatatactgagttataactcaaaatataaaataaactttcctaagtccatactgtaataaataattggatgaattaataaattaggaaggagacagaaatggaaaacatatttcccatccaaaagaattccaaataacttaaatagatacaccccaaagacgtggagcaaaacttgccctgtaagtttggactccatgtagtaacttacttcaaagaaagcagtatagagtgggaggagagaaaaagtaactgtacagtaaagaaatctggaaacctttgccttagccaggtgatcaggtttgctatcagtgagaagtcatgttgacagcatatacctttgatatgacatattgagaatggctcttcgcttctgtagtcttcatcccccaaacccataaataaacctatccatgagaaaaactctagacaaacccaaatcaagggacattccacaaaatacctgaccagtactcaaaactgtcaaggtcatcaaatgcaaagaaagtctgagaaaatgtcacagcccaaggagtctgagacctgatagcaaaatgtaatgtagtgtccttaatgggatactggaacagagaaaggatgctgggaaaaaatctaatgaggtccaaataaattaagaactttagttaataatgaagtatcaatgtttgttcatatgttttgacaaatgtgccatggtaacatgagatgttaacaagaagggttgctgggtgtgggatagacaggaacattctgtactatctttgctacttttctgtaaatctaaaatgattccaaaacagctgatttaatacaaaaaagaacctttcttacagaattgtaatcacaaacgagcctttgtatgctataaagtgcctagcctatgcatggtaggcacttggtatatttagtcggtttggccaccattggcaatagctgtattcacccttaacccttccaatccatcctctgtgtgagccagaatgatgtttatgtaatgctcatctgaacttctcatccctcctcccaatatgtctcaccctaatctctagctttaaatttttcaatgacgtcttattgcttctagcatgttcatagagacgcttagctttcccatgatctacaagaccccacacacaacttggccctgcctgccttcccagaccatccccattttactctcctcctcacccttactccagccacactgacctgcttccaacatttcctctggccacaggccattgagacatgctatttctgtctgaaatgctcttcacttctctttgcctggttaacttctacttatctttagttcctaattcaagagctgctaggccagagttctttcacataatcttgttttcatcctttgcagcagttatctcttggtaagtttacattaatgtacatggttatttgattaatgtttgcattcctccctagattatcagttccatgaggaaaaaacagtttctttatactcttcattgtattcttaggacctgtaccttttctggagcagtctatgcttaataaacatttggagaaaaaagggaaaggagaaggaaggaaagaagaaactgcctctggtaccatcctttttagaaactggttattttccagagatccagatctcttaaataaggattttgcaatgttaaactagtttcctaacctctcagctttcaattctgttcagtagcaaagtgagagaaagtattcaaatggactagtttgaaaatcctgtcactcactgaacactagcgatttcacagatgatttctgaagcactcaaatttagagtgggaagaaagtccttgcagaaggtgtacacaaggcagtcatgagtagttagcatctctagtgctttttgggcttccttgcaagaactcccaattaagctccagtccattctggcattttctggtcatttagtgattcactgcttcctaggggtgtagattccctgtgctaaagtagaataaacagtgaaaaaaatagctcctgcacttatccttaatttccaaaaaaagtggagttctttctttgattccagaaatacttgtattgtggtacagccacaaaatctgtgaactgtgaagtaggattccaattacttaagaaggaaggctctacctttccaaattgtctctgtcccttgtgctgccaaaaattgctcactagcatttcctctgattattttcttactgcctttgaatttcttagttaataagacagcccgacaataaatacttcgtaatgcatcaacagatacagacacaatgtctcttctgccatgattttcctccaaatgaggtcctctggagaacaaaaggcctgaattgccatttttctccctcagttttcatccacacccagcaccctttattttcccctacctgttacagaagtcagtctgaaatgaaatgtagaataaagtggaggaatcttggggatgatgtagatgtgttatagtcatcgagtcagtgactggagaacctgagcttttcaaaatgacactctgtaacaaggcccctgagggactgcattacatgggaatccagtgtaggtttttgttcatgtagacgtgtcaaacaacaaaaatcttgcccaccatttatttcattcttcagggcctatgaagatcaggagagaagccagctatagtttctgccctcagaagtttctagtcttgtaggaggattagatgtgtacgcaaataataacatcaagatagaacaaagtgagggccagtggaagggcaatagaaggaagatccattttcttctttctttccactaatactgtttattgaaactttaacacaggccaggccctgtgccagtctctaaggttatgatgttgagcaaaagccatggaactcataccctaatggagaaacagaggtcagtcaggtgaccacaccaacagatatacaattacaaactaacctgggttctgtgatggagagggcatagttttttcaaagtctttgagaagagtctttgagagacaggctgtggtgaaaaacctgccctagggcagaaggatggcaggtgctaacttagggaagagtaggggaggagtctgttagacagggcaacagcacatctgaggtgggttctgaagccaggagatcctagtcatgcacagatgtgttcccagccaagaaaactgtgtcagcaaagacagggaagggaaatgcatggagcagggtcggggaatcaccaaatggtcaattcagcaggatcacagggaacatggcgggagtggaggctggaaaggtgggcactgagcccagaccatgaagaaccaggatatgtcctcatcatttctaaagattgcctcatggaatccacatggtttcagaacctctcagggctgtagtgtaggaatgagcctctaaactcccagcacaagcaccaccaatattgtcactatttctcacagagaaattcttggtttcatagttttgtattatgagcatctgggtggtactttcatttttaaaagagctacactgattttttaaaaattgaaaatcatcttcatggacagtgggagacaggaccagatgtgtgctttagatcaatctgcggcagcggaagatagagaggagggagggagacaagttgagccactatcacagcagtccaggggagacatgtcaaggtgctgaagtaaggaagaaataggtaatgaagagaaagacacaaacgtatggagagctgccagacagaggaggacaggagagcatttggcaaatgattagatgtgtgtgacaatgagagaataaagtcaaggagatgctgaggtttcaggcctaaatgcctggaagagccaaagccatttataacaatagataattctgcttgaggacagcttggggtagggtgggccaatgtgttcacttcatctgtatggtttcactgattcctcataccagcccaaagaggaagacgctgtgcttatccccatttttcagaaaaggaaattaggcttatagacatgaagccactctttcaatctcagaatttccaaatggctgactcaacttggctcttagccactgtgcattatgtctcacctggacaatttctgcagctgctccacctttttttccttgcctactctccgtcttccactgccccaagagtaatccagaacacaaacctgattacggtgctcccttcctaagtaacctttagtggctccccatagcctgtagaggtagttttcttttttaaaagttgtgtaacagtttttttagaaggaaagtttatggaaggatctttatataaattataattaatttatcaatgattctgcatccagtggaggacaaatatgacacagctttatttttttccagtttttaccttcagcattgctgtgccagaactccctcttccatctaatgactccttgtatagacttcttagctttccagtcgctttcaaaaacccagtctcatttacaatgtcaattttatatccaacttaaagctcataacctccctgcctcttctgtgactagcttttccagggtcaatgcagggagttgaaaagtcttgggcagtgctgacggggaaaggcaaagttcattttacttagttgggctggtgagtgcaatctcctctccagttatttcactatctctccattggtcccactgtgtggtggcagctaagtgctggtgctctcatgagagacatggatgagttacttgggagcccatcagtgggagctgctactcttagggagatcttcatcagcttcctgtcttccaaccacacataagctcccatctctgggacttcatcctagagcttcctatagccgggactataggaagtatctggaccagcatctggaccagcatctctctggaccagcatccacctctaggatgaagctccagtaagatggccctagttcacctataataccttcctcagtgtgcgtttaacctgtaagaaacccacacaactttgacacatcaaatagtggcagtagaaatatagccacaagtaccccactccagcgggctgtctccctccaattctttgtgttttagatctgctcaactagacacaaggcaggtcaaccagctggctgcaaagcagactttcaacagaaccatgaaaacaagatgctcactttttttcaggaattccaatctctaaaggttattttcttggtggaaagcagcaggaagcaccacaggtggggtaaagaaaagctacagcaatctcttttctcaggctaatgccttgggaaccctgaggggtttctttttctttctaaccagtccctcgcctctcctttcgctgttttcttctcatatacaactggtgaggaaagtcattggaatgatgactggggatagtagggctaggttggacaccttttaataagccctggagggtatgaatgttccaccaatatttatgtctccaattcctgaacaccaggaagaatcccattcaacactctgctgcagaagtttccttaggtcaacatggtttctcttttgcagttttgttcatgtaaaacttgtatgtaataataggcatgcatttaggcttaaaacatttttagcagggaaagaatgctataaatctggggcccagaaatctcaacttctccctcacttatcagggaagagaaactggcttaagatgttcttctgtaaaatgaattcattgcagtttcttccttctgtacaagataagtgtggtttctcattccagtggaaaaaaaaaattcctgagaaacacagatgttagaatcaagcattaattttttcttccttatgaaatagtgacattagcaaacctaaaaacttaactaaaaatggaatttagtgagaaaggagggcaatatattttgccttactggaaaaagaatggggattttctacttttatcttaaagtgaagtaaataatgagatagtatgattgccttctagaaacctcctcattgtgcctatttctaccccacccccagattttctgcatctcttattctgattcggctctgtgcagcatctcaggcttttaaatcaaggagaggggattgtgtgtttgcatgaccctttccctgcaagcaacaggttgaaggtgtggtttgtgagtgtgtcaggatcagcagccttgtgacagagtgttagaagatagtgaatgcttccagtcactctattgcagctgtctcctggaacaaggaggcttgcaacataaatatgcatacaacacaggggtcagcaagaccccagttgtttaacccctgtgtaagatattacacacctcagtgagaaaaaaccccaaagcactccaaagcagaattccggaaatacctgtctggattgttcttgcaaacctggtgccttcttgaacaaattttttcaccacatatgaactgtcaaaattctcattcttatctcttttcttcctcaaattattttagatcttagcccagctggtaatactgggaagggtttaacagttagaggattaacattatgaagttaagcctccattgtcagtttaataatattctctttgcccccataatcaaatgttgtcagggcaaacatcttactttcctgagatcagcatttacagcagggtttctcagcctcagcaccaatgacattttaagctggataattccttgttgcaggggctgtcttgtgcattgtatggtgttgaacagcaccccaggcctctacccactattggcagtggcacctctcaccctccattgtgacaacgaaaaatgtctctagactttaccaaacatttcctagggacaaaattgctcccccttccctatccaagtaataactactgagaacttatagagatcatagaattttgtcagaaaaatcccaatctgagctagtgtcaaatctaaacctttgtgggtttttctggttttttggtttttttgctgttgttgttgttttggttttttgtttttggtgctagtggtgaggaggaaggtgaagagactggttgggggagacttgacccttttgtcttataaattgtgatggctaatgtcacagtttatgaagactatttcctgaatttctgcagctttgcttctctgataataaactgaaggttgccatgaaattaatcactctagaggggtttgcagagggaggtatagctccaacccttggctgttctcccgtgttggccagtataaattgccagtgcctgttggtttagagattaattattaatgataaggaagcttatgaatttttcagaattttctcctcttagggtgcatgtctgacttcctatcaggagcataagatcccttccatccttcctgcatcaaagccccaggctgtcacccagggcgctatcttgttccatgcaggctggctgcatgtgttgactctaaattttttaatcagccattttccaacacaactgcacatgtcaggctgtagagacagaatctattaagcacggtcagaaaccagcaggggccttgtggcatcatgatttgatatctctatggcagaatttcacaataaaaaattcacaggagtacacagtttgctgaaatgtcaccaaaacgcctgcaggacttaaaaggaggtgaaacaccatcaacaccgacaataataatctctgaacagtcctttcaacttctggaagaattttcacaactatttaggtatctgattttccccaaaccctgtacttttagatcacccacttatttttatgaaataaaatgaataggtagctgatcctgtcatccttaatcaactgagtcgataatgatgaccattacaggttgaatgataaaagcatagataatttttcaattttaaaaaatcgcatagaccatgttaggatattgacagttccctgttacatggaggatgaaatatttatagacaatcactcaacaaatatatattgaacacctcttttgtgtcaggaacttgctgagatattaacctgaaaatcatttgggtttcacttcatcttaaagccatttcttaaaaatgtatttttccactctcttaccttacaatacaacaagcatcttgttgaaaggcatcattttacaaatcaattctgtgtctaggaatgttagcataaaagggcagagtattgatctgatatatatatttggtattgctttttaaaaacacaattgccatcattgtacatttacttttttgtgaaagtaagttccttttgtaaaagtggttacttaaggttcctgcatacgtttttgttccttctgagattttacagtaattggggaggattttacagtaattggggaggagaggagggatttgccataatcactacagaatgttttctctgaagaccctaaaaagcattttcttagcttttgcaaatatgaaagggcaacataagcaggtgaactacctaatcttaaaaacagtttcacagaggattagcctggtgtctggattacaaatacaatttcaagagataagaagtcatctgtcttcatggtggtttaccatttaaagtgtttctcaggctgggaacttgtaggtacattagaagtaaattagattacgagaccctagggccatcttaatttgaacttcccagtgctgaatttgtgtattgcagccaatattgttttaatttatactggttaaaatactgcttatttgcaggtttctctctcagaggagattactactttcttctatttccctcctctaagccaaggtcatatttgcctttcacaatgcaaattaaattatgttacaccatgttcacttgagttaatttaaactcaagctaagtttaaattagttgtagaagtgtccacataggccaggtaaactagagaatcaagcaatttctagatattcaaatagagtctatattttaagcactttaaccaaaatctacaatcttttttgaggcagacacactaatgcttataaaatattttatgtattttttttttcattttctaactttctttgcagctaggttagggccacaagattagtttcagcaaactggctttcagtcctccatgttctattttccctgtcacactgagcctgaaagctacatgttgaggtagcagagtcacaaaatggtggtgcttccatgtgcttggatccctgagtaattctgtggaagagagtcccccataattggcactgggtaagtagagtaagcaagaaataaatggttattgtgttaagcaactgagatttcaaggttaacttcttaccatggaataaattaacctatcctaattaattttcctttttaaatttatttttcaatatttattttgttttcagtacaacacatgattatccttgcttatgattgacatgggattatggacctcagcttcaccaaacatacaaaatctacttccaacttcttgaatatagtgagagtaggcatctatatagtccaacaaataagaactgtctcatgtgttaaagtagatgatacccctgatacctttgtgcatttgcacacaatgcagtatattataagcaggacatacttgataaatgccaataatgtaattttgggttttttagttcgttctttttctcccatctgttggagaatttggccgcttactctttttaataccacctcctcttcttaggcacagttacttttaaaagaactaataaaaaaaactacttggttatggatttgatactgggaacaaactgtttctttgacaggtcttaatcaagatgaaactcacccttttaaaatatttttgactttgaacaatggcaaccccatggtagacaaactcttcagagcaggcaaaatgagataatgatacatgtaggtagacttatgaatagacccagtttccaccaggtactgtttaatgatcagcctgggactggaaattaagcacatcttatatttgtgacatgttgctcaaaggaaacagtggtgcatgtgacagttctcaagtaccctggaaaggttttaatttaattaattcacctcagttttaattgacatgggcagctctgtgatttacagatctgaatgttttttactacttgagctttcttacacacgtgcacatatatacacaccactcacatgcatgcacgtacacattcacaaaagccacaattgcagaagctggaaaactcaatttccttttgaccttgtgaataattttataccatgctatcagtgtttgaaaatgaggttcacttcttcttaaaataaagagcaggtattttttagcaaaagcattcgatttgattagaggtattttaaacatcactggatgtttttctggacttcctgttgagctcattattttgccatttataaaatgctttttaccatgacttgatgctgcttaaagagcaagattatttaacagtacaaaaaggcatttcatttcccataatgtttatgtcaaaatctccagagaatataatcacctctggcttgttttgaaaaagtgaccatttcccatcaaatcagctgcccaaactaaatttcagaaattagtaaaaactaaattgaaaaacgaatggcaatgaaaataattatttaaatatatgcaatgttttactagttttgaaaaatataactcttctttttgttgaaataattctgaaagttatcaagttatgtatttatcctgctctcacagttcataacataatgcctgaaacaaggcaagtgtttagtgaatatttttaaatggttagttgaatactaatatttctaatttccagatgaggaagcagagactcccagagtttaattggttcacacctctattattcccaccactttagtcagttattctctgtcctttctgcacttaaatactcactttcatttactcattcaacagaatttaataagtttaaaccatttgcattcagatttctatttaggtcatgatttgagcacctattaagtgtcagacaccacactaagtgcctggaaaaacatcaccttaactcctcaaaacatccctgccacatagatgttattatctctatctcaaatttaactctgcaaatatttcttactcccttaccatacatcagtcattggctatttttataatgaacaagacagacaaggtctttgccaaaggcacttacagtcttgcacagaacatgccaagaagcaaatcacacaaatgtgatgggagtgataaaagaggaggttcaggatgttagggtggcctagaagaggtgaccttggctgagaccaagaaggcccctaaggtagcaatattgatactaggctttgggttaatgatttactgttaaccagacaaagatgacagagggccaggtgcagtggctcacatctgtaatcccagccctctaggaggcccctgtgggagtttgaggctaggggttcaagaccagcctgggcaacgtagcatgaccccgtctctacgaaaaatacaaaaatcagctgggcatgatgatgcctgtagtcccagctagtcaggaggctgtggtggaagaatcacttcagcccaggaggtcaaggctgcagtgagctatgatctcaacattgcattccagcctagacaacaaagaaagaccctgtctcagggggaaaagaatgatgacagaagaggaaagagaattcacattgaccaggggccaagcaagagtatgtcatgttcgtgaacctagaagtacagaatggtctgagcgtagagaacaagacagagtggtgggagatgaggctggaaagctgtgcaggagccagatggcaacagctctcaacgccttgataagggtctcaggctcttactaccaagggaagtggaacgttattgacaggtcttaagcaggagagtaacatgagcaaatgcacgttccaaaaagatgagcagcctgccttgcaaagcctgagttaaattcgtacttcatggcgtgtggttttgcagcatcagcaccacccaggagatgtttagaaggatgaattcttggttgtcacctcaagcctgctgaatcaaaactgtcccagggtgaggcccggactctgtgttttaacaagttctctggttgatttttatgggcaccaaagtttgagaaccactggattttaatagaggttttcaatcctggctgcacgttggaatcactcggagggttttaaaaaaattggctgggtgtggtggctcacacctgtaatcccagcactttgagaggctgaggtgggtggatcacgaggtcaagagatcgagaccatccgggccaacatggtgaaaccccgtctctactaaaaataaaaaaaattaaaataaattaaaaaattagtcaggcgtggtggcatgcacctgtagtcccagcttcttgggaggctgaggcaggataatcactttaacttgggaggtggaggttgcagttagctgagatcacgccactggcactccagcctggcgacagagcaagactctgtctcaaaaaacaaacaaacagaaaatactgctgcctgagccccaacccggaatatcatatttatttggtccaggtgcagcctcaacattaggattgccttttatctctctctggggattcaaatatgcagccaggagggagaactgctttgtatcagagggaagcaagagaggatgaatatgaaatcggtggttgaggatggagatgatgggagcctggcttagggaagtggatacacagcatagaaggattcaagagatatttaggaggtgactgcacagctagcaagggatagaccaggcctagtcccctgtatttttcttcacaaaaccgcctgcttcctctatacccttggttttggctgccacacttacacagaaagacaacacccactctcttctttgaatggcttcagttccttgtgtcttcaggatagtgcaggtgaattggacagtctcccagccccagatataaagattattaagataatccattaaaaaaaaaacacagctgtatcctctatgctggataaaaaacatagtctctggcctcaatagtaatacattatggccttaaccttgcaacccctcatatttgggacatgatgctaagtgctttatgagtaccatcttctttcgttttcataacaagcctctgctgttggcattgttactgttaggactcccactttgcaaataagggcacagacagaggcagcttagtagattgtccaatgtcagggagctggaaagtggcagagcaaggatgtgaagccagatctgactgtttccagctcctgggtctctgactaccatgcgctatgactgctctggggtggaagagagagctaaggcacagggcacatagaaagcttgctagcaattcctataaaagtgggttgatgcctggctaaagtaatcaaggagggcttcttgaagaaaggcctgaagccaaattctgaatgacacatcagacttgaaatggtagaaaggaaaagaagaggggaggtcatttcaggactgcggggaagatggggaaagactggttgagcactacaggatcataaagaactggattggttttctgtttgggtttttttttaatgtatttattggctgcttgttcagaaaattgctgcatttggagctcttgggttatatttactgcattgccagaagccagcaaagacataaaactggtgactcaaatacagcagggttctcattggctggcaaaacctgggagctaaaccctgcattttgcaatcaagaagtacatcattcagaatggaaactttgacctacccaaggtcttctcttgcaaaggaaataaggcatgataaagaaagacacaaatgatcttattttaactcttccacagattaggtagtatcatctccttggatgattttttgtaacaacagaatgtaattgactgcatgggagaccgaactccatgttctttctacaaataaccctgaaacagagcccttagtgaagactcggatggatggcaaggctgcagatttcatcagagtctcttccagtaataatagtagagttatatacacctacaatgtgttgaacccctgctgtctgagaatatttattgtcatcattacaatagtcctttgaggttattttagtgcagcagctgtagatgctccgagaggttaagcatctggccctgatcatacagtgaatatgtgtcacaggcagcattagatctcaaggttttctgattccgaaatccatgatttttttcctaaggattattccctctatctcgagctaattatctctgaaactacaggcaaactacttaaccttttaaagcttggtttcttacccaaaaggggaggaaatctgctatactactttaagtgctgcagaatcagaacttctgtaagggagaatatatgcaggctatggaatgccaaggactaatggctgctaagatttactgaacgtgactgcatgccaagcactttgctaattgtcatatgcatccatcttatttaatctcttatcgatcctatgaggtaggtattatcattattgttcccaatttagagttaaaagagttgaaaaaaataaaagctagggctcagagaggtccaatcactttcctaggattgctcagctttaaagtggaaaggcaaagatttgaacttggacagtggagtgggggcacctgctgaccgtgttctacaggctctacatttaaggtggacacacaagagacaggctttaggaaatgagaggaaggaatttggaggcagtaaccaggtcttgaatgcggcaaaaacagccacagttcaaaccccagtgcagtcttgtggcaggagcttgggcacccccatctcctggttgggaactgacactgtcccagctgtaactttccagactgcagtgcaccaggaaggcagcatttgctggagcagcttgtctctgaaggaggataaaaaaacatggggctgtggaggaaaggagggccctgccagctgatgggagtgctttatggggaggtgcctccaccctcctctgcagtggctcttggcagcctccatctcagacactaatctctgggaacccagggggcacactgggaagtagagagaaagcaaagtagcgagaaaacaagctaaacccaggtcagcaggtggcttgcactgcagctgcttatagagacccctgtctccatccccaattcccagaataaggaacgctttaatcaggaaagagactgattataggccagcaaagttcagtctttaccgatttctgcagagaatggcacttgctggaacacagccactaggcagcaagacagagcaaactagaagttagctgattgggaatttggtcccagccctcactgatcgttgtgcgactgtgggtaggtcattcctttttgggtcacagctgattaactcagtcctgtagctagtcaggcagtcattttattcatctgccaggcatttacccagagcccactctgtatttgccgctgtaatgtacaagtagcacctacgtaagtaggtgccagggatccagagataagcaaaataacacacatccctgcccttatggagcttacagcctagtaggcaaacaccaaatcacataagtacctgtaaattaatggtgatatatgttagtaagggaaaggaaaggtgcatcattataaggagagacaggagaaattcacaaatctggagaacagagcagagttgctgcaaagctgaaggatgaaggataagaaagggttaccagtcaagggagagataaggaagagtgctccaggcatgaggaacagcctgtgcaaaaacctggcagcaggagaaagctagccctcccaaaagcctgagtgaagtatccagtggagcatactgggggaggatgtggtgcccgacaaggctgcagagctcagcagggggccacaccattagtctgaggttactacattatccctgaaactccttccagccagtctggatcactatcactttagtcctgaggctgaagttggttcatttactctgaagctcagaaccataggtttttccagaaagcagaacaattattcaaataatgcataaagtaatctgcctatttctgtttacattttctgtgtatttgaatcacatcctctctttggttgactgaaggctgcctcttggcagcgacactgatgactttggaagagtctagggttgaagttgcctccttatcatcgttagtgcatgagcaccagaaaattcaggcatgcccaggggtagctggtacccaagggtgtctcccaggcgcactgtcaaggccaattctccaaggcctctgaagctaataaggaggctccaggcccaggccctttgacaatttcttcatccccctagaggtcagacagggcattcccaggtgtgaatcattttgctgatacgtagacctatttgcatagtgggattgcttcctccctgtctccccccacccccaaaattctgtctgcagacgtgagaaaaatgaagcacacaggaaaattgcctaggtgagcacatcccagaatgtgttcctgggaacacatgatcaggtacatttgggaatgtggggctgcatgaggttgccttggtgtaggatttcttgctcatgtgtgttgtgtgtctccagaaatgggatagagtgagtttccagactttatttgatcacagaatcctttcccatcgaggatctagagaacctgcaggactgatattccctagaatataactttgggaaataccagtctaggcttttcagataatcctgaaacacaatagctgaaatcttgtcatttctctcagatgaagggactgtgcaccgagaggtcacgactttggctcaagatcccacagctaaaggcaaactaaggatcagaacacaggttcctaacattcattccagggtcccagggttccccaccctggtctgatttctttcatatatcctaaaggcagggaggagaattaacatctggtgactccccattctaaaataggggataactctataaactttgctaaactataggacctctatgtgccaacacctacctcactgggtgctttgaatgtatatcatctgacttaatcctcataacatgccagggtaggtatcttatcccagttttacagataaggaaactgaggttcagaaagattcgattgcttgttcactctgtgtcagtaaggaaatggcaaaaaaaaaaaaaaaaacaagattggaaccaagtcggtctgacttcccttggacaatgcagcacattttgtcattttgtcctttcaaatagctatgcaagataaaatgatgtccactctgcagatgcagaaactgaggcatggtgaggttaagaaacttgacaaggttgcaagggtgcaactccaccctgctatatctcaagcctgtgtttaaattggccctacagtaacaggacagagttttcatctctgcattgacggaaagagtaccacccatgagctagagacaattgtctctggtggacttgaactgatggctcaggcaatacctgtctacacttacacagtgctgggcttagttctccatcactttaaaggaaaagcccaaggaattattttcctctacttgactgacaagtcaaaacaaccacacagcctctgcttgacctcttctagtaggaagattatttgtctaattaggtaaagagcctttatgcgcatgtacatttttgaaccctaatgatctgccaacgtgaaaggcttgcccttggcttggttctccagctgatctttcctttcctcagtggaaaagaccagcgcaataaacagaaccttgtttccatggaagctcactctcttgctttttctttccagcccttgaaaaggtaattacttgatttctctttatattttgggatttcatagagtggagctgtcaagctcctcacgcgaggatggccttctctatcatgccaagctattttagggagcttcagttgcatttcccttttcatcctctcttcagatcattagctgtcaggcagcagtggccgccttctggtcactcccgctaattaaagtctaacagagcaaggggactcgaccccagagaaagtgggagacagaaaagccagggaaatttgtcaagagatgggagcctctgatcacatcatttctgctgcacagactgtcagaccgacaccctacattcacgccagtgagggacactgtcccatctggtgccttctcttctgaacctttgacgccccactgtggcccatgtcagaaatgcagccaacatggactgctctaaaataacaacacaaggagcagcagccaccattcatgagggtttgctgcatgccaagccatggactaagccctttatatccgttgtctccgttgattctcatgacaacctcaggtctcattaacctgattatttagatgagaagagctggagcacagagaggttaagtaacttgcccaaggtcacacagctactaagtggcacaaccaggataaggacacacccattgctattatttcttagggaggaatccagcactgctacagcctccccaaaagaaatcagtcatgacaagtgacagagggttgacatttctctgtccccagtggtggctctatggatcaaactggcccgtgtctacaaggaacaaagtgaggttgctgagctagttaactgtcaggatcaattagaaaaccaaacaaggcacttaagtatgaagccaacataatgcagagcaaaagagttccagtttgaggcagagcagacttggtttcaggtgactagtaccactttaccagaagtgtgatttggggcatgttcctctaccttaccaagactcagtttccacatccgtcaaatggggataatgataccaaccttacaaagttgtttcacatgtggaattttccaaactgctctgtgatttttggtggaataattgtgtaaaagacaaggttaaatgcagttaaaaacaattatttactctagaatttctccaagtcttgattatgttgacatattacaaattttcaagaggaatcatcaattcctcaccccagaatcctttttcctgtgtgaatgcacattagcctctgtttcttgggaccctttagaaaaggctgtaaaacaggtcatagggtatttggtgtttggtacaggcatcaataaatgctaatcctttcttctttatgcccaaatcatgcctgttcttgctggatttaagctccatggagtcagggacttgttcctttcttattccaatatcttgacatatcaagatattccataaaaatttaatgaatgaatgagtaaattagtgaagtaatgaataaaagaataaattaagcttaatgtagaccttgcctactcatcttcattgccagcattttctgctgtttccagttgccttctatgaagccagtgggagaacccaaatgcctctggaaaatttagtaatggagctggttctgttgggctgtattttcccacttctgttttaacctgtacgagcaccatatcttccgacgaaattctcctaaccaaatcatttggctcttaaccaactttagacaataaccaaatcattttgctgcttcccagtgaagtagttgaatgtttcatttgcatatgtattttgaacaagacatttctgagtgttcccagtggatttgcacttagagctgaagaacttttgggcttcccaagggaataaaaagaaaagcagctcattggaacctaaaaacagcactgaggacactgtatttcccacgtgtgtgtgcctgtcaacaagtggttattgggatggacgactggtcagtcatgtgactgcttttgggtggtgtgctttacgtttgtttagaagagagtttccaactcatgttctatgagtattatgcaaaaaataaaaattctagcttcagtttaaaaatggttgtgttggggccaggcatggtggctcacgcctgtaatcctagtactttgggaggccaaggcaggcgtatcacgaggtcaggagttcgcagaccagtctggccaacctggtgaaaccccatctctactaaaaatacaaaaattagctgggcacaatggcatgcgcctgtaatcccagctactcaggaggctgaggcaggggaattgcttaaatccaggggcggaggttgcagtgagccgagatcacaccactgcactccggcctgggcaagacagcaagacctcatctcgggggaaaaaaaataaatagttgagttggtcaaaatctaacaaattttcttactgcagagcttctcgaagactttgtaacagaacaccctttggaaaatactgccttagaatacctagccaaatgttgcaatccagttttcatgatctaaggaaaagtccttctcccaaactgtggaaaggggaagataaagtgatgctggttcctgaattgaacagggtgattaaaatgtacagcataaagccagatggattttcaatgtgttttgtaaaataaaccaaagaaggttaattgtgatgcttcaaaagtatgaccatatattttccagtgttattgtttatatcataatccaaataacttatttgctatatcatttcacagcataggtgagaatcttttttttttttttttttttggaggcagggagctttaaactttcttctaaaattgattttagaagaaagggacttagaaaactcacatatttcttatgctactttttgttttgaattaatatatactaaaaagaggaataaaaaccattttatttaaatgccactgctccttagtaaacttttctgtgaataaaatataactttctgaataagcagactcaatacagcttgaaaggaaatgctggggttgcttggaaataatagtttcaactcataaaatggaaatgagcaactatggcctgccacctgttgtaaataaaattctattagaatatagtgggtctcattcacctacagcccttacattcacttatatattatctatacttacatattgtttagtgctgtcttcacctgcaagggaggagtggatttattgcaacagagatcttatggccctcaaagcctaaagttttgaatataggtccctttacagaaatgtctgctactcctttcaaagagtcacagaaatttgtaaaagggatgaagactacataactgacccctttttctttagatagaaaaaactgaaaacagagaagttagggaattgtccaggcttatttatgcctgggtgctctgatctttatatccaaatagttctctttatcagggaagacagggatagatttcaacttagatatcaacaccagctgattggaagtagccatctggagggctggtacaggtctcagcgttcaaagagaaggaacgcaatgacttattaatcctccatggtccagaggtggagagcggctggacccgtgccatgtgtgcactggggatatgcactatgtctgctcctgacatttctaatagttatattgccgtctccttccttgtacatctgccgtgtaagcactttggtcactgggccaaaaagaagtgtgcattggtcctcattagaaacactgctgcccaacagttcagaagagattgatgattcttttgcaaggtcgttcaaatgcctgtcttagcagctgcctaccatatcacgctctgtctagaagaattaacttggaatttcactcagactggatttgtcggttataagaatttttttttaactgaaatatgtccatggagcacagtgcaagggggtataaaatggaatgtcctgagtttattggcacttgtgacccaaactaaaagtctcaatgtctgtgcttttgtgcagctggacaatccagatgagcaagcagcccagatcagacgagagctggatggacgtctacaaatggcagaccaaatagccagggtaaggaaacattgtggttgtttgctggggtccaggccaaagtcccactcaggaagcacattgattattgacagcctctaaaggataaagctgagaagcagagaggagggaagatgaggacaatcaccctcattgggccctcagccctcctttctcaaggcaagctctcccagagatacctcatgcatttcctatgctccagtgaatacccaagctcagacctccaacattccttctgagttccagacacatagctccaacagtctactgaacatttccacttaaacattttcctggcatttcaggttgaatgccttcaaaatctagctccttgtcttcctcccaccccacacacataactatatttactcctcttctcttgttctatatccaatcactgtggatgaaacctcctagccattgtcagtttctcctttctccctgcaatgttccacactcagtcagccaccctgcctccagtgactgcctcttaaatgtgggtcagatctcttgactgttttccagccctactactggtgctttgatccaggccctcatcttcagcacctggatgttacaatagcctcccaatgggtatccctggctgcagttcccccattttctatccatcctgcacacagttgcccggataaaactcatatacaaacatctcaaaacagagcctcaaaatccttcaatagattccctcattgctcccaggacaaaatctaacctctttagaatgataatcaagactcttaaccaacagactctaccctttcattttagcctcaccttgcacaactttcccaccggaactcccgagtccaactacagagaatgtctccctccaaatataccaggccctttccaggcttggtgtctttatacccactggtgtctcaacctggagtaaccatgtttctcccctcacttagcaaactcacctactcagccttcagtacctgacttaaaacaccttctctaagagcttagcagttagtcctttccacctttgtgttcccgtcagatcgcatatcaacctttattatagcagctcatcgaatggtgatcatttatttacatgtctgagtctcccagtatatagaactcctcaagggttgaggttatgtcttactgttgatgactacagctaagtgttatctaccattattgctatccctgccatctctgatattattaatagtagtcatgccagtcatattagttgagtgctgattctgtgtctagcatgctaaatgcttcacatgtaccaactcagtcaatcctcaaaacagccctccaaggatatttcagttatcattcttggtttagagatggggaagtccaggttgaacctgctgggcaccagcaaagagattgtggcacaccctcagctcaggtctgtctaaatatcagggctggcaccgggcttatgtcaggcacaaaatttaaacgggcctccgttaatcaaaataaactattttagtaaagtatttttcaattacaattaataccaaaaaaatccatgaagaataaaatataaaaattgtaaatagcatcaggctcctgatgattcctactgtattcacaggccctgtgggcatatgagggtgggggttattagaaacagcagggagggtgggcacagggtagagcttttcactttatggaaagaggtgtctccagacttggaggtatggaaaagaatcctactggaggagaagccagagagattccaagaagcatcaaaatccccctgtgcttaagcagttttactgaaatgttttgcatcttgtttttggacacctttaaagtttataatcaagtcagcctggtggctaaaaatagtatgcgcttatggatttggctaaaggtattataaaaggttacgctttaaaatcccacttaatgtgacagtaaacattaataaagctttagaatttacttctcctgtaaaaatgtttcctactggtggattatccagaaaatggaggtcatttggtccattcatctgcattttagacaacgagtatattcccaactaaaaagtattcatcccatctaaataaaaatcacacacacctcaaaaacaagctcatggcacctttaatttacttgctttgtttactttaaggcttaacatgataatttaagaaactggtgttaggctaattttaatttttaatagaacctggatgagccaagatgctcatctctgaatagtaaatcaaagaactctctcccccaacccccaccactaaatattctgaagctaaatgagatattattaacaacttagacctaagcattcttagacaatgaagtaggcaattaaagtggatcttgattattatttacagagcacggaaaatgatttcagtatatatggagggtccctgtctagggtattgagggtttctatgagatagagtgccctctactgtctcctgttctttcagaaattgactgtcttctgcaatgttcgttcatgccagtggcccccttgctatatagctaactggtcctggagtgagctcttcttcacccaggtggaagcagtcagtttccagcctgccctggccacacgtgattggtccagaaatggaaacttgatgcaaactaaaccaatgaattccttcgtagggcctgtggactgtgggtcagcaaggctgttgtcttccagtggtagaaagatacctgtagcaatgtgcacttcttccatatagggaaaagatgatgagaaaataaagccaacacatagaaacagagacagagtctacactgagatgtcaaggagcccacaatcctgaggacatccgtttaagtccccgattgtaattattcttaagcttcagccatgtacctgcttttccctcagcttagttggatcccaagaaaaataaattctccccttgcctaaaccagcctggctaatactgatgaaaattgtgaaatatctcctccactaaatattaaataaaatatcaagatctcggatattggctagttcatgaagagatattaagacaaatcacctctgcttatcttctttttagcatgccccgatttttctatttccagcatcacagtgaattttcgtgaggatgtgcaattcaacccatatggctgaatgtcagctcctgtaaatatcataaccagaaattcctggatatagatgtcatccatcatatgtaactcactccgttctctgaattaaaagatgggtagagcacttttgattgcaaataagaggcaccaactcaagcaagcttatgtaaaagaggagatcggagacggaggactacttcacagaacctgcagagaaactgcagccagaacccaagaaagaacaaccagggcctgcagagtgatcaggactctccctgcatctcccatctccatgtgtcacattcattatcatttctttcttatcccctgcaaattcacaatgctaagaatcagaactctcactggcccaacttggttcaagggccaacccctggtgcagttaaccaatctacaatggaaaaaggggtgaaagtctcgttgaatacatggatgctggggatatatcatttagggtgagggtgggaagaagtggggctgtgggtggagtggacattatgaattgggaagcactccagatgtacccaatagtaataactatcacttacctagtgttttcctatgtgccagatactcttttaagcattttacatctgagaatctaaccctccaacaacctaatgagaaagatgctattattatccccatttcacagatgaggaggctaaagcagagacattagagaatctgaccaaggttctctaatgagtctgcactcttaaccagtatgcatactatcattgcaaaatatattcccagatataggccctcactttccccctcataccaatccaaggatccattatgccctttactcaggcttttaccttgcctcatcctgaactctctctctgctaatcagtcctttattaaatgtgtcagtcagacactggctgtgcaattcacataaaatctcatttagacccgtgatgaacaatctttggcgttacattaattctcccaagtataggcaaatcaagaagtgtacacatgttcaagtgcacacaactactatgcagaaaactgagttgtctaattccacgtttcatgctatttctttagaatactcagaagaaaggcaggaagttactccaggacaggactcccccaattcttcactccctgctggttccccctcctggaaactgctttcttttctccactagaagttgctgtgtgttccctgcagcttatccagaagcccatatgaagcagcagcattaggcagatttggctcctagaattcagaatcctctctattttgatttttttagaatctggaaaagatattgtagggaccctggttattttgccagcagcattctcatcatcacatatttccactgaaagacatgtctgtcctctcttcctaggagggaagggaggcaaaagcaagctgacttttccttacccacaaccttgcagtgtaatctgtcagttcaatcgcaccagcatctcacgaatcatcagacagagacggctgcacaagaacatcagacagagatggtctcactgtgaacatcagtcatgctgccttaaaagttccagaaagaaatatgaatgcattttttaaaatctggtagaaaagacttggtaatccctgctcaaacattttcccaaatcctctcatgttgatattaaagtgttcccaaatttcacccaggaattaagtctaagttatttaaattgtgtgatcaaaagttgacatttgagcttaagcagacagattgtggcattagtgctgctgtgatatttgccagttcttttggccgaattttagtgtaaaattccaaaattattgagctaattatttaagacaaatcatacagcttttgtagtgtcagtggcagaggtctgggagtaaaacaccattggttcttcaagccgtcgttttaaatatgaaaatgccacttagacccgtattctacacagagcacaattagtagctcatatcctggccctattgcaaatatcagtaagaaataatatccaaatatttatctgatggaaaagttctgttccacacattgccataaaccagatacaaatggaatcctctcctaccagagaaagatactaacccccaactttcaaactaatgttggacatggcacccatgctgtgttatgaagtaacataagtgtccagcacatagtaggaacttctttcaacttgttgcctgaacagttaaacaaaatgtgtgtgcagggatcccctctctgactctggcctttgtcaatagctaaaaatcctgggaaatctgagctcacggaaaaatataaatgccaggggggtcctctgaagcttgttcaagtggaaggaagtccatctagttcataaaagctgaggaagtaagaccaattgggtaaataagctggcctagaaaactataatgcctgagcccaaagtgccttttaatgtctgcaatgcctattttgacaaattaataccaagacctctttctctcatttaacctgctgaccccatcctcattactccctgtgcttaatcctacagagtgcacattgtctgggtaatggtggaatggccattgctgtggagggctcagccatcaccagccttctgctgaccaggatgaaaggagatgatgcatacaggatgcaccatgcagagagaacccccagagttgcctcagctctatagacatttggagccagatagttctgccttatcctatcatagctaagaacaaaaactctgctaggtttcaagtttaactctagtaactattgcttaacacttctgcctcattttcttccaaaaaatagggataaatagaagcatgtgcatcagtgggttgttggaaggattagataaggtaaaataaagcatgtaaagttttcacctagtgtccagcacatagttagtactcagtaagtgccaactaacattattatctttactataggcaccatcattattagtactattgttgtttgtagtggtggtggtaggagcatagtgcttgcaaggggtgtatgtgtgtaaagagaggctgtgtgtgtcagtgatcaaaacatattcatgttatgatctctacttttcacaataattctgtgaggtttattatcctcatttcaaatgtgggaaccaaaattcagatgggtgaagaaatctgtccaaacttacaaagctagtaagcagcagacccagcattcagggtcgagtccgtttcactgtcatggactggatgagttccttgatgccctctttgtactctgcacgcctctgttgcttcatgtgtcactaactggtcactttctggcatgtccccccataccatcacctctcggctggttttctcatctccagtgacagccataccaacctgacacatgacagaagcccaggaagtgtctgagagattggattaaatagctgcagcactgtcagtgagctccagtgtctagcaccggcccttctgtcacattcctccttctgatcacccaccaactttgtcatttgagtctttggggtctagggaacctcactctgaaggggggcagccttgtcatcatttatacataccccattcatcctctctgggtaaaaatccaaaaccagaaaagaaaagccagcagccaagggaggcattagaactttcaaatgctatttttaaagatgttccaaaatccctcagagcataaataaccctagtgggaattgtccttgggaggctgtctccactgaggaatgttatcagcccaaaacaaaaataaatggccaacagagatttttttggaggactttgcccacccatacgctatgtttctcataaagcaatatgaataaacaattcttctgtcaaggctgatctatttttgtgcttgaaaaagtagcaatggagatggacgactgcattttccttattttggcacaagttcagctttgaaatgtgtttgcaatgggtctgccactgaaaaactccactcaagaaactcagcctggattgacagtatgctatttcttcccaaggcttaagtccttgcaccagaaaaatgtccttgttttccttgcagacttcagtttttatgagcctctttttatgatgtcattaggaactgtccaagttctgggaggagtgatcattctttggattttcccaatattttgctagatagaatttggtggagctaaccctcagtcagcatggtggcatctgtaaccaccgggcctcctaaaaaaatctcaggactgtggagttaaaaggcactgagtgagtccctaagataagttgtgatagaaggaaccgcacttgacaagacagtctctcaaaattgattagcaagaacccacttcacaaacgctagctattttcttcatcctcctggcaactaccaagccagcaactggcattaaaatcagaaattccccacttaccaagttcccccacccacaccaaataccatgtagttcactgaggttttggccccagtatgaggaggcaagatacaggtcagtgtaatgagtttcaggctcttgggatgtaacctttgttccgtgacagcctttaatggggcctaaggactactctcagaccatgagttaacctacctcactcttcccttcactctccagagaggccatattccaagaaatatgaggaaatattgtgtggctatgtaaagttgtatacaccttcttggattcatggttgcctacagtattttccatgggaaggagaaaagagcagtggccctatctcagccaactcaacctggtggcaaactcttctttatccatcagaccctcatcccaaaggtcaccacctctgggaagccacccttgattctctcaggaaggatttgcatcacattatacttccattacagtacctaccttgatgttctgttatagatctttctccccagtagctgtaagctcaaggaagacagtttacatcctctcaacatgatccccctagtgcctaactctgtaccatatacagtgtttgtggcagtaaatgttttccaagtgatggggacccagcagccaagtcctcgcatcttgacggtttttcataaaagaaatccaagttctgaggttcacacttgtccctgatcaagtccaagaatgacaaaatttcaaggccactgtgcaggaagttttagagaaatacaacgtttgagattcttttgtgatgaatcattagtagctcttgtcaagatcatcagcctgtcatctcatttcagaagcatccatcctgctctttccctcacattcatgcacagcgtgtttagaaagcaccacacagtgagcttagcccagtcttaaaagcaggacgtgattatactaagaagttccagaaggaactggtactgtgacgttgcggagtggatttcagacccccatattttattcacatggaaaagcagaatctcggtgttctttcagaacttaatttatcatctatctacctcctcctcacagctgaattttagctacattgatatttaatatgggcatttttgacaagtcattgatctattcactcaattcatatgtattgaatacttattatgtgccaaactttatgctagacacagaaaattcaacaggagtattaagatagatatggtcctgaatcattgcccagcaggaaagacagaaattaaacaaattccacaattgattgattaattataattataacaagtgtcttagtctattcaggctgctataacagaatgccatagttgacataaacaagagaaatttgtttctcacagttctggaggctgggaagttcaaaatcaagccaccatcagattcagtgtctgatgagggcccactttctggttcataggcagctgtctttttaccaggtcctcacatgctggcaggaacaaatgagcagctctccgaggcctcctttatacaggcactagttccatcatgagggccctcatgatctaatcatcttcccaaggcccatcttcaaataccataacattgagggttagatttcaacatataaattaggcaaggacacaaacattcaatccatttcaataaatgctaccaagaaggtaagttagcaaatacaacaggaggacccaacccagggaagtgaaattttgaagctgaaatatggaagatgaaaacaaggctgttagttatgcagggagatagggagagaggggaacaagacttatgacagccttcatgtaggaaggagactggcactggaccagcacaaagacatctccaagctctatggagaagaagcactctccgtatttgactgaagctgtgagatggcaaggaagaaaaacccttttaactaacagtgggtgggggaattactgaaagaaaaataaattcttaaggaacaaaattacaggagaaataactagtcctgtggaaattagaaaatgataaaagtcagagttcctttctgtaactctagaaagcatctttcttttcttttcttttcttttctctcctctcccttttcctccctccttcagtccctgcctcccttacttcttctctctctttgtctctacctctttctctctcttctttgttaagtgtcttattctgctttgacctgatccagtgtggcagccaaccctgagtctgtaagatgttactgtttcagttctaccagccaattgcagtctcaatgtctctcagtctagttcaactgcttgacagagtaaatctgattgatgacagggcactaataaaattagttggttcatcttgactcagatgcccatatgttacacagcttattttttttttttttttttttttttggccacacagaattggcataccaattcatgttccatgggatctaggtggggttctactcccagccacaaggacagaggacataagctatgcctatgcacatcagcacagcatattactggccatagaaattggccagtaatatggccaattggacatgtacttaagttagactttgggtgagaatttggggatgaaagactgtctccatcttccttgcatattacaagaggaaatattcacttttccgttagatagcatgatgtgatgttgtgcagtccacatctttagcaacatttctgtgaagataggggagccaaactgagcatgaagccaccccagaggaaccaaagccaagattttaacaaaaatctcagttgtggtgatatcacctgagccctgattccagcctttcctgaagctgggtctaccccaggatattttcttttgttgttttaagccagtttgaggtggatttttctgtcacttgcaaaaaaaaataaaaatgtcaaactgacttggcttgcttctcactccatcagttatggaatagggcttggggagggcaagtttatgtttcaagtggtaaatgactgtttgggaaggtgattgatccaaagcacattccaggtgacttagaagtatgaagaaacaaatagcatggttagcacgtgttgcaattacaactaaatgtataagcaagaaaggaaaaaatagaggtcagttatgataccaaattgctctatcttctaaagaattttaatcacatttttcatcacttcattaatttggttcaatttttcttgaaaacagtaactattattcttagaaatagacacagactatgtttgaaacctctcaaatgagctccttttgaattattcatgtgagaaaatctctgtagatatccagaaatagggtctctttctgtttccctcacttaaaaacaaatgactgcattttactaaaaagaaaaactaaactgaaaccatatttgaaaaataacaccccatttttcttcctacaaatcaaatttgctgaaggaaactggggaaaaatagaactgtaataaagcatttcaatgtttcttactatatgtttatgtacgtgtttcttacctgttacaatgtataaataactagcaggcaggcagctgtctactcaaataggctgaacatttttctagcacaaggccatgagatctgggtgaatttcactagtagtagatgtgattctaactctgggccatgggacaaagaccttctttataaatcagctttctattttctcctctgctcatacttttctttttcttcccaaggaacgcaaatttcccaagtttgtatccaaagaaatggaaaacatgtacattgaggagctgaagtcatctgtcaacctgctcatggccaacttggagagcatgccggtatccaaaggcggggagttcaagctccagaaactcaaacgcagccacaatgcttccatcatcgacatgggcgaggagagtgagaaccagctctccaagtcagatgtcgtgctgtctttctcattggaggtaaaaagccctgagcccttgaaagtttcttggcacagcaagtaggacatgggcgattagatgcgtcacaatcagcttgttttttctgttgcaccccaggagcagttattaaaataacagcatgctaagcttaggtcagctaatcagcaagtgattccccatctccaggagcccacatttttcttaaggaaatgcaatctgaaaaccacctactaaatttaatcttgcattactttctgtcttaaaacagtgctcaaggattttataaagaccttatataatttagaaagttaaaaattttggcagccagttttacagttataagagaggcaagctagcatcatattgtggtgagctgtaaattttctttcccatcatccttcctgttggctacaaggtagagagtcccttgtggtggaggcttttttagtttatctcagctcccaaagtaagtacccattcaggctagtattgtggcaaaatgctcaacatgtcaataagtttctctataatttctcttcacacattttcttttcatatgtatataatctaaggagtagttctgatctacctatgtcagaattacatgggaaggtagttcactatgcagattcctgggtaccacccagatctactgagctaggatctcgaggggatgggaatataaaattgtgcagccattttggaaaataggttagcattttctgaaaaagttaaacataaaactaccatatgatctagcaactccactgtcagatacccaataaaaatgaaaacacatgtctgcacaaagatttgactgtaaatatttatggcagcattatttataatagcccaaaatggaaacaacgtaaatgttaaccaactggtgaatggatcgacaaaatggggtatacccgtacaatggaatatgattcagcaattaaaaggaacaacccactgatacatgccatgacatggatgaacctcaaaaatacgcctggtgaaaaaagccaggcttggcatggcggctcatgtctataatcccaggactttgagaggctgaggtgggaggattgcttgagctcaggagtttaagaccagcctgggcaacatagtgagacatctctacaaaaaaaaaattttttttaattagctgagtgtgatggtgtgcagctccttgggaggctgaggtgggaggatcaatttagctagggagatcaaggctgcagtgagccataatcatgccactgcactccagcctgggtgacaaagagagaccctgtctttaaaaaaaaaaaaaaaaaaaaaaaaaaaaaaaaaagaccacatattgtatgattcccttgatataaaaggtccgaaaggcaaatctacagaaataggaagtggattaatgttccctggggcaaggggtgaaaaagggcataagaaatcttgttaggaaaactaaaaatattctaaaactaatttatgatgatggtcatgcaacttagtaaatgtaccaaaatcactgaattgtgcatctaaaatgggtttattatatgatatgtaaaacatgccacaatcaagttgtcagaaaaaaaattctagacaggatgcagccctggactgtatactttaaccagcccctacatgcttcttatccactccaaaatttgagaaccacttgtaacttactaaagttcaaaaccccacaagggttttatgataaccctagatttggggagaccaagagaagagatcaaatttctgtgcagttgattagaatatgtaaaaactaaattaattttctaaaacatcattaaagcctgctgtgaattaactgcaggtaatttgtttttctgtgctaagtttggatggagatactcacattagtgttttcaacatgtattgtgcagttggaagaggcagtattcaattaaatatagagtacttagtgtgtgaaaaaatcatccgtgtaatttcacagaaactttcttttttaaaaaacaatactgccacctgaggtactgaatgtattttcttaggtgtctgaatttgattattgccaattaaaggtgtcaatttattccctactgcctcttgtcttcctacagaaacggggggaaagtggtttattgattttcatgagtattttaaatctgtaattttctttcctcttttttttttttttgacacaacgtctcactctgttgcccaggctagagtgcagtggtgcaggtgcagtcttggctaactgcagcctcaacttcctggactcaagtgatcttcccacctcagccagcctcccaagtagctgggactacaggtgcacaccaccaaacccagctaatctttgtattttttgtagagatggggttttgccatgttgttcaggctggtcttcaactcctggactcatgccatctatccacctaagccccccaaaatgctgggattgtagatgtgcaccaccatgccctgctaaatctgtaattttctaattctttgtcagtactcgatattacacagctgattatctgaaatatagatgtagacaagtccgtactcctatgtgtacctgattcagatggtttgacttgtaattgaaagtacagaaagaaatgtcctaggatccccaaatactttttaaatagaacactgaattgcacatcatagaaaactgccagcaaaaaccattgcacatctgtttgtgaatgtgttttggtgggcacaatgagggcaggcaagaagagggagaaaggattgtcatctcatcagggcagactaggatttgaatttgcagcttggtgcaagtcatattttacataattatacacttgcatggctggaggggccaccaggtagtaaataactttgcagtgagggaaggaaggtccagggtgcccagtagccaggccttgggcaaaggacaaagggcaaagggcatgtgctaacagaaagcaacaggtgtttgtagaatgccactgtgggccaggtgctttttcatcataacacagtgaatcctcacaatagtcttttcaggtatttgcaggtgtagtaactaagcctcagagaggttgagaaacctgcacgtgattacacagcttgtgaaaatgcataatcaggatgtgaagtcagatattttaaattccaaaatttgtgctctttcactgtgccttccatttctttctatttatatggttcttcccaatgtaaaaatgttcacttatgtgcatcgtctcatttgatcctcacacaacagccacgggatacatatttttattcccactttacagatcaggaaacaggccctggagatttgaaagaaaaatgaagtgacttcaacatcaaatcatttgcccaacatcacgcgagtagtacaatggttttgaaagtatggcttctgggtcagcagcatcagcatcaccaggaaaattgttagaaaaagaaagtcctgggctccaacccaggcctactgattagaaactctggagatcatagagcctagcaatctctagtttaacaagccctataaatgattctgattcacattaagtttgagaaccagtagcaaaactgtgacttgtggaatcctggttcaatgctaaccctattgtactttcttgaatctgatccactaaggaagtattcattttttgcgcactcacattcttcttcttgtgtaataccattacctgttttggagtacaactgaatgattttttcatgtataaggactaattgtatatctctgatgtgagtcatttgtttcagatttttaaattgatctctttcttctctgctttctgcattcttctccctccccggtctcttgtgacaagccatactgttaaatatcagaatagtaggtgattacgtggagtttggggaggtggtaggaagtgccagaaactgtaaatgatacatcttgatccatcatgacaccggctttttctctcagtctggaccaaagactatgcagctgcagacatgtttttgttttgactcaataatattggcctgtacagagtttgtgtattttatttctccctatttgaattattgtcagcatttcaaaatcagctttctcactgtgactctgattcagtttttcattttctggaaggcaaaattggagtatctggtaactctaaagtgagaaaagacaaggcaacaacgggttgtaactggcagctgctcccttcagaaggagcatgtgctctccagtttgtcatagtccctgctaatccctgttgcatctctgaatctaatgctgaatagtacttgccctttattttagtatttgcactattacttatcttattgtgaagcaaaaagtgaatttatgagcctgtggctctttaaagtgctgaaccaaaagccagactatttttaaagaaaataagagcctggccgcgcgtggtggctcacgcctgtaatcccagcacttcaggaggctgaggcgggcgtagtgcctgaggtcaggagttcgagaccagtctagacagagtgataaaactctgtctctactaaaaatacaaaaaaaaaaaattagctgggcatggtggcgtgcacctgtaatcccagctactcaggaggccgacgcaggagaattgcttgaaccagggaggtggaggttgcagtgagccgagatcacgccattgcaccactccagcctgggtgacagagcgagactccatctcaaaaaaaaaaaaaaaaaagagccaattccttggtagaaatgaaaaactgatcttatttgcttaacacagaaagagtagcccattttatatgcctgtctggcccctgtgagcatttgaattggtgagccttgtctttctatctggcaggcaatcagctacactatgaggaattgcatcttcgtgctagactggtcccagcatgactggtacaaacctaacagaagccatcagatacctgttggttttctctgtagcttctcatttgtgtattttcctctgggcgatgctgccaggggccttgccaataacctccattatgtggaattctcttttcaggtggtaattatggaagtccaaggcctcaaatctttggctccaaatcgcatcgtatattgcacaatggaggtggaaggaggagagaaactacagactgatcaggccgaggcttctaaaccaacgtaagttatgtttctccagggtccatcttatagagggttgctgccattagttccattttggccaactccaaggtaaagatctggtttccccagaagatacgagaagacataaaccttgtttatttttcaaacaagatgacttgcctacatttttatttggcagccacagcaaagattctagttccttcaaagcagagaactgaagaaaattaaagaaacagtgtcctttctagtggttttaagtattcaccctcgagagattagtcacaacttccattcatcaatataatgtgcaggaaagtttgatataagtttacttttattaaattttctaaatatttggttttcagtataagacataaaaatgttttcatttccatatatttttggggaacaggtggtaatttggttatattactaagttcttcagtggtgatttgggagatcttggtgtcatcacccgagcaatatatactgaacccagtttgtagtctgttatccgttacccccttcccactctttcccctgagtccccaaagtccattgtatcattcttattcctttgaatccttatagctttggtcccacttattagtgagaacatatgatatttgggtttttgtctaattttttcctgtatgtcatagttctgaatgtattagcaaggtagtatgttacataatacattaattcattgggtcaatacaatttagtcaaatgtgtgtgtacaaggtattattgtatggtggaaaggaaagtagtcactgctgtagccctccacagctcacagtttcatggggacatcagaaagtaatggcacaaatatataattataaatagttataaatgctgacaaagaatgctttgagaggagatagtgggaggcacctgaaccagtttgtgaggacagatgcagaataggccttccttaggacatatgaggcatttgaactaatattattaaagttgagcaatgggagtggggatgggtggagagcattctaggcagagtaaacagcttgtgcaaaggtcctgtggttagcaaaggccctgggcaaggagaaattcaaaagaggccagcagggctggagtttggagaataaggggtggataagctgccagagaggcaggcagggccataccatgaggaagttgttaggccttggtgaggaaagtatgcattggagatgtattttgaaaagatgactctcgctgcagtggatggggagtgggtgggcagggttgtgcaggaggtcagttagggtactgtttcagcggtccacaggagcaataatgggttcattcattagggtcagtagactctcaggcctcaaagattcttgagagatcattgctcccttccctccctacccactactttcctctcccttccttttctatctcagttaagcccatctagactaatgagcatctttttgtgttggtgttaattcataagagagtcatcaaaagagaaaccctgaacagcagctcactgcctctcctcccccagagcattatgagctgtttggcagaacatgaataatttgccaggatgttcaaacaaaatagttcaaagaaagcacggaatgtttcctggactagagaaaatctcagggcattgtataccttcaagtggctctttgcatgaataggcaaaagcctcagatgctcagaagctgggagaaattaatgagtgtgtacaagaggaaatggaaaccaatgcaccttgtcacacgtcacccttcctccctttttttacaaccaagtttcaaactgacaataaatgtggtttcttttttactgccattgatgaaatcccagttattcctcaaatggtctgatcgttttccatgctcttatgttatactgcactatttgtgcttttttaaaatgtgtgatacatgggggaagaacaacctatttcgtgtttctggcaaccttttaagatgctgggcccaatatggcgttataagattgagaaggaagaagaaagttctgattattctaacagactgttgtttcatatgagctattataattcaaaacatagtttgtaacattcgatcagatgcaacggtttcagttaccagggtaaatcatgagttgattttcctgtgtttgtaaatggttaaaacagaatttcagattacaaataattacagaatgattgggtctacctgcatgaaatattcatgttttatacacatacttactcataactatacatgtggcttatgatgtctatgtacagaaacagctcacattgaaacattttgcttttccagtaagaagtatacatttttgattcctcttcagtcagtaggttggttgatttgtaataccttaaggattcaggtttcatgaccagggtcaagtgaaatcagtcagtggtagctacctgaagtgctgtattgagaagggttcgaggccaaatccatactcagaggaaaatagtgccaaggtcaacttgtaacatctgccgtggaagaggaaggagtacaagtgccctgtatttgccatttctatagtatcccaaagggatatacgtggagcttgaaatatacaacactcgtgtgtcttcctctcttcctttatcctttacatgtagactctcctatatcctttacttattttccttctaaatccacaattctgtactcaatactctttttaaccatttttctttgtcacagttcacttctagtagtttttctctacctccaagtggttttgttttgttttgttttgaggtttgggttttgttttgttttgttttgttttgttttgttttgttttgttttgtcttttgagatagggtcttactctgtcacccaggctggagtacagtggtgcaatcacagctcactgcagccttggccaacctgggctcaggtgatcctcccacctcagtctcctgagtagctgggactacaggcatacactaccacgcccagctaatttttgtatgtttttgtagagatggggtttcaccatgttgctgaggctggtctcgaactcttgggctcaagtgacctgcccccgcctcatcctcccaaagtacaaggattcaggcatgggccactgcacctggcttgcctccagttttatctggtagcatgaacgagcctgtttgtgcagttccattttcttcctgcctccctagttttaacttactcagaagcctcttcatcatctcttttctttgaagctttatttcttctccttttctccacccctcccacttacactttctcctattactaatctccaactgtcatctctgctacttgatttttattattccagaaattttcctttcggggattatctttaatttgtcctaataactccacttcatcctctgacaagcttagcccttttcctgccctattcatcttctgaatcttgtctttgactatttttacagccagctggtgcccatgctttatttatatattctaaaaccaaaactccattcaagcatgttttgtttattactcaaattccatggttgctgctaccaagtactacaccccataactggaaccctaacattgtgccatagcacatgtctacaaggaatttggctgttgtctttttttttttttcaagtatagccaaaaatttaggagtacataacataacccaatttgtctaagagtatgttatttggaatcctcatgtattgaattgacattacacatccttcacctccttttatcagtgccatctcttcacttatggccaggaccctgctcagcatcgtcatattggatcagttgtataatataataacactgcgttcattagttaaatatattaatactttgtggttggaaaaaatggtgtgtgtggtgaaggccggcagcctcttatactctcagctaaattgtggcccatacttatccttcagttgatcaatctgtttgctacctgtgggttgtttccaagcagactatatcctctcatttctgttgtcctcctctcctgcgtttttaacatagaaagccaggagaatatacgatcaagttttcatgagacgtacttattttacaatattgtctccatttgcaataggttgtttttgcttctgatgggaaaccaatggggatacttaggcagaagtgcttgaaatcctgccattagatcagcagcctcaggaaggcagggagatggagaaggaaatgctttggggattccaaagcatttggaatatattttcccactctctttgaaatagagcagagggctgttcttgctctaaggtgatatatttcaaagggtggcactcttacctttactaagaacagagattatgttaagtaataccagaaaatggcattgagtgagatgaaattatgtgaaaaagaaggcactcctttaccatttatttttcaattcttctgatcaggtcaaggagaacattttaattcgatgctagtaggtcattaacacctccacaggtctcagtctcagagccttctgcaggcaacagcatccagttaagatttcatagccttgtttagatcccattacgcttaccttccattcatggctggtggtgctgttttgtcttttgtagcaatgacataagatttcctttttaaagaaatacattaacatttaaaaagtgaatcaatttaaataaaatatattaagtaaataatagcacaggtggtacctggatacaatgaaaagtaatcatgaaagtatcttggtatacggaaatggcagagattgggaagatggtaggcaaataaagtaaatttgaaaaaaaaatgatgtaaagaaacctgacatattccctgagtagaaaatatattccaaaattatatttattggtagttttgtataatgtaagttgtcctctgtaataaccatgccccaaggattaaatactggaacacttaaataattttgctgaaaagaaaggaaatttgaattagcaacccagtattgtgctaatgtatctgaaattatattctactgaattgaaaccaaagatgccacttggcatttgattatttaacaagttcattactccctgacaggccatgggcttcgtgacatatgaatttcattattgccagggattagaaagcacaaccaaacttggaaaattggtattttccaagggaatgagaaaataaaatgccctaactgggatcttgccacggccctagggttcttcaatgacatctcatctgatgagacaaaagacaaaaccaaaatacaacaacttcctgtaacatttttcttctgtgaaatatattactcatcctaatggtagagtgtagaatgggccaggcttattatacccaaattattcatagaaatggagttctattaaattgttcccacattaagtcagttacaaagtcagaaaaggaagttgttccctccagttgcttgcctcatgtattatcttcttaatggtgcttcctttttcaatttaagcaaaatgttttctgtgtactgggccttggaatggtttacatcaaggcagaatatctttcctgaatggcttctttgatattcaaatgtgatacgatgatatgaaagggtagatacttgcattccttcagcaagtgtacacaggatgctttccttatgtccaaccagtgctggggctacagctgtgaataacatatctcaaaccttggcctgtggatcaaacattcaagtaagggacataggcaataaacaaatgaacaaatgaatatataagggtaacaacagattataatttgtgttctgaaagaaatgagcaggctgctgtgatagaaagtagtgggggcatagggaagaggaaacagcaagtgcaaggctttgaggtagggaggggcttgatgtgtcctggaccagaagggggaacaatgtgcctagaaattagtcattgagggagagtgtttacagggagagtgcagagagcagggcagggccgacaacttacaggtcttaggggccacgcaaagggtttaaactttattccaagaccctggagaagctattggcggagtttaagccagggaaaatatgattgtatttccatcttgaaacctgaaatatctttaaggactggagtaaacttggaaccatatattggtaaactagtatttattgagcacacactatttgccaggctttagtattagagtggggaataacacagatacgacctttgaagttgtgcacccatggaggagagttgattggaaaaatctgagcgcctgagcatggtctatattccaggagcctcagtagcttttgagaacttcaaaggccactgaatgggaaagggaatgaggcttcctgagaatcagctcctttcctgtcttgacactccatgctcaagttcacagtccaggagatatttacgtagagacattatgtagcgagaacgtggagcttggatactatttcttctgttttttccttccagaaaaaggtttaatttctttctaagttaattaaatcataaatggtaaaagtcaacactgacccagaaattaaattttgctaggctcccagaagatacgtaggttgggagaaagtaaaattataatcacactttgggatgctcagacactgtactgcctctcagaccagaatgcttggtccagaattcccaatgtttatttaagaccagtttgtgtgtgtttgtgagctggagggtgaaggtgggcagactgctaggacaacagacagtaggatagacagtgggaaggaagcaaggtgctagggaacaagttttggagagagagctcctaattcttctccaagctccatcataaatttgccaacctgtgttatgtaagccaccaagctttccaacttctccaagtcctgaaaagtggaatccaaggtcccttctacctcaacaattctataattatttcatccaactaactggtccagagaagaaccataatggcagaacttaagacagaggtttcaggaattgcaactgactctgagttggtgaaatttctgaaattagttggaatttcagaatgggatgatcaagtagtggctggagtttgtcagttagacgttgatactccatctaaacgtgaaaaatctataaaagttctgatttcatgagtagtctaatcttgtgtagctatgaaacaaggctgtactctttttaaaaaaacccttaaggactaagtgactgtaggtcatttcctttctgattcagcttctctattaccttgccagagaagattacttgccacttacatctggagtaaatctaagaactggactgtttttctatcactgttcagtagaaatcaaatttaatacatttctctccaaatgtgaaaagccactgtattttttatttagtgatcagggagaacataggaaagaatgtcatagagttatttccctgtaatgatagaatgagggggaaattctaaatcctcactaataagaaaataacagatacttgatttagattcatcagtgttcacaagcagtatggtgtcatggacaagagtacaaaattgagagccagagcactgcgttcctatttccgctgtgtgagtgggcaggctgcttaactctttgtgcctccatttccatattcttatgaaaattaattgctatatatatatacatatatatatatatataatgcttaaaacaatgcttgggcagatagtagtcctattgactattgtaatcatggctttattcttgtttagatggacgaaggggacatgggggaaaacaaggtggcctgagtctaaaacagtgatcattaacgttgattcagtattttctatggaccaggtgccatgctaggtatttcacagtcatcattttatttaatgccctaccataacctatgagataggtactattgttattctcattttactaatggaaatattgaaatccagagaggtgaagttatttagtcaagttgcagatacaatagctaagccaaaagccaaacccaaagcctgtacttttcatccattctgccaccctacctttctaaaagaaattagatctctaaaacagagtaacttaattagcattgaatattcaacaaaactatctaaaagcgtgcatttcctttccataaattcggttgttttgtggattaaaacccagcctatatttaaagggagatgaacgtgctggcgcacacaccagcacaggtgttccacattagtgtacacactcagcaggcataattcgacccacatacatcagcactgtgaggtgtaacacgtgagtctaaaaagaggctctctgcccttgaggcatttacacaatcccaggagagacactaatgataatgatcatcatcctcaagggaatcattatcaataacaactgcccctaccatttattgaaatctaagtaccaggcactgaactagctggaaccatatggctaagagtcagatggagctgggtttaaatcacagtttcaccgttcaccagctgggtaaccttgaccaagtagcttctccccattaagcctcagtttccctaaatttgaaagagagacaagacacaactgccccatcgggttgttgttgaaaatcaatctgatctatgttaagggctgagttcagtgaccagcatattgtaacctctcaggaaatagtattaatagcctaaaactcactataatgtcactgaactccacatggtactgttaagaaatagaaggaaaaaagagaagctcagagaaattaggaagcctgcccccaaatcctacaactccacacacccaggcttcaaacacctggaaatcaattggccaagggtgccaaagtagaagggagtaccattgccaaaatgctttccagagccagaggacatattctgagggtggactgccttcgatttgatgataaaagaactagttctcaaaggcaagaggaatccaaaaggcaacatcctccatgagtcgtcttccagaggcacagccctctacagcctgggtatccacaagcctgttattctggcttctttctggatcagggccattgttccagaggctagagtgcagctaagataatactttctatgtgtttatcagttacttatttgtcttccagcaacgcccctgtgctgtgatatggaactcacttcactataaaggtgcagatggatgtgagccctcggggaggacacagcatcttggcatgatgccaattatcagggggtttggaaatttctagagctctggtgtttaaactctggagtccttcagagtcacctgggttccttggtaaggattcagaagctttcatgccagcccgtagctgctagtttagatggtttgggatgaggcagctatttcaggcagtctttaacagctgcagtctgggtggaaacatttcagtgattatatgaaaaataaaggttcagcatgggcataagagcaaaagctttggggtgatacaacccctactttgaatctcacctgtgccactgtcattgttatggtaggtgagctactaaatccttctgaacctcagtttcttcacttacaaaataatactgatgatacctacaccataggctgcttaataacatttcaaatttaacatatgcaaagaacttggcacaaatgtaagagatgttattcttattttaatcattattgctgtcagtggacccagggtaaaaaaggaaaacagcacagaccatcaaagtcagttggtgtgaactaaagaagctaaagacgctttatctctcagatgccttttttagtttcctttggaatgtgttcatttatatgtagatcccttacttgtacttggaaaaaaactatatagcaagctagttttcttataatgcttacatgtaaagatgattaataaatgttggttgattcagagctaaaccttagcagcaagtggtaaagggttatggaaaagctgagaaggggcccaatgtgatgggcttgaaaacctcttcagagtactgatgaccataaagataattatagtgcagatctctccatctagatgaggctccatacctaaaagaacagaagatggctgcaaaatatctggggaggggaaaaaaaaaaaaaaaaacagagaaagcccgaaaagtaaaatgaacccattgtatgagtgcttgacaccaaatcactgtcatttactaagtaatgaataaaatacatacacacacataaaaatatatgcaccaaggaattgctaggtccaacacaagtaaatctctgtaaatttgacttttagcaagtagcacactatacaatctaataatgacagggtgttgttttttggatgttcttcttctgtaaatttactagagagggaaggaatgaaaagagggctcttgtctcccatgactttatacatgcagtagtacagtagagttgcaggatcaatcattgaggactattagaggcagaaggctctgggtgtgttgtcccagttctgccctgccatgtgatgtcaccttgtttttctccctgctgtgtcaaatcactcaacctatttctaccccaagagcagaattaggtgattttctgttgagccaaatgtagcgggacttggaacctagaaaatgtttctctttttcacctgcctgctttaaacagacctcaaatgaaatgaatctcaaaaacaacctggtctctagaaatagcagcctctggaagaacttagtgtgtaatttttgtcatttgtaatcagaaccaagcgtccaatgcagatctcacaaatacttaaaaatcagggggagaatcaaatcacagagagaagtgcataagatgctattggccagactcctaggttcatttggtcagcccttccttcatctcacttatctgggtggctgctgtgtgctataaacactgtgcctttgaggcactggggctacaacagggaacaaaagcagaaatgtagctgttatgtcacccacaatctaatggcacaaacaatagacaaggcacatttaagtcattgggtagagataccttcaagtttggctttggccttattattcagttaaaatattttatatacctttggcttcaacttgcctttaggagaccaaatagtcaagtgttatttcaaagtcatttctgaaatttctggacttgcgcatgctcagtgatcttggaaacacatagataatcatcatacccaatcaatgtgacaatgtctgtaatacaagcaatgcatatcattctgacttattgttaaaatctgaatattcatttttaaaataggtgagcattccaaatgcacgatggagtaaaaaatcttcatatgtgctctatatgttgaattctattagtggaactacaaaaatatgtacaaatatgtattaacatgttaacatgtaaaaattgttcattaaaactattttatatgaataaacaaatgactaagaagataaatagtacaacagtacaactcgatatctttaagaagaacattatatcacttctgagccaagaaatcttcaaaaaaattaaataatgatgcaaagcagaaaagtaaagatgaggctatatcataacggtaatttctctagacctgtttgaggcactagcattcatcatattaaatgaaataagataaggcttaccttaattctttcctatccggaaggagaaaaagcttaacaacccgctgtcaatgtcgctgtcaacgattggccatactgaaagagctggccccaaaatatttcacttcccactaacctcaagtcaaagtaaatatccatttgccgtctgtcctaagtgtgttgtatagaggcagcagggggaagtaaaaaaaagtttaaattttagctaattaagtttttaatagcaacattgtaaaaataactgaagtgttaatttcgattgttcttgtaccctcagaagtttattcagtgacatctatatttggctttggccaaatgttcatttttaatcctcagcccatttagcattcagccaaaatgtgggttcagggcccctgcaccactgctgtgaagcaaagatgtagggtggtgatttggtggagatttaccaagttggggagaagctgttttaattagaggggtcacaaaatatccccaagaggtggcatttgcacttaaacctaagcaagagggaaccagttatgtaaagagcatggtaagcagagagaattgccaagtcctgagactctacggcaagaaggcacctgtgaggggcaagaagaagacctgagggtggagcacagggagagggaagagagaagacagcaagtcagcaaggctggcggggccagatctcacgggacctggaggtcaaggcaggaggcttgggttttatgtcccaaagtaacctggttggatttatgtatttaacagatcagtgtggctgctatatggagaaggaccgcatgaggcatgagcagcaatgggagtggggacaccagttgggaggctgtggctgtcatcatgtaagacagggtggtggtcgatgatggcagaggaaagcaagtgagagggacaggttcaagacacattgggacatagagcccaaactctctccttttcattcccattgtccgctctttttccaagggtggtactatgccctctggaggttgcattctagcagcagacaacacttggctcttctctccggagtttgcaattgtttattaccaccagatgctgctctgcacacactgcttgtcaatttgtaagttgtagtgctagcgtctcggtgaatgaccttgagtgagttaaagtcacctggcatctctcacaaccatgtgggtagtggatgtacagatgtgaactggggcagtgagttctcaagctggccgttttattcccataaggattattctacagctgtaccaaatttgttctttttccactttagcagagacgtgtcttttacagaatgttacatgctgacattagggtgacattgacacctaaccaaaaaaaataaacgcattcccttccccttctagatttcatttcctgcttggtttataagtcagattgcactgtgcttgtggtcgtgcttgctgctaggtagggaggtattattaacgggaaactattttgagaaataacctacagtgagtccagtcccactgagcaagtgagctgttctctgtagataatgtcagtgttgggtacttgaagtctttcatgaggataatgtttaattacatgtaaataaatcaggcttgactccaactctacggtggaatcttggacccaggacccttcccaacagataaaaccgctaaaaagtctggaggaaaaatgcatactttgtgcatacacttcaaataatatttatttggtaactattttgtataaggcagtgtggttggtcttattattggctacatttttaaaataatattttatgtttttctgaccaaaaagttataatccttgttgtagaaaattgagggaaagtataaggaaaaattaaatattactcatgatccctatatccagcaataatcactgtatatgttttggcgttgttttccagtttttctgtatctgtgggtgtgtccacacccatccagagatatatgcatatgatagataacctcgtatgaaaatctgtatactcatatatgattgttccttttgcatcaattcctaggaaatggtgttattagttcacagctagttatgtcctgtatgttggtgaatagggtgaccaaatcattctagtttacccaggacttttcattattggcattgccccatcctggggcaaacagacagttggtcaccttgttttagtgaatacatcacatctgctcaacctccatcatcctatataccgagagaaagtgaatggctgaaggtcacttgctatatttgtttttgggagacctctatctcttcggcttctaccattaggaagctgtctctctcttgcagcctcagagaattcattgcagcttttaaatatgagcctggaattaagatatggttcagctgtttgtatacaaacagcaagcaaatcattgtgctcaaatgaaggtcactgcctggtctcactgagcaatctcaatttgctccatttgtctggatatataaaaagctgcacaattagagttattgtataaacagcagagtgatacttcatgtaactaagcaagcagattccactgtggtgtttgtacatggaactgagggcaattaatgtcttagttatatttgtgcaggatcttgcgtggaagcatcaggagaaaacaaagccatggattaaaatattcagagaaatgcacatgaaacaaacacaatcattgtgggaattttccaggtctttcacaggaactagtaacagtataagtccttttgtaaatagagtgttttgttactttcttcctaatttttaaaaatccatccgtgatcagggcaccaaagccatattgtacatgttaagtttaagtgacaatgggtctgccaagcaagtattaaaaccaaggttaatacaattagttttaattacagtaaactcagattaactaccaacttcattacctaccacctaaatttttccaggctctaggaaaaagtattacatatagaaaaaataagtgtgtgtgtatatttgtgtgtgtgtgtgtgtgtgtgtgtattatacagataaagtttttaaagtatgcatttataatttgaggaaagaagtctcttttcatttcagcttttattgtctctttttaaaaataaactaaaaaaaaaatatttgacccatatttaaaatggaaaatttaggcacttgggaaataagatgagaaacctacataaccttgaggacactcaaaatagaaaggcagttaataggacttaattctaaaccttggttgtcagggtgactgaaaccacaagtctcttaaaatttacatcaagcaccttgttaaaaagtgggagtaaatcacacaaaactccaagtcagcattataacatgttatttgcactgatttttttatgcccaaagtacaaatcacaggtacatactctctctgtatgaagttaaaccaatcaagggacaagtgattatattttcttcataggaatacttactttaaaaagaaactgcatggtggctcacggctgtaatcccagcactttgggaggtccaggtgtgtgggtcgcttgaagccagttcaaagaccagcctggccaacatggtgaaaccccatctctaccaaaaatttaaaaattaaaaaaaaagctgggtgtggtggtgcatgcctgcaatcccagctactcaggaggctaaggcacaagaatgcaagaatggcttgaagctgagaggtgggagttgcagtgaacagagatctcaccactgcactccagcttgggtgatagtgtgagactctatttccaagaaaataaaataaaagaggctggggcaaaatacagattcggattcaaatatattatcaattcaaccaaattaaagactgtagtttgatgtgggtttgctgtttatgtgttttaactctccagattcactttgcattctgatttagcctgttacctgtttccttattcattcaatacatgcttacaaaaaaatatgtattagacactgctttagacacaagggatacaccaattagcaagacagacacagtctccaccctcagcaaccctatattctagtgggtggagaccaaaaaaaagtatgtaaacaaatgaaataatttaagacaccaatgaattctatgaaaaaaattaaacagagtagtgtgatgggaaatcactggtgtgatgggaaaaactcccttgagattagcttcaaattacctccttatagaggagctatttgagttgacacttcaatgtcaaagatccactcacctgaagatcaagtggaagaacagtcaaggaagaaaaaaagcaagtttaaagtccccaagatgggaaaaagcttgtaatattcaagggacaggaaaaaaacaaacaaacaaacaaaaaaaaaactgtaccagagtctgtgagcaagaggtaaagtaaaaagagacataggcaaggaccacatcatggaggccttgtaggacacgaaaggtctttgatttccgttttaactgtaacaggaagccctcagagagtcttatacaaagaatggccatggtggtggttactttgtgggaactggattgcagggaaatgcagggtacttaatagctttgtaatattctagttcaaagttgagtgatggcgtcccagatttttaactatcatttagaaattacatctatgggtgtactgtttagcaataaaaaggattgaagtcctcatacatgctccaacattgataagcctccaaaaaattatgcagagtaaaagccagaggcaaaagaccacatattatctgattccatttataaggaaaatgcaaatctatggaggcagaaagtagattagtggttgcctaggattgtgggtgggagtgtggttgactacaaacagacacaaaggatctttttggggttgttggttatattctaaaattggagtacagcaatagtggcacaatgctataaatttacaaaaacagtcattgaattatacacttaaaacatgaattttatgatatgtaaatgatctctcactaaagcttttatttaaaaaaatcatcaggagagaaaattttatccatgttacatatgttcttttcttaagagagtagacataaggagagaagtggggggcctattgcagtcctccaagcaagagacaatggtggcttaggctggattgacagtgaagaaaaatagatgttttacagaatgatacaaaaaggctcatggttggccaggcgtggtggttcatgactgtaatcccagcactttgggaggctgaggcgggtgaatcacgaggtcaagagatcaagacaatactgaccaacatggtgaaaccccatttctactaaaaatacgaaaattggccaggtgtagtggcgggcacctgtggtcccagctattcgggaggctgaggcaggggaatcacttgaacccaggaggcagaagttgcagtgagccaagattgcactactgcactacagcctggtgacagagcgagactctgtctcaagaaaaaagaaaaaaaaaaggctcatggttgaatggagagagagagagtgtgtgtgtgtgtgtaaaggagtagaagcagtaggggcaaaacaggaatcaaggatagcatctaggtttggaggctgagcaaccagacagttgcaaaagagcaggttattaatttgtcaccccacctgggaagtcactatcagtacaaagcatattactagattttgctgacattcaaaaaaattcattaaatatagaaaattcagttatctctatattaagatctctgtaattctcttgtacttttataagctttttttctgagcccagaagaaaatgattgcatgatggctaacatgtacaaagaatttcatctcatctgcattctcccatatctgtgtcaaggcccccagccagtgactgcagctaaggaagtgttcactgttgcagtaatacaaactggtataatgccttactcctctgcacgtgtcagggagtgtttctctccaatctggatatgcttacgggagcaagtcacacagcagaacgccttcctactttgtttcttcctaaactgtgaatctgaacagaggaggaacactctacttcacccacaatagaaaagagctaggtgtttagatatgactactatgaaaatttcacctgctaaaatttccttaggggaagggatggattgactgatttatgaacacattgcttaccatgaggatcctcgattagaatttcacatgacagtttgaggttgaatatacttgagacctcaaatataatggctttttgaggaaaggggaatcctgtttcttcccattggttttggaagcatcagtaatgacacaatccagatgagggagggaggggaacaaaggcagactcgagcgagcatgatgatcaaaactcaattaccagaacttcacaggttagggtcttctgaatatatagattcttaacagcttaggaggtgagcataagtaatgtggatatatacatttttttaattctgtattaccatataatttaaaagaaaagcatcaaatagtggtctgttttaaagattctcagattatcctgaaagaattagtctgtgtagttatttctatacttacaacaccaatatagttgatgtctcttaaatccctgcatttgaaatttccgttttagtaaacaggccataaagtaggtcttatttgctttctaacaaagaaggcagaacagcttgcccatggggatttaaatcataatttacattatgtttatttttatagacaggccataagtacaatttgcaaagctgggtaaaactaaagcactagaaaattaaaaagagagatttattttttcctttaaaattgagctcagttataatttaaaactaactgctttaattatactgaataattggattaggtggaggtttgcataatttctcagaatcagaatatgacaattaatgtttgctcttctgttaactcaggatacacacacacacacacacacacacacacacaactggaaagtaaaatgtaacatggaaatgattcagaggagttaagaacttaagattaagaataaatcctcatatacacatattaatgatgaggtttcataggaaaatctattccaaatatggctttgaaaagaattaggacatatatctacttgtaagacaccctccctttttcaaatctgacacatatctttaacattcactgcaattaaatatacaaggtaaggtactagctacatttttctaaaacttcagtcatttctgtctacccctcacaacatatcagcatatcattgatactattatttgttttatatttttctttaaatctattttcactttttaacttagattttaaaaggcatcttgttctgtctgattgtaaatatagagtagccataaaaataacttcagtaaaaaccatgttagtaaattctagattgattctgttccctgcagaaggaactccaaacgtcaacaaaattgccttctttgtacaacaaaaaaggcttagcaaatttaagacgttcttccttcacactgagaacttcttcctagggtaatcaggagaaacagaagagaacaactgcctcacagtgccatttgatgtcccgtctttgtgccatgtcaaatcatctccaggggtacaagatttgtgcttgaagagtcacagtacccaatctctgtttactgaataatttcactatagtctgtgtatttccctggtttacactcatccttttgggtgtttttcctagagcattccatggtttcttttctgtttagtaaatccgtgccagcttgcaaagtgacgtgaatgagaaagatggaattagtaatgttgttgaatgtgaacactcaagacaaaagaaagaaaacattttcccccttagctggctttgtcttctcaatgaccggaatgaaatgtcaagtgaacgtgttaattcttaatggggataccaatgaaagcttcaggggaagagaacatttaacagaggctctcacttttctctgaattttatttggatagacattagcattttattacagccttggaaaagatgagatgacaattattgacaaggttcccaggacacaaataaataaaatgaataaattgtttatttgataaatttcaattatctacaaggtgtaaaacactatagatgcgaatgattaaaaaataaagagcaaagaccctgttttcaggatgcagcatacttacagggaaataaatcatgtacatttagtagtgaatataaaaaagtaaagattccattctggggaaaactgcagattgcttctgttgagaaaaccaaagaatggtcctggagaagatggctcttgaaaatggcccttgaatttggctagaaagcatttgcaagtacagaaagggtggcaagggcattccagcaaaacgaagtggtatccgccaacacctatagtctcagaagtgctgtactgtgtagggaacgtaggttctaaaaaggaggtataaaaggaggaagagaaaagaaagaaatctataaatataggctgagtcaaggtataaaagagctttgcggacgaaactaagaggaagagagcttaaagaaacaagtacatttagcagggataggataaacactggggacagagagctcctgaaccagtgtgacccggctccagtggtgtcctgtttctgtgcctctccattcatgtgaacatgtgtgtgcatgtgtgtgcgtgtgtgtgtgtgtgtgtgtgtgtgaaaaacttttatgacaaaattgaaatgacattgttagtcatacattttgacattgaattttacaatgtttatgcatctaagcttgcagccgttatacttggataatctatgtctttgtttctgctataaaaccatgttttctcttggtgtgggaattgactagttttttttttaatgtgtgtagtctttaaaaaaaattattaacttttatttaaaattcaggtgtacatgtgcagttttgttacataggtaaacttgtcatggggcctcagactaacaaaggagcaaagaccctaagtgccttacccacacctccaacaagctgtagtcaacccaagaagaggggaccactctgtctcccatggatcccacacaccctctctgctcatcaccagacaaaataagactctccattgtaagtttcaaatttcagaatgaggcaatgattggctcgtcctgggtcaggtgctcatacctggatcaagcagctgtggccaggagggcaagatcatgtaccacagacatggctcctggaggtccaagccagggcatggaggtggggccatagagaaaggataaccctgatctacacaccccacctcagaacaattctgtgaagtagatattatcattcccactttacaaatagagaaaaccaagacttagtaccatcaggtagcttgccctatggaaggagaagaaacttgaaagtacaagcaaagaagataagcaaatctgtgtttgggaatttccagattctcagtaaaacaggaagcaagttcatctgaaaaaagatgggcaacttaatctcttaaccagagatttttttttttccagtgattctttaagagactggagacattttggaataggtttttttaaaaaaaatatattaccagccctagtttaaatggttctttgcaaagctgtatacttaacagagaacaattcatttgcatttttggcatctttttttctgaaacatatggatggtctgatgcaactcaccaacagctggaactgggaagggtttgcaaatacactgggatgggaatgaggagaagagattcagaaggacagagatttagggcccaaacattgtattctaccaaagcagtcagatacaaacaaccccatcattccttcaaggacctgtgcaactcttagaactacctaaaatttccctactactggatgaaggtgaaagatttggccaaggtttctcagcctcagcactgttgacgtttcaggccagttaattcttggttccagggggcagtcctggacgttgtattgaggcttagcagcatctctggactttaaaacgttctagaaggctctcaaatggcataaaaggactagagaagaaagaaatctataactataaactgagtagatgccaggagcacccccaccctcgtggtgacaaccagaaaaaaaaaattgtcaacagatactctcaaatgtccccagggagtggaagggcaaaatcacccccaattgagaatcatctcttttagccaagaattctttttatttatgatatcaaagcattttaatttatttttattgactgaaacagtggtttaagagaatgattgttcagccgtgggaagttacaatttatgttcattgttcttgttggcaacattttcatgaaagacagtgctgaaaagtctggttacctaagggttagctcagaaaaatcatccttccaggatctaacactcctcacactattgacaaatagggaccaaggtacagctagcatgcagaaggactaggaatttattgtaaatcaatttagggcttgattcttgggtcatattatcttcttatatgccaaaaataaatagaaatccattccggtgtagtatatttcctgatggtgtccagggataggacttgattttaatgattcaatcagaggaaatggagggattgtgtatcagtactaattaaatcaggaggagttatcaaccaccaataaagaataatccagtggagctttccattccaaaaagtcaactccctgtctctctgtctccttgatctaagtttcttattctctaaagaataagacctggaatgactctgtgttgaccttgtgtctctctctcttcttggtcagctctctcttctggatcagctctggggagagccacaggggctagatgtaaacccaggagcccatcttcacctcacatgtgggacttactcccagagaaagaaaatggaattttcttgagatacacttaccttccatatcaccgtaatactgtatccatatcattgttataaaacagaatcaaagtttgtttaaaaataaataacaaaggtgcatttcaaaattacatttgaatattagccataattacaattcctctttattagttgattaactctacttggttgaatttaaaaagtagttaagaatgcaaaggacttagtgtgttcatgaacatttccaaatgagctgaaatatttctgcaacaaatggaaatgtacttggaagcgcaggattaaaaatgcgctgtggctgaattttagcgcaggcctttgaagttggctattgtcaaactttagggaacatttacagcctgggattgccatctagtggctaaattctatcatgactttttttttcctcctgggtttcagcaaccttttatatctcagtgtcttatcagggaacaaaccatcaagtggaccagtgtacccatgcagctcagctcagggataaacaacatagaattataaaagaaggaaccaggatccctaaaaatactagtagttaatgtgtctttggccccttccgtttctaagactttttaaaaatatttcttatttcatcaaggttagctccctacctttaaaatcatagctaaaattggaaagcctacaattgccatgtctggaaaataaatcagatgtgtgtatgcatatgggcctgattgttcagctttaggaagaagtttcagtggcccggaaaaaactaaaaggcctgggaaacaagtaacaatgctatgttggtcttgttccctgcggaatccccagcaccaagccccggacatcgtagaaattcaataaacatttgtggttgagagcgagaagtatccaaaagtcagagacattgaactccatcccatctcctttttacacctcagaccctctgagataccaggagggcccactcagcatacagctcggggctgattctctggagatacagaccagctgcgggccaaaccaacccaggaaaccagtgaaaggcagctgagaaataaaatatgcatgagaagtttgaatgcaagaggagatgagcaagggctggatttatccagaaaggtgcacagaggacgtgaaacttgtaggaggatgggtgggatgagtgggatttacataagaaggaagtgaagagccattactgctggagaaggcaggctccagatgaaataaaaactctaaatttaaaaaaaaaaaagaagtaagtaggactgcctttatcttcagcaaactaacacaggaacagaaaaacaaatacctcatgttctcacttgtaagtgggagctaaatgatgggaactcacggaggtatagaggggaataacgcacactggggcctatcggagggtagagggtgcaaggaaggagaggatcagaaaaaataactaaagggtactaggcttaatatctgggtgatgaaataaactgcacaagaaacccccacgaagcatgtttacctgtgtaagtaacctgaacatatacccctgaacttaataaaaacaaaaacacccaaaaatcacctgaaaattgtaattatgtatatttctgttaaaaactataccccataaatatgtatacatataccacattaagttttaaaattacaaaataatatatatttcttaaaagaagtgaataggactttggggcttgtggtggaatgaagtcaccattaggagtgagtaaaggagagctttgctcactgggattctgccaacccactaaacattcccattccttgaaggtggatgttctgatctgccacagggacacacgcaactcaacttcctccaagcagcttcacggaccagcattctctttctgctcctctcccccatcctccgtacttccctctaggtaatagtcctctggacatgggaatggcaccaagtttccaagaatacagcaatcaaagttcacttcacagagcaatctgcggtgcccccatatccagagatttgtcttttaattcacagaagttttacaggaaaacctatgacactttggatacagattaaataacagaaacaaagatgctggatccagaagagagtgttgagtttgtcctgtccaaccttctcactttacagatgaaatgactgccagagcattacacaagactggagaggggctagaacctgggcttccaaactctcagtccagtgctccttttaatcatcatcctgcatcctgacagaggcaaagggaggctgagtttgtctcccactgtggaattcctgcttgaagtgaggaatcccttccaggccctcagtcacaggtaccaggctgtcacaggtggtggaggccagctctaatgggagagcaagggtgttggtttcaaagggtgctgcatttgctgaatgccagttccactcctaagaagcaaggacagctatactagcacaggtttttcaaaaaggactctgaagtcaaactgggcttgaatgttagtttcactcctcactgatctggtgacctggagcaggatctctgacttctttggacatcagtgtcttgttctaaagcatggaagcagtagtagtacctgctctataaggttgttgtggcaattaaacaagacactgtgtttgaagtgtttcatacagtgcctagtatattaagtgttcagtaaatgttaaattataattgttattgttttcattgttgcttggttgagtgaccttgctcaagttacttagagactctaaatttcaatgtcttcatctgtaagatgggagtaaaaactccaccttgctgtgattgtggtgctcagtcaatgagatcctgcagcaaaagcacttagcacagcaccaaacacataataggctctcagtcaatgtctttaatgagtgaactggaagagatccctaaatgacagcagtctctcagccctgcctgccatccctattccaacaacagaaaagctggctctgtctaattaagtgattctctttccaatacggttaaatgaaacctaatgatatgaacagatccctgtttcccaagagttaaaaaaaaaaatcaatagcacccaataaataatgaatgtccttttgtgcatcaataacaaatgcaatgctccaaccacacagagcagtctttctactaccaagcatgccaaacaaaggcaacaaaataatccataatcgtcacctcaaaccaagagatgtgtcctgaagcagcctctgtccacaaataataatatattgatggtctccaacaaagcacctcaaagagcagtcactaggggaaaggaaagaaaacacagtacattgaataatatcagaatgtctcctctcattaggaaaactgtaacacttcaaaaacctaaacaaatagtacaacaaaaacttttctctgtcccttgtaatttccaagtattccaaagaggcggatgggacatactgaggccaaaaattacctggaaacaatggtctttcctgattgctattgtctctctaatgggaggcagaggggttgcagggactagagaaagcctcctctcctctaagccacagtgtgaaaagtctcacattagaaacatgttatttctaattcatgccatgttttttcaagctggaacctgaggtcatagagttcaacagagagcatcttcttgtcatatcaatgtattgataaaatctgaaacatttttgtattgaaacaagcaatcatgttatggggtagaatgcagcacgtgtagggcttttaaaaccagaatatttcaaataggtgtgcttgttgtgtgggatttcacatagtaccaccaagttcctgagggttcaagtttaccttttatttaccctcaccatttagaagcactgaactaagacactagatatcttgggatctcatttatgctgcaggtaccactgtagggaaacaaattagaccagtagtcaccagacttttctataagggcaaaatagcaaatacttcaactttgcaagccatacaatcttagttgcaactgttgaactctaccagtgtagtatgaaattagccacagaggttctgtaagtaaatgggcatggatgtgctccaattagactttatttacaaaaccaggcaataggccagaattggcccaagggccttagtttgccttttcctatattagaccatccctagtcatcaatacctaattaagataagattattatacaacaatccagactgttagctctgtgagagcagggatcttttttatctagtacttgaaatgtctagcataatgcctaggccttctaggtgccaacaaatgaatacatacataaaggaaattttagttttcaaactactctatgttctattaaaagcctgaaggaatggaactcaagagaggtgaggtttgattaatagttcttaagaaagtttcaaataatgcagtagtgccagcccagtgggaagaacaaaatatcagcctctgagaatgaaacagttggcatctgaaaggaaggaaagcatggaacatggaagatgggaagaagcaaatgaaaaatcaggagtcaggtgaagaaatacggataggcggggctctgctttactagttttcctctggtgcaattaacagaactccaattctttattttaacttttattataaagggaacatgtgcagatttgttacatgggtaaattgcatgatgctgaggcttgcagtcccaatgataccatcactcaggccataaacatcgtacccaacaggtgcagaaccccatttctgattggcttaaactgagacaggatttcattagtccatataaatgaagagtttagggctataggcatgactggatccagatgctcaaacgatgacattaagaatttctctctctccttccctcagctgttttcctctgggtggtctttagtcttaggtagcctttctcctcatggaggcaagctggttgctaccagtaactcatggcttgcattctgcagtggagtaactccaatgggaatagctttcccttccctggggtttcagcctaaattttgtggctgactcttattgagtcatttgagtcagatatccacccatgaaccagtccatggcccaggaaatgcagtgtcaagaacgaccacctgtcaattcaggggtggggtcaccttcacccaaaccatgtgtaccaagttcaaggagaggtagtcccaaagaagaatttgaatgctgtgaccaaaagcaggggcaaggacgttgagcaggcaaaaacaacagatgttcacgaactttgcctacttcaccaattttcccaactctgcctaccctcacatagttcattcatcctacccaacctacaggtttctaccctttcttcagcaacctaagtaagccaccctccataaccaccagcacttctctgtgaaaggaaagaactgacaccatgtgtgttaggtgtccttacagggatactgaacagccttcccctctctcatccccaaattaaataagctcccacattatatgatccttagcccctcaactttcaccttcataaatctcatcacacatgtcttgttcattttggggtttctccaccagcctatgagcccccttgaaagtgggaaccatgtccacactaactctaagcacaggggatacttgatatttactgattgaagaaataaacacagacttagaaatttatcttgaaagcaaaaggaaaatacttcaggatgctcagtaacaattgctttcaacttcccatctccaatatacttactctgttcatccatatattttttttccattcttaagacccattccagctgccccttacccccagtaatgggttcccaaatccctgctaccacatcaatctcgttctcctctgaaccacagtgttcattagcactatttttcatttattggctcattgtgttctcacttgggacatttcttgaactataccaaactgtttagttcctctgtgtagctctctaactgttcaggtaattactcagttcttcaaatgaactaagacaaaccaggagctagacatctttgcagcactccaatatttaacattgtgatatacaaagagtagattatcaattaatgtttattgagagactgatcatacatcttttcccaaaatgccagggtaaaataaaattacaaaatctaagatgtctgtttttgtctgcaggatattttttacagggctaaagggacatttgattaaaacaaattatttctgagaaagaacatgtctaagttaatgcaaacttttaacatttggggcataataacaatatatagataatatgataagtatctgtagcattagacgaaaactttcctcagccttggtgagtctctttgacacctcatatgtaaaatggaagtaatcatatcccgatcacaggactgttgcacatataccatatgctatatgtacagtgctgagcattatattgaggatatagtaaacatttaatacatgttactgttgttaatatacaaaaatgtggggttgcaaactagatgtgctgtaacgtgattacagataaaacattgacccagccggggtccctggacatgaccagcaaattacaatttaactccacatggtaagatctgaatgtaagtccctgaacaccactgctgtaggaagagctaaattatgtatcagtcactcattgtgtcatgtatctgattttttttggcattttctctcacttcccaggaacgtaactttgttttttgtcaccctccacagagaagagaaagtttcaacacactaaacataaccaatatacgtgcctgacacaagacagaaggagaaaaaaaaagtctgtctaatccaaacagctctgaattttcatgttggacacatgtcaaatttttaatgatgcaaataattcataaaaatttacaagcaatcagaatggaaaatgaaattatcattctgtgcttaaagtgatgaaattaatgactacaattctgtgaattttcttcgatgattgatggagggaataaactggattttattgtgctcataatgaactgtcagagcctaagctactgatagaaaaggggaaaaacatttgtaggcaaaggaaaaaaaacacatagacatctttagagagggatggagactggagtttagctgtaaagtgatgcagtatcgaatctgttcttctccatcatgagaagggaggtgaagctatatgacaccactcagaaggttgcagggttgtcttattattcctataaatctgaaagctataagaggagagttcaaaacatgaatagtcacagaattctgattgtcaacaaatttacttatcataatgttttactctaggacaaatgcatttttcttccactttctcattctcttctctcattcctctgtgggtgtgggtgggtgtgtattgggggtgtggttgaccttgtatccatcgggtacttgatattcccacaatattgtgagacagtcactgttagccaaagcgttctctgctcatgcagctgtttttcagaaactgagtgtaaaccggggtcccagacgtgcttcatgaatcaagtcttcttgactgtggctgaccttgtgagacataataatcaacattcattcaactcaggttcaattattaatttactgaatgagattatccatgtaaaagcacttaacacagtcgctgattcagagtaagcactcagctgatgctttgttactgtcatcatcatttgctgggaagtgggagagtcattagcataactcccaactaagagtcactcttgtagtaaccctttcaaagctgccattccaatagtcactgttccaatgtgcccattgatggctacaaattagagaaggtggtttgcctggggtcagcatctcaataaaactgagtaattactctttccttccttcatgactgggagaccaagacctgtcttgcacagtatttatggaatggagcctgaaaatctctttcaataccacatccatcatccctgcaaaccattattctcagaccattctcttgtcccacctaaactattacatgctgccagcctctcctcactctgaggtcctgtatccttgacaaattttcatcctaaatcacatattgctaacatttattgagagctctcaatggtatctgacactttgctgagctcttaaagaacatgcactgtcccatttaattctcactgccctaagagacacatatgttatgttcccatttacagacaagaaaagagaggctgagaagggtgagggtacttatccaagatcacatagctagttagtgatctgcatatatctggttttgccacacctgtatagacaccaatgcctggcacaggaaacccaggtgtgtctgattccagagttccagcttcaaaatattacataataattacatcattatgtacacattatatgcatatacatcatgcacatatctacacagtaatcattatatcactcccctgccaaagacaccttattcccttcaacagggatcacaaacgtaaatgtttacaagagccagacaacaaatacagaatacagatgcctgaaactgaggcaagggacaagataaaggagctacgcttttagtgtgtaagcttcctgcttgcccaggtgtgatgccttttcaaacatagtggccaggtccttgcctctctgccttcagaaaatcatcattaaaatgctcaacaaggatcattgactgaagtaagccaccctgtgatcctgcagtggattcatcagagtaaagtggataagagtgggacttgaacataagatggggacagggggagggtcacatatacttagcaaacatgtgacttttgtcaaattatttattcctaagcttcagttccctcatctgtaaaacagggctaacagctctcaccaccccatagcatcactgtgaggattaaataaaataatatgtggaaacctcttgaaacattgcctggcccatagtaagtgctcaataaataggagctgttaggctgaattgatgatgatggtagtgattaataattaaaatattatcttactcagccttgagtttaacaatctgagattttcccaggccctcccctgtagcaggcagggagttggaggtgggagcactctctcagggtcatgcagattggcagtcactcggggagcacagaggggagtagggaaagaagcatagagagagatctctcctcttcctttctctgcatctcccagataaatcccaccagtgactccacccacagcaaattgaatggctgccctcctttcttctaaccaagcctcttaattggtctgattattgtctccttcatttcagctatcggttttacccgatttcatcaagacaccaatatatgtctaggagatgatacccctggtctcaacatccctttgagattatcttggttatctaaaactgattattagccaataagaaattctttggtacatttgtcaaactctttcaggtttgtcaaggtatcctccaccaaacactaaccattcatgatgctctttggaaaaagggttctatagtcacaaaaatttgggaaatattatgtgctgtggcccctcttgaaaatctggaatgcacattaacataataaaggctctgagaaatcctacataaaggaactgatctttgttcaagccaacgttttctgaacttatgaagaagagtcttatgaggacgacccttcttcctcataaacacctgtattgcctgctaactaaactgccaatgcttaggtattaccacctaggaactctggagctgagccacagagagagattatcaatcaaatggatttagacactcaaaaaatacttttaggatgctgggctccagagacaaagtgaagaacaggggtttaagtagatcgcttccttctgttgagtttgaagctgtgcttccacaccctgttatccctttagtacactaagagggaacagagaaggaggagcagcttgatggggacccctcctccatctggtctcagctcaagcaccatgtcttcaggcaggatgtcccctgattaccccatctaatgtggtcctgcctcagtcattctctgtgtcctgactctgttctactgtattcacaactcctgtcattcttgtttgtttatttgattattgtctgtcttgcccaaacactatgaactcctttctgagtgcaaggattttctgtcttattcatttgagtcttgccagcgcccagaacagtgccttgggtgctcactatggattggagaggtgggtgaatggatgaatggatgaacatcaacaaatgggaacaaaggaggctaaatcagtaaacttgcccccattcactggaaaactcagaggatacagcaaggacagctgtccaatcaattccctcttgtctcccattctctatcactgctccagctctcatcttgtgctcctcacaagcccagagtagaagtcatttggttggtacctggtgactcatctccattatagacataactattgacttcagcaatgagtcccttactcaattaatttatttggattaaaataagtggaatcagaaggttcagaagcctgtgagaccctggaactagcctggaaagtcccacaagggatgaatggggaaggggcaagtggcaacactctggtagagtccattgaggttgggcagctggagaggaaattcttagtgtgctcctgtacagactagagaaaatccctatgtgtagcaccatttaatatcactgtggcagttattagttattcagtgctttgtatgcgtccaatgctttatgtgttttatttcatttaacctcatgacaccttaatatgtgattttattgaacttcataagaactctgataacttttcaggtgaggaaactgaagcccaaataatttaagtagcttctcatagttatatagcatttaagtggcaaagaagagattcccatttggagtattctatacataatgaatgaaagtcattctgacattgtaactcttcagtagaactatttcaaaattgatgattcactcaaaaatatttgttaagtgtctgcagtgtgtctgacattgacctagacacagatagaacagagaacaaagcaagcaagagtccttgtcctccacagagcttggcttctagttgggggagacaggcaataagcaaacaaaaacagaaataaaacatatgtcgggtggcaataagtgataaggagaaaaaagagcagggaagaagagtaaggagtgctagggaagactttgccttcctagatcatcctgcgtaaagtaatatccccagcactcctggaacaagctgagtgattcatgcagggagctgagggaagagcagattgtgcgtagggaacagtaagtatgaagatcctgaatggaaagcatgcttggcatttttgaagaacagctataacagattgatgtaggtgaagctaaatgaaccagaatgagaggggtaggagataaggtcagagacagtgaaggttcaactcatcaaaggccttgtaggccatggtgaaaacactgtcattcattctgagtgaaaagaatgcattgaggggtttgaacagaaaagtagtgagagctgacttacattttaaaggattactctggcttctggggactgaggaaaacagggcaaatgtagaaaagcaagttagaaggccattgcaataaatcagggaggaaatgatggaaagttggtccagggtggaatgagtgtaagtggtgggaagtggtcagattctacctacattttgaagatcagaccaacaggtttgctgaggcattaggtgtgggatgtaggcaacaaaacggagtcctggatgactctacactttgggcctaagcaactggaaggatggagctgccaactgctgacctgaggaagccttcagaaaagccagtgtaggtttgggatggggaagatcagaagccgagtgttatgtggggtgcctatgagacagtggggtggtcagtgctgaccaggatttctcagcttcagtgctactgacattttgggctggataattatttgctgtggggactgccctgtaggatgtttagcagtatccccagcctccactcactagatgccagtagtagtcctactctctcccccacacccctgtgtgacagccgaaaaatgagtctctagacactgcaaatgtattctggagagcaaaatcagccccccacacccccctcccaattaagaaccattggtgtagacagaaaagaagaggcctaaggtcggctaagtgtgctaaggtttagagaggagatgaggaaaatcagcaaaggggactgaggaggcctggctagtgagacaggggagagccagaagagggggtctcacactccccttgctattcaaatgattctaagtagttatcttgataaagacctctacaagcaagtccatcatggagcatagaatttaatggtaagctgattatgactgatactgaacaacccagctgtaccaaagaaaggtgtttttaagtttagttatggccttcctcaacaaaatctctggccaggcatggtggctcatgcctgtaatcctaacactttgggaggccgaggtgggtggatcacttgaggtcaggagttcaacaccagcctggccaacccggtgaaaccctgtctctagtaaaaatacaaaaatgatccaggcctgttggtgggtgcctgtaatcccagctactgggaaggctgaggcaggagaatttcttgaacctgggaagcgaaggttgcagtgagctgagattgtgccactgtactccagctggggtgacagagtaagactccaaaaaggaagaaagaaagaaaagaaagaaaagaaaaggaagaaaaagaaaagaaagaaagaagggaaaggaaaggaaaagaaaggaaggaaaaaaagaaaaggctccaaattcaaccacttggggttttttgtttttgtttgttttttgttgtttttttttctggtgtgtttttgtttgtttttccagaaagggtctcactctgtcacccaggctgaaatgcagtggctcagtcttgactctctacagcctcgaccccctgggctcaagcgattctcccacctcagctccccaagtagttgggactataggcacggaccaccactcccggctaatttttagtattttttgtagagattggatttcaccatgcccaggctgttctcttaactcctgagctcaagggatccacctgcctcagcctcccaaagttctaggattacaggtgtgagccactgtacccagcccctctacttgggtttttaaagggccttttaaacttctgtcacttctaggacattgttaataaaagtagctacatttattcattcaagccataccatgtgttcatgtgttaatgctttgcctgaattatctaattcgatctttactaacaaccatgaggtaggtgctttgcttattcctattgtacagatgaggaaactgatgctcagagaggttatatctcctggccacaatcacccagctcctagtaagtgaaaccaagactcaaatgaggccatctaactacaaagtccacatttataaccacagcatctctagatttccccactggctatgcctggctttactctctgccacttaattttccaaagtcctgagcctcactcaatgtggtggaaaccttaaaaggtaaaacagagcacctgacaaacagagcagtgggaatgcagaggtacctagaagctggcaggctccacatggacttaactgtataccgtgaatctatctctaacatgagaaaggagagaggaggatgcaggaaagaaggaagcaggcaggctggaagtgtcacaaaaaagaaaaaaaaaaagagggtccactgaaaaaagatcaactaacatttgtaagaaccttagaagcattaaggttcataacttgctgctttgtctaccccaggggttaaagaaagcaagttttgttattgtcaaatgcattgaaagaaaagttccaggggtgagcgattggttcttttattgggtatttcagacagtcttggttgaacctaccctcgcttacgtctatgtctccttgggactgagataaaggagagtatgaataccttttaggagaaaatgcatggcagaaatatttgctctcttactttacctgggcaaaggacatgaagataatttttgttggaaggaggcgtacaagttggcattcaaggaaattaaagttaattctggcccttatcagttggtaagccttcaaatttattatttcagaggaaaaattgagtactggtcatcaaattttagttatgtctgggattaagacatttggcctgtggggcccaaatgcttttcaagagcttaggaagctacattttaaaaggaactgtataaactccaaaatatataaagataactataaaatcaaaaatcatatttaattatacgtcttttaaatttaacctatatcagctagttaattacaactcaattcaactttcagctgggtgcagtggctcatgcctgtaatcccagcactttgggaggccgaggtgggtgaatcacttgagcccaggagtttgcaccctgggcaacatggcaaaaccccatgtctactataaatacaaaaattcgcctggcatggtggcacatgcctgtggtcccagctactcaggagtttgaggtgagaggatcacgtgagcccgggaggtggaggttgacgtgagccgagattgtgccaatatgctccaatatgggtgacacagcaagatcctgtctcaaaaaaaaaaaaagcaacaacaacaaacaactttcatacagttttttggtatttttttttcaaagatagtttttagtatgtttgttattttgtgggtgtggggtcccacagtaagagtgactaggccttgtggtgaacttaacatagccccagtggtcagtgtaaggagccccagatgcaactgggaactcaggtagtattttcactctgctgtgatagtgtcaatataccagggtccagttatttctctacaactgagattcatcacttttcaagaacaactctctggctccaggttgagcctatgtcatgcacttggcctccagagccatttccccaattctttaagacaacacctcagtccttactgaagggcatttagccagctggcctcattcatcatttccttttgagattcctggcattcatggccactcctagtggtttctcataagtgttgaaaagagaaaataaagaccaaacccacaagccagtccctggggaaagagacaagcatggctcacagtgtcctcaggggtccccttcagtaggatgatgggaacccagcccatgaaagcagccaacccccgccccaatgcaaaccaacaacagcttccgtaatcccctctatcaaaggcaaccgggaggtctcacgggatggggctggctgcttggagggcagccaaagccctgaatggctatccctgagcacccctaagcgctgcttctgtgtacccaccacaatttgggtccccattcagagacacaaatgttggggacactcaagtgctactgaggttggctttgttgtcattgcttccatgtgggaggctcgatcgggagtgcctttgatgtggttagggcttttcctgggagcacttgagcgttcgtgatttgagagacattggctgcctgccttagccctgggaggtgttaacacacttgcttattcgggaacctagacagtgcctgtggcaggcttggccagcatagccaggcctcagtgcagctctcacaccgtgggtagatcctgcttaatttgacactggcaaaacagagctgtcattttcaagtcactaaagtcattaggcaggtgtttattgagtgactgccatggactttatataatatgcaagggctataaaatatctctgggcactgcataatgtgatattctaactaaggactgcagacagaccaacagaacatagagtagaaacaggatgatgtgattaacagataaagaggttgtatcagttcactgttgctgtgtaacaaaccaccccgaaactcagtggcttaaagccatagtcatttattctcatttgtcatctgaaaatcagttgaaggttggctgatccatgccaggctcagctgaatggctctgctttcagttctggatctggctggccttcgattctcactgtgggtttggcttaggtctactccacatagttcattctgggatccaggctgaaaggatagcagctacctggaggaggctttgctcacattggtgacaaagacacaggagaaaaagctcaaccactcaagcaccattttaagcctgtgcttgcatcacatttgccaatgccccgttggccgaagaaagtcacatgggtaattttaaagtcaagctgcaaggatgtatagtctgcctaggagactgtcttggtctattttctggtgtttattacagaatacctgaaactggataatttataaagaaaaggaatttatttcttacagtcatggaggctgagaagtccaaggtcaaggggctgaatctggtgagggacttttgctggtggggactctctgcagagtcctaaggtggcacaagtcatcccatggcaaaagggctgagcatgctaggtcaggtctcttttcctctttttataaagccacaagtctcagttctttgataacccattaatctgttaacccattaatccataaatagattaatctattgatgtgggcagagtcctcatgacccaatcacctcttaaaagccccactcctcaatactgtcatattggagattacattttacaatgtgtttttgaagggacaatattcaaaccatagcagaggccaaaaggagtaatcgcatgaacaaatccaacatcaagtgggcaggaggaagactcctctcttagagagggcaggagagtgtgaatcccattgaacaataatctcatctatcccctggggtcaggaagggccagtgaaggaagataagaggattgggagtgagaggaagtgttccaggcactcagagaaggaagtcagaaaaatgagaacaagtccttttgccatagctgccaaaaaaaaatcagacccaaattcaagccccgattttatgtttctcagactgagaaaacacaaaagccattgctcagatggtttggaaaacatttgcaaggtcagctcatttcatgatgtttgattccagtactggcacttggattacttgtgcatctttgagatgtcactgaataattatcaccacacttttaggatttattgagaatcaggctaggacgtatttcctcacctcacaaaagaaagctaggagaaaagcactatagacatctccattttacaagtaagaaaatagagtctgcaggagagtcagctgttcagcatcactcaggtagaaagtggcacagctggatgtagaagctaggctgccagattccagagcctgcactcttaatcctgtgctgcccagataacgctgactgctttgtattaagaacttacattctcccacttaattgggagcaaggcagattagaaaccctataaggtagatgctattcatgtgaccactttacagacatgaagactgaaacctgagaggctaataaatgtgtctgagatcataaagctgttagatgatagatatagaagagtcttactccaaaattcctccccactgcaccagcttcttcatttataaatgaggggcatagccaaagttgtcttcaggacttcttcagctcagaggctgttgttctgtctctcccagtttttttttttttgtttttcccctcatttggctcctgttttcagagaagctggttggaatgcaaaggggtgtgcaatgcattttacaattcccctggcccaagcctgtcagtggcttttgcctagctggctgtagtgtaggttttgtaaacttttgagtcttctggagcctgtaaggtgtcttaaggcagattcaagttccaaagacacaattagccagagtctcccagttatttatgggaaccacagttgcaaccataacaaacagctcaggttacaaaagtaattatagggaaacacccagtgttggaaattaaataggagttggttagcagaattgctgagaggagggaataaatgaatgctttccctataacttcataggagctcctttttatgtctgccatgcggtgagcagttcattttctctaaagatactcaggaactaagaataaacagatgtctagaagaaggcagctgggtgatggagatggggcagaagagccttagactgggaagacagagccaacatttcgaaggacaaaaatctcacctccttttacaacaaagggggagatccttgggatgccccatgagctccatttcagagaaggcaacactgacattcaaatcaggtgatctctctaatttagcctttgacagttcctcactatgccatcctgttgcttagctccaaccttggaaaatgtagactttactgttgcccaactctgtattttcttatgagtcaaccttcaatgaataatgcaatctaagctttcacagctgaataggatttcaaaataatacaggctcagccggacttccagtccccagtcctgcatgtgaagagcttggaagtcattgttcctgtcctcaccacaagaaaaacgctgaacaaactgaaaatcagcatctcttcttagatccatcagaaatgaggttacagggcaaaccactgcccccaaaattggagagacaggcaggcagatccagagaatcacaccttactggagcagaagcccaagagcagaaatggccactgaagtcagtgcagggtttcttttactcagtgcatcaacaaaaatttgctttcaataaaaattggaaatcatacttgaaaaaacgtatagcaggccgggtgaggtggctcacacctgtaatcccagcactttgggaggctgaggcgggctgatcacgaggtcaggagatcgagaccatcctggctaacacagtgaaaccccgtctccactaaaaataaaaaaaaaaaattagccgggcgtggtggtgagtgcctgtagtcccagatactcaggaagctgaggcaggagaatggcatgaacccgggaggtggagcttgcagtgagccgagatcacgccactgcactccagcctgggtgacagagcgagactctgtctcaaaaaaaaaacacagcatacagatagcaagcatcagaaccagattcagatacggcagagatgttggaattatcagaccaagaatgtataaaaactatgatcaatatgcttagagttctaatggaaaaagtgcaagaagaggtgggtaatataagcaaagagatggaagctctaagaaagaatcaaaaggaaatgctaaaaatcaaataccaggctcttggttttaggacagaaaaaaaatcagcccattatacaggtatgcaaacagactctgccaatgacttggccaaggttacacagttagtgagaaaataagcactgagatgcaggtcttctatatgtgcataaagtgtggtatacattattccctccagccttgattcgataggcatttattgaaagtttcctctgtactgagcactgagctaaacaactggaatataacaataagtaagatggacttggtctctgtccttatgaagtttatagcatggaattttcctcacttcctcttgaaccataccaaataatgtccatggataatcaagcattgttaaatttcattttcaacttgaatttcatctccacacatttgtgtgtgtggaggaactcagagtttcttgaaatcattttttcagcaaatgcctattgagtgtgctcatgtgctttgcactgtgctagaagccaggggcatagaaccctgtcctgtgagtttacattctggccagagacaaagcagccaacaaaacagataaaggagtgcatcgtacaggtgacaattgcttcgtggtgaagttttcatgttccaccctatttaaatattgcccccgcctgcttcctggtacttccaaatgccattttctgctttctttttctccatagcaaaaatcagatttgtgatatacgtaggggatttgaaagatccggtgacaagacggacatgtggcaaagagaggcaaataagaatgatgtctgggtggctggcagttcctttaactaagccggggaagccttagaggaacagatgtgagggagaagagatcaagctgaggtttggacacatttgatctcagactcctggagaggagacgttccagtggaaatgtcaaggaggcaaaccaaagccttcatctctgcctcccagacagcccaatttctacaaagcaaacgcctcacttatgtagatgagaggtagcttagcttttctagtacactaaagaacccaaagcccagcctatcaattagtttgcatgagacacactgcgatggcacaattgattcccttggagtggaatatcatgcagtccacctcaaaggcaggccacaagattttaatgcagctgtctccaggcaattattaactttccttcttagcaacaggaccacggcactttcattccttgaaatgacacttctctcttgttaaagcccacagttaattttatgaaccgcaccaatttaacacccagttcacatgagccgtataccttgaataaatgcaaatccagtctccgagacatgaattatggccttatgctgagcatcaccatggcaactaatgacatccccccacccccgaccccagcaccaacctgcacaaaatccaattctccaagggtccttatttgcctaacgtagatgtgttcttggcttactcacatatgcattcgtaaatatcactctgttgtcaaaggtttgcagtggatgtttactgtcattttgggaggtatattccctatgtggcaaatgttgttttttgttcatggggggaaaaattctaatgaaaattactgtgtgtatttgattagcaacatttgttgataacatatggtctgaggaggcttccgcaaataagaggctttaaatagtaaacagagatgcgactgtgatcaagcagatgctccccaaacacagagaacaaggttgttttacccatagatttttctgagctccactctcccaaaagcatattcttctccctcattttctcccccagatcaaagtgttcactttcaaagtggtggtactgtggaacaggtttggagaaataatgtgctgtgactttaaaagtcatccccatccccctaaatatgaatcatctgctactcatgtttattatttgatattaataatgatgtagtgtgactaaatgagtcagccagctcaagtggatcaggaagcagcatttgggcaccacgtgtctgaaatgctatgatacacaagccccaattttctaataaactaagagtgctagaaagagctccatgaagaatttagagcagcaaattggatccccatggggtcagctgtctttgtgagtgcatgtttatagttcgtctttgtgggtatgcccagatgagcattctgctaatctgctaatgaaaataaaagtatttccattaggccaagtcagcaatttaactgtttgtaacagagatcggcaaactttttctataaaggaccagaaagtaaaaattttcggtttgttggccctatattctctgtcataactactcaattctgccattgctgcacaaaagaagccatagacaaaacaaaaatgagtaagctaactatgttctaataaaacgttattgatgggcatcaaaatttgaatttcatataatattcatgtgttgcaaatattcctttgattattttcagccatttgaaaatacaaagcccttattagcttatgagccatacataagcagacccatacccatggccatagtttaacaacccctggtctataatcctaaaatgaagacttacattttttagtgctttctatgtgccacgtattgaggtaaacaccacatatccaatagcttatgtcctacatatccttccgtcaaggactccatcctctgggtcagttctatttttttaagagactgggtatcactatgttgcccaggctggcctcatactcctgagctcaagcaatccacccacctcaacctcctgagtagctgggactacaggtgcagaccactattcccatctggctatatttataataaaactaaatattcttatccccaatttatagatgtgaaagctgagacactctcacacgttataagtgttatttctgcacggggcatctcccccaaaataatgtaatatccatgggggcaaaacttacatctcactcacctttggatccatagcagtgcctatcatagtgatttgcacacagtagacattcaggaagtgtttcctaaatggagcactatttggagatagaatccctaagcagtgaaagttagagcctcatctgatgccaatatggcgcttttagattagtcagttacactgttcatctatttatttgccaccctcttacaggaagtatttggtttggaatagacacacatgtcccaatacacattccttcatctttggaggtgcctctatgggtgatggcatttctacagtctctgcttatgtgcttgtggctgaaaagaccaaaagtaataatagcagcttattatatagcttggtggcactttccatcactataccgttggcagccacattgctgccagcccttggagagccattcctcagccttcatggattgacgccttgctcccaagagagctgttgcatgctgagtatcctctgcatgctgccagctgctgtgtgcacttcagagagtttgtctgctcaaaaaaaaaaaaaagaaagaaatcaactcctcaaagagataaaagccctcagttgaaaggggcagtcacacctttggttatttcatgtgtctcacctctctacaatcccctgaatttagtgacatggttattctgaatttgttgctttcctagttactaagcaaatatttactgtgttccaggccctgtgttgggtgccatgtatatcattatatatcgtacattatatatattatatatataatatattgtatattatatataatatggtatatataatatatatatattatatattattatatattatatatattatatatatataatatattatatatataatatataatatattatttattatatattatatatattatatataatatatatattatatatacaatatatataatagattatatatattatatatactatatatattatatattatataatatatatattataatattatataatattgtatatataatatatattatattatatattatatattatatttattatattatatattatatataatataataaatatataatatatttatataatttgtataatttatataattatataatttatattatatataatatatataatatatatgtaatatatatataatatatataaaatatatatataataaaagaaaccacagtaaagcactctcatttaatgcatgggctttgaggtcagaaactctgagtttgaagcccaattctgtgatttgtcagaaatattaattgagataattcattagaagcactaagcccagggcctggcaaatcataagtactcaataattggtggctatttttaacgtttatgtaagctagtcatacagtgtgagtacagtggaggaaaggatgggatcacagaatagggacacctaacccattttacattatctacttcatcttcagagagaagttagtcagttaacctttccaacttctgcttgcaataaatattatccacctctggtcttttcaaatcaaaatgcaattgtatttcagttctgggacactttaaagaggtattcatcttaatagccacaatcagttgcacagcaagggcaaagaaatgagcagagaacaaaatagattcatttttgggtgtgtggccccaccaaaaggccaaggtttttgatgcttcctccactggctaatttgtctgtctgggatatagtgctctgtgaagtatattgaacacgtgaaataaattcaaagtaaaaagccagagtggcccaacgtcccaccagtcttgaaacagaacttcccttttcagttacagaggtaactcatgttgatttaatcaagacataaagcagtgaatgatggaatgagcaagggaggcaacatggtggcctgattaggagtttgaattctgaggtcactaactgccatttactccttgtgtgtgaccctgaacatattacccagcctctctgtgactcatttataactctggaggtgataattgtaggcatttcacaggatgtccaagaggctttcaaatgatcaaatgcatgtatggctgtgtcccacttttgagataggaatttgtgcctagcacatagtaatctgaataactattagctatttctattacaaatatagccagatctctccgtggctacaaaaggacaaagaatgaatatttttcatgacattttttcctacagaggaaaggaagataaggaagggtgcaaatatttaaaccttcttgattctactaagagtaggaagcattgacaaaaaaaggccagaattcccacagaatccaatgactgtggctaagaccaaaagtttcatgtcaacagccagtgtcagccaacatccacttctcagtccaggctaaccagactggggtgacattggatcagagccagcttgaggggcatgtgacctgtatagctgcacatcttctacattcagaaggggcccccatttgatttaatgctcttttgttgccatctcgaaattcttaataattttatcttcgagcttgtgtttgtgacatcccatggaacgatggactgtggatttgaggagaggaaatactcaagaaaatgaaaatgctttatattttagtaccttgaatggcactttttgtgtgtgttttgttttggagttttggagtttgctgtttttttaacaaggagatctgcattttttatttgcactgggccctgaaaattgcacagccagtcctgattagatgagagaacttctcttttggcctgcttcactggaccaggttaccattttgaaatctgatagttaaatagttaaactgggattcattagtgacctgacagcttgaggtgagccaagggtcatggtgggaagcacagctgcaggcctggtggaagggaaaagaaactctgtgtccaataggatgggggttgtcagggcagcctccagcggcctgaattccgtccagctgatgggttctcggaagcactgactgccccacagtcagactcttgttacacgccttatgagctgagcatctttgggtagcagcaggggttcaggcatcctgggttggtacccactgaacatgccaagaaatccatccacactgaggacagtagcatggaaacatacagtggggtatctccaggacactgggctcaagttctctttgtggcttagtgttaaagcttctcatttcagaactcttttggtttccagcagaaatctttctcttccccatgaccaagtataatgaatgcccaaagaggtatcttttattttatttttatttattttcttttagagacaaggtctcgctctgtcacccaagctggagtacagtggcgtgatcatagctcacagtaacctcaaagtcctgggctcaaagtgatctttaggccttggcctcccaagtagctaggacttcaggcatgcaccaccatatgcagctaattattttactttgttttttgtagaaaaaataaaaagcctgggtctttctatgttgcccaggctactctcaaattcctggcctccaaaagcactaggattacaggagtgaggcaccacacccagccatgcaaagagattaatagtacaattaatcataagtaaattaatggtcacattttttccagtgttgctaatcactaataatgcttattactgataatttttacaataataacagcaacagctttaaaatgagattttgggttctggtccagcttggtcataattccctggaataaaataggcaagatctttgagtgtctcttcagttttctcatctgtgaaatggcaatgataatagctattttaccattcatctgtgtagtagaaagggcagtgtcaatcttgcttcctttacacagggtcagttacttagtaagtgcttgataaatatgtgttgggtagaagccacaaaggatacaaaagtacagcaagataaggggactgatttctagtgttctctagtactacagggtgaatatagttaacaataattaatagcatattttcaaatagctagagaggattttgaatgtttccaacacatacaaaaaatgataaatatttgaggtgatggatatgctaattactctgacttgattattacacattgtatacatgtagcaaaatagcactctgggccaggtgtggtggctcatgcctgtaatcctagcactttgggaggccaaggtgggtggatcacttgaggtcaggagttcgcaaccagcctggctaacatggtgaaaccccgtctctactaaaaatacaaaaaaattagctgggcacggtggcgggcacctgtaatcccagctacttgggaggctgaggcaggagaatcacttgtacccgggaggcagaggttgcagtgagccaagatcatgccactgcactccagcctgggcaacagaacgacactctgtcaaaaaaaaaaaaaaatagcactctgtaccccattgtattagggttctccagagggacaaaactaataggatatgtgtgtgtgtgtgtgtgtgtgtgtgtgtgtgtgtgtgtgtgtgtgtgtgtgtgtatacatatatataaaaacgggagttaattaagtattaacttacaccatcacaaggtcccacaataggctgtctgcaagctgaggagcaagaagagccagtctgagtcccaaaactaaagaacttggagtccaatgtttgagggcaagaagcatccagcatgggagaaagatataggctgctggaaggctaagccagtctctcctcttcacgtttttctgcctgctttatattcgctggaagctgcttagattgtgtccaccagattaagggtggatctgcctttgccagcccactgactcaaatgttaatctcttttggcaacacccacacaaacacacccaggattagtactttgtatccttcaatccaatcaagttgacactcagtattaaccatcatagctataaatatgtacaattattacatgtcatctaatcattaaataaataaatataaatagataagcaataatcactattactagaatacatctccttaccttgggaagggaaagtagccaaaatttgttgggttctcaacctgttccaaacttgcagctgtttgttctttacaactagtctgtgaaattagcttattttatagctgaggaaattgacagggacattaattccttgccccaaatttcatagtttgcaagtgactaagccagaatttgaactaaagatatctggttcaaaacccttgccattgctaagacaaagatttccctatctcggggtcttgctgcagttgctgacaaccacttaggagcttctatctgtacctcaaacgttttgctaatgtgtttgaaacctgtcactttttgtcctatctcatggcctcctccatgtcctctctgtctctactatgactgttgtgctttctcagtggtttcatgcactgagatccccatggatctggtttcccctcatctcaatttttctggtcttcttttgtcaactctcactagattccctgtgtctttgagttaataggatttatttgattgaaggcaacactgagactaggatgcaggtttccataatttacaaaagaagaatgcaagcagccaacaaacagggtaaaatgttcaagcccactagtagtcaagaaaatatccatgaaaacaacaatgataaaataggccagaagaaaaagtgaatagtgatactcagaacaggcaagaaggaagccctgtgatttgaactctcgttcccaaatggtggcaggatagtcactgcctttgtggaaagcattttgggaataggcatctcaagccttgaaagtgtgcattgaggaacacagctcctgcaacagtgtaagatctctaaatttttgttgatggaagaagtgatctcccagctaggtctctatcccaaggaaacaatcagagatgaaatcaaaaattaatatctaactcctagctactcaggagactgaggtggaaggattgcttgagcccgggagtttgagaccagcttggacaacagagtcagacccccacctcaaaaaacaaaacaaaacaaaattaatgttcaattctatttcaataatagaacaatggctaaataaattatggtacatatagaaagtgtaatattatagaatcattaaaaatcataatgagggccgggcgcggtggctcacgcctgtaatcccagcactttgggaggccgaggcgggcggatcacgaggtcaggagatcgagaccatcccggctaaaacggtgaaaccgcgtctctactaaaaatacaaaaaattagccgggcatagtggcgggcgcctgtagtcccagctacttgggaggctgaggcaggagaatggcgtgaacccgggaggcggagcttgcagtgagccgagatcccgccactgcactccagcctgggcgacagagcgagactctgtctcaaaaaataaataaataaataaaaaaaataaaaaaaataaataaaaaaaataaaaaaaatcataatgagcattttaaagtatggaagttggtcattgtataaagtaaaatgaaaaagttctctaaatgaaattgtatctatgctgttttctagtgctgtaaaagacattatatttggcatctttcatttattcaacaaatatttgttaagttccttctatatgtctagcactgtgctaagttctgggtatgcaacataaaaacacagtccctgtgctcatggagcttacagaatattaggggattctgctataaaacaatgacacaaatcaataacttaaatccagtgattgctaagatgcaaaattaaatagtatgctaaagagaggttaataccagaacccagtttagattgggagatcaaaggacagtggttttaagctgagccccaaaagacatagcccagtgaatgggtggggagaaacattgccaacagaggaaacatacatgtaacaggtctgagatggcagagtcaggaggcttgtgagattggagcagatgagtggcagtccataggtaggggtccagattgccccctgagtgcaatggaacaggtgccctggacctggggctcagtgcaatccagttaacacttctggaagatcactctgcttgcaggcacagaatggatagagatgaattctctgtaagaataataatgagtgaatgaagaggctgcatttgaagggcacatcaagggctcatgtgagccgcacctggtgctctacccagattttgggtaagccaggctcccgtgtgtggaaaactgagactccgatatccacaaactatgagcagggaatggcatttcccacatcctcatccttctcccttccaatctctctttgaccttaacagggtggagctccataatctccttattcaactcatctttgaatgccagtgaaaatggggctccccacctccccaccactattgttgaagtctcatttgaaagtcaggtgttggcttgaaccaaatgaagccccatcccaagatgtacaactgcagtttccatgaatgaggaagtcaaaggatgcaatgaaatattagtgatttccctggaatcgtttgtagatacagcaaatgcatgggaacaagttctcaccaacatgagtttatgctaatttcaagtcattccttatagtgctctgtgaagaccatggcaactttctgagcatctgtctttcatttgcctaacaagttaattaacacgtttgttactctggcagctttgaaggggaggagaagaggatgtgacagctaatgctgccttgggttaaccctgcattcacctgacctgggaacaatggaatagtttagactcatcaaggcagatatgtctacaatgacctctttgattctgtctgcagctggggcacccagggtgacttctccacaacccatgcactgccagctgtgaaggtgaagctgttcacagagagcacaggcgtcctggcgttggaggacaaggagcttgggcgggtaagcacttcttatcacaaggggaactccacagagaggatttccccagctaggtctccagtgcacaggtcaccaagaggcagcattgccaagtgctgagaggctcagttttgaacattaagtcctggactccactctacattggctgggtgaccttaagcaagttcctcaacctctctgagcctcagattctcttctacaaagctggactaacaagagtgtgccctacaggagatagagcaggagttctcaatactatcagacccaaacatcctttagagttaagatttgtaatgtcttttactgtcttaaagtggagttcttagatgatttaactgcctgcccacctgacaatgttaaagtcaacacaatgacataagagagaaacaaaaggaagtaaattaataataaaaaacttcaaaatgtacatactcaaagatctaatagaggagtgctttgcttgctcccatatgaagagtcactgtgaaggtgacagctacaaaatccactgtggggtgtggatgtatgctgtagtggtgactcctaagcctgaggatcagtaaaccgatttactgacatattaagcaatacttgtaaagtttccttgatttccttagaaatgtgccaaaaagactttgatttgaaatgtaagacaagagttaagatctccacgtagttcattataaacagattttttcacctccaccaatatcccatgggaatattcaaaagtcagatgggatgcaggaagatgcctcactaaggagcatcatgtcattccttgcaggatgtttagcatccctggacccacccactcagtgccaacagggactggcaccaattattttgtcaatcaaaacatcatgaaaatttctgagacatccctgagaggtggtaccaacccccttaaaaaccacagagataatagtgaaatttctgtttgcatctgaaccattgactctgcaccaagaagccagtaatattttcacaagttgattttgccaataaccccacctgcttgtggtaaaatctgaactcgtttaatttggcttctgctcacctcttcacccccatctgctgccacattcctccccgcctactataccccagcatcattggccaaatttcaatccctcatataaaccaaattctctccctcctcaggggactttctatctgttgtcatttccccacctcccaacccttcaaaaagcataaatgcattctctgcataaatgccacctccttggagagtcctttcctgacagctcagtccccttcatttgctatcttagctccttgttcacatatactactaaagtgatcaccaatgagagaaagaaacagaattgacagacattcaggcttctgtctgccccactggactgtaaaatctccacggagacagaaacctaaactattttgttcactaccttatacccagagcccagcacatagactttcaataaattttatttcagccaggcgcggtggctcacgcctgtaaccccagcacattaggaggccgaggcgggtggatcgcctgaggtcaggagttcgagaccagcctggccaacatggtgaaaccccatctctactaaaaataccaaaaaaattagccgggcgtggtggcaggcacctgtaatcctagctactcaggaggctgaggcaggagaatcacttgaacccgggaggcagaagttgcaatgagccaagatcgctccattgcactctagcctgggcaacaggagtgaaactccatctcaaaaataataataataaaataaataaataaatataaattttatttcattctggtttaatgtgtaatcactcctgaaagctacgtgatctcagcccagagaatctctctgagcctctgatataacatctatagcataatgagagaccaccccagacaagcacacaggcacacacacctaacgatgccagcaagaattcatctcctgtgcttcctttttttcttcctttctttcacccatttttccaatctggctttcatctatagaatcaacctggagtcatattactgcagcatagactacagatggagataaaacgaaaagtaaataaagctaacagcaaaaacaaaaaaacagtgtccctacccagaaaagtgggaggaaaggggatgatgaaagaaaataaaaggtttagctgttttctttgagaaacgatactcatttctgtccctagggaaagagagacacacatagagtggaagaattatcctgcctttcatttttcttcaaatttctccttttccagtaaggcagatgttaagaatcacgagtctcagagatcctgaatattagtgttagaaggaacaagtgtaactgaccagcgcaggatgctcaacctgggtccacaatgagcctccgaagacccaggatccaggatgccctggaatttttttttttttttctttagctggagtctctctctgttgcccaagctggagtacagtggcgtgatctcggcttgctgcaacctccacctcccaggttcatgtgattctcatgcctcagcctcccaagtagctggtattacaggtgcctaccaccacatctggctaatttttgtatttttagtagagacagggttttaccatgttggtcaggctggtctgaactgctaacctgaagtgatccgcccgcctcggcctcccaaagtgctaggattagaggcatgagctactgcacccagcctggaaatagtttacagatgtgtttgtgcctgggcctatatgcatttttctggactggctaccaaagcattcactgacttctcaaagccatttctactcagaaaagttaaggccactgacatattgaaatcctttgttttatagatgagaaaacttgctcccatggaaagcgggagacctctccagagcgatcaagccagtcagggacccatgcatgggccaggccactgtcccaaagactttgtgcacagcccctcagtgctctctcaagacaaccctactgaggcagccacagtcatcacctctcttgtacagaagagcatgctgacgcccagagggttcagttacttcaggaatcatgttgcctcatctccagggctatttgcactacactgtgttgtccctacacaaaaataaaaccctgggctgtgctgtggtggtgaagaccatgggcttgccacagccccacacacactcatttcataatggttcattctcttcttcaggcccctcatacattcccccagatgctagtttacccctcctttgtgccaaagaaactttctgccaattgcagcggagctggcctgcctggctcttgtgctggctggacaccctctgctggcagcatcttcatgggcagcagctgggtgacctaagagtgcagtgaagccacacttggacctcacgagagagtgtttctatgctcgaattcttcccacacttagcagacctgtgtttagaatcctggcgttacatttacttattcaaccactttttggtttgtttctttagggttatgttttgtttttaataacctttttaattaaaaaaaaattcatgcacattgtgaaaacaagttaaaattgatatatagtgaaaattaatttttctcttctatctcaccctcgtatcccttcccagagaaagattttgttttcaatttatggtatccttccccagatagtctctgcatgtaccaacatagcgtatataagcacatatgtatatattccccctcttttaaaaaaagcacagttggaagctactatatacacacttctctacatggtgcctgaaatcattatatttggtgattagttttcatatgaccctagactgacctgtctcctttttacatagctacattgtattccattatgtagatatattttatttaacaaatcctctatggatgaatttttagattatttcatctttggctatataaacaatgcttcagtgaatagccttgaatttatttatttgtatatgtgtgggtatctatagaataaattttcaaaaaatattttgctgactgaaatttgaaatttgacagctactgccaaattgtcccctaaagtgcatgcaccaattgatccttccacaaaaggcataagagaatgcctgttttcctgcatccttcccaaccctgcaatattataggattgtaggccctctgtgtccaatcatttgtcctgtgcacagagcaaataggaataatgactggtaaaaaacccttaacctcacaaagcataagggacacagacataaaaacagaaattatagtgcaatgtgggaagtgttctgctaggaaaaaaaaaaaaaaaagaaagacctggaaatgaagcacctagcaagaaggcagaatccagtcatacagtctcagggacagggattctttcctggggtatgcaagaggtactgaagagatataggctaagtcgaggaggggatctgtcaggtaaaggctgagggtaaagcagccccctagcaggccctgcctgtgtgcccaggcaactaggagaagccacggctggctggagtgcagctacttcagggggtgggtcgtggcggccacatcagcatccccacatcaaagtgcagcacacatggtcctcggctgaattgacaaagtgcttgattagcagcctggaatgtccagatgaggtgtctggtctgcttgggattcatgtgcacccagaaggaccctcataattcagcagtgctgacacatacaaatgagtcatcagcctgtcagaggcatggcagggtgggggcaaagacagaagagagctgtggtcacttcatctctccatccaccctggaaaagagggctccccagcaagcagttgcacaggggacaaagtctttgtggcatagccggtaatgagctgcggctattgcgtcacgaatggacaccatattgccagtgggaagcacgcccagaatccatatggcgaaaggcctgttaatgagctgcgggtgcccagagcactgctccctctgtgattttgccaaacaggcaggagcagacagaagcccagggcctttcttacttaccgcggttctggccctggatggggtgtctcttaccagcacctccctttctggcttcccagcacatctcacccctacctctctcaggccagaccagctcaggatggagggtcagcttcactgaaatcagcagctcccacaaagtgtcaggcctcgggatgtggtacatgatacagggtgacgtgtaagaacaggcagttcctggagaaaagggagaggtctccacaacccagcagtgccctatctcactcatttcctcccagcatctgtcctatgatatgttgcagttctctggtgccagttaagtgaatttatacattttatgctggagctttaactaaatcaacctttacaaaataagcgacctcagaagataactgcacaaaagctctgatttggaggtagtactagcaatgcaagcctggcaaacaagaaaatggtggagccaacacctgacctactggcaaacactctgtcactcatatcatgagataaaaacaatgccaatgtaatcagatgggacaagatgtcagtcaagacatgacgaaattattgagaagacaactcaaactacagatttataaccaatgtcatcaacaatgtaccttgccctaaatatatgtggtaccttaaagatagctaataacaccacagccaccacaattagcaagttattccaaaatgtagatttttaaatctttagcccatctttgatttttgtatattttatgatatatgtgataaggtaatatattaatacaaagtaaacttatgtaatataaaatgttagtatacagatactgggctaattgctcaacaacattgtactaaagtagggcatgatcaaaaaacattgacagcctctgttctgaaaaatcaggcttttctgtatttcaatcatgtcataagacagtgggaagacttgaaatttgtggttagcaagaatgtatatttcatcagagacagggaacttaatgaagaaaaagggtcaggcccagaaagagaagggctgagaaatcggcataaatgaagcacatctaagtgggctgatttttttttctgccatggcctcctcctcctcctctcagcagtcttgtttcacaatcacacagggagccatatgtgtctgcccttcaagcatgggccaagcttgcatgactagtgaagctgatacagcatctagaaggccagagtgtccacccataagaccatgagcccctcacggccacctccagaggtgaaagaagcccaggaaaggggcctgccatccttgcacctagagaaaataaatactttgaaaacagccaaaacaatgtgccacaaaccagggcgtgctgccatcacagaagcaaatcttagcaagcccagcttttgttgtgcctatatttagttcatgttcccttagtttcaaggattttccaaatattcaattcctccctaaatgcatattccccagatcccatgtgtctcctgagaactccgtgatcacaaagcgaaaagtggatttagtgagttactcacttcctgtttcactctcagaattccagacaataagaatggatgcagaagacccaaatcaaactgccatctctgaagcacactgatgaaaggcatttcctaagaaatggtccttcttcaagtcatgtgtgctttcctccatgcccgggcaaagttggatgttgtgtgataagatttccaggccaggtgaaatcaggttgaaatgtgtgactccaatcaagtccctttccttccctgagtctcacatttctcatccatctaataaggttccttccattttcccctgggggccttgaggaatttctcctcttgaaaagtgaaagaaatcctaaagaatggagaaaaagagtggactaaaaggactgtctaatatataagcatatttcttccttttatgcatccatcttcttatacaaagatgtagagaataatgtgtggacaatattctccattctgggtttgtttagtacgtctgaacattagaaaagtcaaagcagaatcacagagatcatgattttcatgacagaatcatcacagaattacagaaatctttacttttacaaaattagccaggaaggatcaaaagaatgtgtttctatccccaggtatggctgctccacagtgggaattgttcaagtcactccactactcagaatcaaagtttctaatctataaaaacataatggtgcttctcttttctagttgcttgtcctttttcccctacaggttattctccatcccaccccgaacagccccaaacagtcagagtggcacaaaatgacagtctccaaaaactgccccgaccaagatctcaaaatcaaacttgctgtccgaatggataagcctcaaaacatgaagcattctgggtaagtgtttcttccccaactagcagttttggacacacgtctgttcatttctcaaaatgaaaacaaaaataaacacaagatcttcagagaactatgtagaaggaaatataaagaattcatattaaaatattcgactttgatatttactgtaaacttcctcaattcttaggatgactgtatttgcatttttgctgtcaaaatagaaaaatgtccttctctttctctaatacggtttctaggacaattcaaaactttcctagcagcatgctaggtgattctagtttggagaggtcttacaggctccgcgtaccttgtcggaggcatccagatcattcaaactctgcatatgactcacttgcacctcaatcagcaacccacatctttgaggtgtgagcagcagggagaggccaccttcaatcaactcacatttaatatattttagtatttagtgcagcatttaaatgaatgagaaaaaaatagaaaatttgtgatcatcttcattttcttaaggtttgagaaaaatgaccaattaatttcaagtaaagcaaaaagaataggtaagatgccaaataagaccagtgatttttctagcaaatgtttgttggtgactgagtatatgctgagccatgacctattaaactaaatcacatggatgtcattatctcagaaaacatgataatcgtgtaactctgaaaagggaaagtttagtagaagggaatggagtgtttggcgggtattctgcaggtacgctgccaactggctatcattctgcttagcccctctgggccctagagaggtctcgttaattcttttttgggtatatgtatattgatgataaagctcaaagtactaaaagtgccattaaaaatgagggttacggctgggcacagtggctcatgcctgtaatcccagcactttgggaggccgagacgggaggatcacctgaggtcaggagtttgagaccagcctgaccaacatgatgaaactccatctctactaaaaatacaaaaaaattagctgggcatggtggtgggcacctgtaatcctagctattcaggaggctgaggctggagaatcacttgaactcaggaggcagaggttgctgtgagccaagattgcaccactgcactccagcctgggcaacagaatgagactccatctcaaaaaaaaaaaaaaaaagaggattgggtagatgtactagaggtttggggaattcacaaacccaatttcagggcctagccgtgattaagacaggtctaaacagaagcccacatgaagtccaggagggcgtgaccaggacaggaattgaacttcccagtagatgagcagaccacagcagcatgcagtcagatagtaaagaacaggagcctagccatggtgcctcagagttctaggaagcaaaaaaagcccaaggttccagagaaaaacaaagacctaccagtcagggcaccagagaggttcaggtatgaagggttccagaggaagcaaaggtcacctgtgagctggagaccagtgactcaacccaaggtttggtttggatttagagaatttgctttgcattgtcttgaggccaaattatgccaagcctgagctgggattatggcaaagctcttctgcctggggtgtgaaaaagccacaggagcatgtgcagggccctaaggacacactcagtcctttgtcaagtgtccaggatgaagtacaaccaggttttcttcgattaaattagaatgccgtgaaacattgctgaggtctaccgttcttccttcttatcatgctcctggtatatattctgacaatattcgtggaatttctccctaatatgtcttccccctctgtgatgaacatcctactttcaagacaaaggagttgataattcagttaggtttctgtagtacacaagagaagatcttcatctttagcaaaatcctgcctcataaatactccataaatatttgctaaaggaaccagcacatgagtgagcagaacagacgtagaaagagagagagagagagagagagagagagagagacaaagagggtagggcagatcaaagagagaaaataaagaacagaatatgaatgaatgtatctgtcctctaaagtgctttttttaaacttcctttaaaaaaatgatcagtgcctcaacctacattcgagttctctctgaagcactgtactaggagttttattgtgtcacttactctccacagcaaccacttgacacaggtattattttccctattggatgaatgcccatttcccacattctcttcattcactctgctagaaactgaactacctgatttggattggggaatttttgtgttgacttgtttgtaaaattattaacatatttcaggctaccttgaccctacagatgacagaagaaatatgtagctcacttctgacaggtttcatagctatttcatattgctggacttccattttaaaattacccctgccaggagatacaccaagagagcttaaaatagctctgaaaagtgaacggtgagtgccttaataacaccatcggacccaacgtggcctaaatcagggatgagcaaccttagttgcctaagggactattcagagaaaataaaaatgtttatggagtacattttttttccatttaaacttaaaatagttttactgagcccagttgtgtaaaggagggtagaaatatgagagcaatgtcacagcttggaaaatgggagaaaaaaaggaaaagaaaaatttttttgagatggggtggggctctgtcactcaggctggagtgcagcggtgtgatctctgctcactgcagcctctgcctcccaggctcaagccatcctcccacctcagcttcccaagtagctgggaccacaggtgtgcaccaccacacccagctaatttttgtgcttttggtagagatgaggttttgccaggttggccaggctggtctcaaactcctggactcaagcaatctgcctgccttggcttcccaaagctctgggattacaggcatgagccaccgcgccctgccgaaaaagcaatttttaagaagcatagctgaggttataaattgttcccatgttaaggttttttctaacataaaaggaacataagaatcactgggaattatgaatattggtgtgcactgtggttctttgaatgagccactgggccattcagaataactttattgaatagaaatgtgtcaatgggaaaaatcaacactgcttcttgaccttaaaatgttagtatctgggcatatttgagaatcagcaactcctagatgcctttctaattttcatcttttatatctgcatggtgttttcaagttcaggaagtgcattcacatccattctctcattttatcactgaaaccacctcacaaggattaggtattatcattctcccatcttaataaatgcccccccgacacccagatacccagaccaaaaaccttgaagtaatccttgacatttttctttctcatccaccatcaatttttgtttttctttttgagacagggtcttgctctgtgacccagactggagtgcaaaggtgctatcatagcttactgcagccttgacctcttgggctcaggcagtcctcccacctcagcctcccaagtagctgggactacagccatgtaccaccacgcccagctaagtttttttaaaaaaatttgtagaggtgggatctcactatgttgtcttggctggtctcgaactccttttttttttttttttttaattttctaaccaggttcaaaatttaatgtccttattttaattatccaaacagacaatttcagttaaaatttatttttttcttgtgaaaagacataatagaagaaaaataagttacaatttgagatgaaaataattatggttttaggggaaggtagcatcagaaaatgggaatgccagcagaatgagcaagaaagtaggaatgagaggaaaacaaatgcctatcagatttggcggttagcttcatatatattatttaattcttacaacagctctacaagatattagagttaccatttttactaactataacaactagaaatgcaagaaacttcttctttacaccagttaaataggcagatagtgatgaatgaggattccagtgcttatctctctagctccatgatcactctttactgtacctctttgtgctattggactgtaattcaaatgacccacataaaattacttctaaagcacattcaaatgcagattcttgaaacccatgccaaatccagcataagattttctaaggttgtagtccaaatatctgcattttaaataagaacatcagggaaattttatgtctatttaggtcagagatccattgaatactactaaactaactgatttagagaaataaaacttaggcttaatttctatttctaatcttttatagattcattactttaagcaaggcacacattctcttacccttagtctttagcatttgtaatatgtcttcccactgccttatggccttcattgttcctgatgagatattagcagttaatcttattggatttctctcatatacagtcagtggtttttttcttgcctctttctttttttttttatttttttttattatactttaagttttatggtacatgtgcacaatgtgcaggttagttacatatgtatacatgtgccatgctggtgtgctgcaccattaactcgtcatttagcattaggtatatctcctaatgctatccctccccactcccccgaccccacaacagtccccagagtgtgatgttccctttcctgtgtccatgtgttcttattgttcaattccgatctatgagtgagaacatgtggtgtttggttttttgtccttgcgatagtttactgagaatgatgatttccagtttcatccatgtccctacaaaggacatgagctcatccttttttatggctgcatagtattccatggtgtatatgtgccacattttcttaatccagtctatcattgttggacatttgggttggttccaagtctttgctattgtgaatagtgccacagtaaacatacgtgtgcatgtgtctttatggcagcatgatttatagtcctttggtctcgaactcttagcctcaggcagtcctcccacctcagcctctcaaagggctgggattacaggcatgagccaccaaacctggccgtcatcaaattcttttcactccatcttcaagataaatctagaattcaacctttcacccctgcttccatctcaccattggcttccaagcctccattgctgctccccttcacttgctgctcctgcctcgtaagcagtaccctgcttctgcccctgcctcccagtagcctatttcctactgtgaagcaattttttttaaaaaacacaagtcagatcctgccactcgaatgcaggaaaacctccaatgattccccatctcattcagagtaaaagccagtgttgttaccatgactacaagaccctacgtacctggtcttgatcactgttccagccacactggcctccttgcttttcctcctaggcacaaagtacacccccatctcaagacccttgtcctggctgtttcctttccctttcacccagatctccaacatttctataccttatcagaaagccttacctggccccgctgtgtcctccctctctctcttactctgttttgttttcaccagagctcttatcatgtatatcatatacttctttatttattagtttgttgtctgtcttccccactagactgtgagttccttgtcagaagggaaatttgtttccttttttcataggaccttcatacagagactgacatgtagcaaaagtccagtgaattatttattgtttagatgaataagtgaataaatgaacccccatttacacttagagaaattggagcttaaagtggttaaaagacttgcccaagtcagagtaagcattagagctcggtccacagttattgctttcgatccaaccttaactgaggacctgaagcttgactaaaatagagagctcctcatgactccacatttaattcattcaatgaaccacagtccaccaaccgggagtaatttgcagcaattctgattttccttttatatttaacaaacttcaaaaggaatacagtttgtaacacttggctatcttcttaaaatctcttttccccttccatttctgtagctgtaccactgttctagacctctttttcttcaaaatcatcacacttctctcctcctcataggtctccaagacaccatgctttttggtacagactctgaaaccagggtactggactagactaatcaaatatctttagtgtttcattttatctcccttgttgacttcttatcaataaacgtcaattagatcaagtcagtttatagtgttgttcaaagaatctatatccttactgattttcatttatttagaggaagctctcaagctcttactagaattttaaatttgtttctccttgtagttctgtctggttttgcttcatatattctgaagctttgttattagatgcagaagcatttaagattgttaagtcttttttttttttttatttttttgagacggagtcttgctctgtcacccaggctggagtgcagtggcatgatctcggctcactgcaagctccgcctcccgggttcactccattctcctgcctcagcctcccaagcagctgggactacaggtgcccgccaccatgcccagctaattttttgtatttttagtacagacagggtttcaccgtgctagccagaattgtctcgatctcctgacctcatgatctgcctgcctcagcctcccaaagtgctgggattacaggcgtgagccaccacacccggctgttatgtcttcttgattgacttactccttttacattatgaaataatcttcttgatccccagcagtattcttcacctgcaatttactttgtgtgacagtgatatagcccctccagccttttttgtaaaaaaaaaaaaaaaaagtgttagcatggtaaatctttttttttctatctttttatttttaacctattcgtgtctttaaaaagtgcatttcttataggcagcatagagtgaggtctaactttttaactcaaatttgaagatccttgccttttagttgagatatttagcctatttgcatttaatgttattattgataggtttaaacttattttgttgtttgtcatccttgctttttattttctgtttgtcctatctgatctttgttacctttttcctatttttctgctttctttggaattagctgaatatctttgtgattctactttgtcttctttattgtattgttatccctaaatgccaattagatcaaatcgcctagaatgcaattcctgccacaaccacttactagctgtaggcaagtttcttaacccctctggacttcattttgctcaacgtaaagcagaaataacaacagtgtttgtcttgtagggttgttgtgaggactaagtgagctaatacatgtgcagtatttagaacaaggtctcatacatggttaatagctacagctatagaagagttattgttgttagtcgtgttggttgtaatcatcattgttatttgctttcatttattctttgtacttttttccagcccatgcttcttcttgctgggctgctataagatagctgaggtacctggagtctccctgctctccatcttctccttgacacccaagaagaggacaaaagcatccctgtaggaatcatggttcttgtctcactgcaacttctgttcttataagaaatttttatgaagaatttctgacaaggaggaataagttcaagagacctattgtgcaatatggtgactatgattaataacaatacattgtatacttgaaaattccaagagtagatatttaataaaaagagccatgttactaattcacgttaaattcacaaataccatatgagagaagactgcctcatttttttattcaaatgaaaagttacaagcattgccatgggtgctaccctaccaagtagtcccagagcagagggacactgaggccagaggggtcttccaggattcagcaattttgggggattcctggaactaaagttgaacacagatgaatcttcctcttctttttttaatcctttgtagctcgctcactctggtctctcatataactaaaacgtccccagtgaataacagagatgtcagtgacccagtagcaagaattttacaaaaatatcataagagaggatacattcaaatcatgatacaaaatatggcctggagctccaaacccagacatgtgtacctcactttccttcccaacagatgtgcacccaaaattatttactctttctactaggactgctttttttttttttttttttttttttttttagacagagtcttgctctgtcacccaggctgaagtgcagtggtgtgatctcagctcactgcaacctccgtttccaggttcaactgattctcgtacctcagcctcccgagtagctgggactacagatgcataccaccatgcccagctaattttttttttttcagtagaaatgggtcttcaccatgttggccaggctggtctcaatcttctaacctcaactgatctgtgcacctcagcctcccaaagtgctaggagtacaggtgtgagccaccgtgaggactgctatttttaatactacaaatagtagcacacataacaacaataacaataatacttatccagcccttaccacgtgccagtgagcgtgctaagctcttgacacatatcacccccatgagttctcacaagaactctataaagtaactgttaggttatccccatcttacagctaaggaaactgaggcacagggcagctaagccaaaggaaagttaatgacagggccagaattcccacttaggtgtttctcctttagtctgagatataaccactcgtctaaactgccactgactacattagaatactgctttgtctattggtaaatccagatttccacatacccggacagcttgaaaacagagagttcagggccactaatgcccacacaaatagatctgcctgtagtgtgaggagctaggagggaagccacctgtatgtctgcaataacagaacttccatctgctccaggtactgtgtatcctatttaatgagcatgtttccacccaagaaaacgcagagccggagctgactagacagaaacagtacatctcagccctcagtttttcttggttttgacaccttctggtatgtgccaaattagcaataaattccgaggaaaacctcagagggaaagcccctccctcaagcagactttccaaaggaaaattgttactttttctctgatcccaccagctttcccattcggaagcctttaaccagaaatcccctctgttcaattagaatcgtgactcatgttcttacttcaaaaaaagaaaccaaagtttgtcatctagaaggaaggaggaagagtgtgaagaagagggtgctttagagttaggctgttttgagtttaatttctggctgtgtccttcatcagctgtggaacctaggaaagttacttaaactttctcagcctcagctccctcaactgtaaaataggaataatagtatataatgatatatctaatagcaagtatttactttaagctagctattgttctaagcactttatatttctactttaatcctcacaacccttgaggtaggtaccattattattatccccattgtaaagatgagaaaactgaagtagagataactctagtaatttatttgcccaagtttgcacatgaatctgggtaacatatctccagatttaagcacttaactcttccagatgagtgtaataaattcacataaagtgactggcacagcacagaaaacttgtaacacttcactaagtagtagctattgtttttattatgaagaaatagttaatgattcaatatgaattacactctatgggttctatgaacttctttttctacttttattctcatgtcttatgattatatacacaatagatattgtagctatattcgtttttgcaaatctctttctatggatgcaaagtaaagggaaatggttagtagctgccagatataattccagaaaagtgtgaggctgttacaatcttgctagtcattactaaaacaactacaaaatttcttgcccacttcctgaatttgatctttgaagtcatctacttccctttgtacctaagtccaagatttcctttcacatatttaagttattgtttgctgctaaaatgatacattttctctgtccgtacagagattttgtaataaagctgacatttattgtacacctacttcctgacatgcctcatgcttatacttcacaagcactgtctcgtttaatcctcacaacagccctgtgagttaggaaccattactgacctgtcttacagagcaccaagaggttaagcatcttgaccaacatttcacagtaactggtagaactggaactggaagattatactcttaactgttacaagccaataatctgtctccttagccctggctgaacctccctcttatgtctatttactgcatgaaaacattaatatattattttaagcactgaccaggacagctagatgatctatgtaaccccagagctgtttgtgctggcctcatcagcagcacaaggttgataaacttatcagtcatccggtcgatgctccctggctcagctttggtccagccatcacctctcttgcctgagcccctgtgaccagctcttcactaatctctttgctttctctcttgccccgcttcctcctacagtgtattctctatccagcagccagtgagatcttcttaaatagaaatatgatggtgtcacccctcctgcattcttaaaaccctgccatagtttcccattcatatttagaatcagcatactggcgatctgatttacccatttaagaggtcagtctagctaccatgggatgaatggagcatagagatgagaaggaaagtagggaggccagttagcggactcctgtcatggtccaggtggtgttgatggtgacttgactggggagttgcagtggggatggaatgagatgggatacatttgggaaggaaagcttgaagaacttggcaatggattacatgtttttatgcagtgttttaaaatctcatcagaaatctttaaaaagatcgctctgatctcgcaagagcatggcacttaaaaccaactgaactataacaaatgtctattgaccagttaccatctatcaggaactgaaaggaattcagaaagaagaacatgtttctatgctaagtatttagaaagcaggaccagggttccttccctccagaaactcacagttcagtaggaacaataaatataaccacaaataaattaaagctgtgtgataactgtaacagcagaattatctacaaggcctaggagatgatgacatcaaagtaaaggtttaaactgagggagaatatgagttttcccatgaggagcagggagaaggcatcccaggcagcataggttgtaccaagttacagaggtgtgaatttttatggtgtggtcaggaattacagatacacaatgtagataatacaatgggcagaagccaagtcaagggggtaagcagagatggaaaattaaaagttttttaggctaggtcaagatgctggactttgtccctataggctaaagttttcccaagtgcattcatggcactgatagtgcacaagatggttttaatgatatatagacgagcatggatcaaatacaattggccttccccatccacaagttctacatctgagaaatcaacaaaccatggatggaaaatatgtggggggagaaaagcaaggaaaaataaaaataccgtaataaaaaataatgtgaataaaaaataatacagtagagcaactatttacatagtatttacattgtacaaagtattataggtactctagggaagatttaatgtatatgggaggggccaggcgaggtacctcacgcctgtaagcccagcactttgggaggccgaggcagccagatcacctgaggtcaagagttcgagaccagcctagtcaacatggtgaaaccccatctctactaaaaatacaaaaattagccggacatggtggtgcacatctgtaatcctagctactcaggaggctgagggaggagactcgcttgaacccaggaggtggaggttgcagtgagctgaaatcatgccattgcactccagcctgggtgacggagtgcaactccatctcaaagaaagaaaaaaaaagtatatgtgaggatgtgcttaggttacatgcaaatactacaccactttatgtaagggtggtggattttggtgtctgtggattttgatgtcttcaggggtcctggaaccaattccctgtagatactgagggacaagtgtaatcatttatgtattttaatatgtgctacataatgtataattggtatatcaagcctataatatagtttacttttcaaaatagatttattcatgttaagtaagttaatttaaagaaaaatgtcaagtaaatcatagaataggtgaacagatgtgggaccaatgatgaaatgtaagaggccaaagtttgaggcacttttcatataaatggtgggggtaggggggaggcactgaaggaattttagcttggaaaaggcatgataagatttgcaggtggtaagctctgtctcgtttccaggaataggatgaaaatcattctcgtgtccctgaaaccaattaagaggttcctctataattgtccatggaagcaaaaaatgtgggtggggactgaaatagtggaagtgggaagagggaagacagagccgtgaggaactccccaggaggtaaaaactcaactgcacttggcgactgaggaataaggatgaggaaacagaaggacccaggatgactcctgggtttctggcttgaagatctgaatagattttggctgccagccactcttaagggcccctgaaatttgtcaggcaggaaaaattttaattaggtgcattcttcattatgttccaaagcagaaattctgtctgatttgaggtaaagtgaggatttggaagttttccagtgggtgttgatgacagtagacaggtaaagccagttttagaactcggtatttgaatgtatttcggtatgaccagatctctcctttcttagttggatagagcctgaaaaatgccaggcctggattcctagatcggtgccagttcaatatgtaacaatccacaatgcagataggataatacatgaattgattagtaatattgaccttacgccaggcacggtggctcacgcctgtaatcccagcactttgggaggccaaggcgggtggatcaactgaggttgggagttcgagaccagcctgaccaacatggtgaaaccccatctctatcaaaaatacaaaattagccaagcatggtggcgcatgcttgtaattccagctacttgggaggctgaggcaggagaatcacttgaacccaggaggaggaggttgcggtgagctgagatcacaccattgcactcccgcctgggcaacaagagtgaaactctgtcccaaaaaaaaaaaaaagtaatatttatcttaacatgtccggacggctttgagctctgcctctgtagttctcaaccctccgttttattttatttttctgtataaaaaaattaatttctttcaacagaagagcttttggagaaggaggaaggaagtggggagaccttcctatgttgacttggaatttgctccctgtaatgtacctgcattcctccctgtaatacacctgcaatacagcaaaagaaaacaagggaaggttttcctgagtgaaacttgacaagatgcaaaagagttgtgagatttagcaccctcttttttctttcctgtgcaatgtctttcaggagttcccctacctaaaagacttttagcacatacacaaattaagttgcagcgtcacattttccaaggtgctttctggaatcagtcaaggagtctaagtctcatgataggcctcaattcctcctgtaagtggaagtgaaaagtgcttgctgttgtttatgctcaaccacagagctccaaaatctgcgccccgttcctgagccatgtgcgtttccttgtttataagtaccaagcttcacggcaaagtgtgttcaacaattcactcactcaagcattaatgcagctctggtctttctcctttcccttaggtatttatgggccatcggtaagaatgtctggaagagatggaagaaaaggttttttgtattggtgcaggtaactaactcttcaactcttaagagacatcagtattaaagatttgctagaatgaatgaatgctttttaactgaggtataacttaaatacacagagctcatgcatttagcttaatgaatttttacatatatccatgtaaccaccattcagaggaggatacagaacatttccaatacccaaagggctcccttgtgctctattctctatttttatatcacttttaaattttaaaaaattaatgaatactcataattttttaattcgaacaatacagtagtatgtgagataagtcggggagagtagactcccacccctgcccagtctcctgccagggatggaggattccagaagggagcaagctcatgccaagtgagggctatagggacattaactttggctgaaaacaatgtagtattttgaaaagaactgagataggcattatgagtaaagtcagaatttagttggactttttgcctctattttattatttagtgtgtttgaatttgaattatctgtgtgggagtgctctactcttcttggtgcctggtgcttccaaaagtcttagccaacgtcccataactatgtttaatatctaggataaatttttctattaaacttcttttttttttttttaactgaaacaaaccaaattcttcaagttgttctgcaagttgctttttccacacaagttatttagatacctttcaatgtttacatatatagctctggctctcatatctgtaaacttttcccttttggatagacttctggactttcccaatttgggctattcttaacaaggctgcagggaatatctgtgtatatggatacaaatgtagatgcggatattgatgttaatacattagtcatatataaataacacctttactcttgagcatttcttaaatttttttccagaaatagtaatacctgtccttgaaagaccccatctttttggtaggggagggtgtttattttttgcatcaggatttttcagtttacaaagttttccagtgcctgtttttaattttcagactccaccagagcatttaaactataattcaatttgcagaaatctaatttatgctatactctgaaagatttcacaaagtgagtcaacttggaactgagtgacaaaggttcttactgggttacttgactaggattaatatttagagtgctaccaatatttagagtgctttatactcagagacctgactacaaagcaactcccttttaggtctaaatgaccttgagggtttcaccaactctgaacttctaagactagactgtctatagatctacttaagtctctgctgtgccgctaaggcaaaatacagctctctggctctaataagcaagaggtcatctttgctttcagtattgttgtagggtagaacaaaaccttaaagtgatttagccgcaaagaacattttggaatgatgcccgtccctcagaataacccacggctgcccagcacggtggctcacgcctgtaatcccagcactttgggaagccgagacgggtggatcacctgagatcaggagttcaagactagcctggccaacatggtgaaaccctgtctctactaatagtacaaaaaattagccgggtatggtggtgcatgcttgtaatctcagctactagggaggctgaggcagaagaatcacttgaaccagggaggtggaggttgcagtgagctgagattgtgccattgcactccagcctgggcaacaagagcaaaactccgtctccaaaaaaaataaataattaaaataacccatggctaagcaattgaggctattttagcttgtggtacatttcctcagactattaactgaccagtatttattgagcacctactttgtgtggagtgcattgagaggacatggagaactatcaggtctggtatttagctcccagaaaggaatctgttagagttctacatatgcaaacagcagaagtagactcaagctaattaaggtttaaaaaatgaatatatggaaggctttggagttaactcatagaattgtgaaaaaggctgaattacccatccatgttaagaacagggccagcatagttccagaaatccaagttgtattaggtttctccagagagacagaaccaataggatatatgtatataagaaagggcatttattagggagaactggctcacatgattacaaggcaaagccacacaataggctgtctgcaagctggggaagaaagaagctgatagtggcttattctgagtccgaaagcctcaaaacaaaggaagccaacagtacagccttcagtctgaggccaaagacctgagagcccccagcaagtcactggtacaagtcccagtgtataaaggccaaagaacctggagtctgatgcccaagggcattaggaacagaaggaaccatgtagcagggaagaaagacgaaagcctgaagactcggcaagcagtcttatcccacctccttccacctgcttcgttctagctgcactggcagctgattggatggtgtccattcacactgcgtgtgggtcttcctctcctaggccaccaactcaactgtcagtcttctctggcaacaccctcacagacacacccagaaacagtactccaccagccatctaggcatccttcaatccaatcaagtggacacctaatattaaccatcacaagtcctggaaccatggccagtgctgctagtgtggtcatgagacagactggctctgaccactttccatccttgcatctctccttgagggtcaaatttcataaagggagaattggtttagtctaacctggttcactcccaacttttagcaggaagaagggatggcacttggattgacagtcccactggattgtctttcatgcaaaatcaggatgccattaccagaaggagaaatggatactgggaaggtaaaaataactggtatccactttaaagagcatacaatgtaaatgggaagacaagacacatcaagaggcagtgctgtccaggagcagtggctgacgcctgtaatcccagcactttgagaagctgaggagggcggatcacatgggttcaggagtttgagagcagcctgggcaacatggtgaaaacccatctctactaaaaatacaaaaactagccaggcatgctggctcgcacctgtaatcacagctacagggaacgcggaggcaggagaattgcttgaacccaggaggcggaggctgcagtgagctgagattgcgccactgcattccagcctgggagacagagtgagactctaaaaaaaaaaaaaaaaaaaaaaaaaaaaaaaaagcagtgcttagtcatggatggttctcgcccctcagtgcttctcattgcacttggcacagcagtctctcttggaatcacttgggagcatgcctggcctccccgatagactgtgcactgtttcagggccagttttgtttctgattcttttttgtgtctttccctctttcctccaccacacgcatacacagtccctagcccagtgtctggcaaagaaaagaaaaaggaagagagaggagaaaagctcaggcaataccttgggtggtgctgaaaaaggagagatcatgtgctccgagaagtggctggtgacaaccattctcagatttctgagaacttttgatatgatgaagtacttaggagaagtagatgacctcttattttgggagaggaaactctgcaggaaaaacaagaggaaatatgtggaaaacatcagtaaagccatgtctgtacagtaagtacagggagaaccaaaagggagagaatgattttttcaggcaacgggaacacaggtgtttagagccttcacactgagccttctaataagagaagatgaaagtcacacagcagctaaaaagcaagctctgtgctcacttctgagaatcataaaagggcacttctcatctaaagctcagtatctttcctagaaaggcaggagaaaataagttcagaattctgtgaaatttttcatgtacatatgattctcattaactttaaagagctgtcaaggtatgttggggacatccatccccccaaaaaaatctgtttcagcctgaatcagatttctcccttaacaacctctgtgacacacagaggtgacgtgagagtcccatcatcacaaagataatgggggagccaggatgacaactcaggtcttctctttcaattcttgtcctattcaccacaacaatatctaaaagcaatttgctggcatacccagaaaatactgcattatttttaaattctttccattttttcttctcccctatttaagtgatcacatttagaagcactttatcaatatcataaagaaaaaaacacactccctttgaaacaaccccaatgccatcagagctgcaggaggaaagttcaaggccaccagtgctggtccaattcagaggaagctaaaatgtctcaggttgctgaaggaaaggatgtcaatccaagcggtggcaattggcccccaacagctgcatgcaatgttgaattcagtcatatgtacaaacgattttcagtttctctttagccaccaaacccttactttgaaactcaaaatgcaaacatgaaacccggagaaccaccctggttcaatttgcagaagcgtgagagttctggggaagggagaagattcccctaaccccgcccctgctcccaggcagccttggagggaactccctggaaaacagtgtggaaaccaccaaacagaaagtatatctacccaagtgacttacggaatctttgtgtctttcaattcagatgttagatcttatggaatgtgtttatgtagagagctagcagcacacaatttccaacacaattatgatttaatacattagatttaaaacaacgaaaattgtctgaaaaaacaaagatgaagagaggacatccaacattagtctcctcaaaattcatctcctgctctacacatacacacagagtctacttttttgcttataacgtgtaacaattaaaattctccctgactgagatttcctattagtactactgtcttggggaaccaaattttagactataaacggacttcctactagccagggataaaggatatactcagaggagtgctggaccaaagtagcaattcccatttcttaaggatcagagctaaaattactatagatgtggctagagtctaccctaccaactgtgaagggaatgaagcagttgcgaggagcttctgtgacagagattcaagcattcctgtgcaatgagagagtgtctgtaaatgggggcctggaccatctgcattaggtgttgtttaaaatgcagaccccaaggtgccatccagaagactctgatacagtaagtctggggtggggcccagtattccgtacttataaaaggcaccccaggagatactgatgcaggtggtccaaaggccacccttggagaaacactgccttggaggtcattatcccgcttaaagtgaagggtctcattcccttcagatgacaccatcttagagtttatgttctctatggaaccgagcatcagagtagctaaatagatgactatattcaaatggcacaataaagcctcctctcgccatcttccttgaaattccaatatatgtcctataaacttggctggctgcaaaccctaacccagagatcaaggggaaatgggccttcagcaccctgagtcaagaaattactggggcctcattctaaaccctcgggtccatggtgagaaccaaacacattgattactactgttagtaactctaatgtgaccaaatcaacactaatgataaaggtgccaattccatagagcactgctggatagccagaacgccccaccccgtgtgtgtgtgtaaggagaacagtgaaaacaggccaacttatcacccatatcaggttagaaagtcttaacgctttcatctttttatttaaaaaatatttttattctgtgatcaaaagatttctggtgcccagacatggtggctcatgcctgtaatcccagccccttgggaggctgagtcaggtggattacaaggtcaggagttcgagaccagcctggccaatatggtgaaaccccatctctactaaaaatacaaaaattacctgggcatggtggcatgtgcctgtagtcctagctgctcaggtggctgagacaggagaatcgcttaaacctaggaggcggaagttgcagtgagccaagatcatgccactgcactccagcctgggtgacagagcaagattctgtctcaaaaaaaaaaaaaaaaagatttctggttaaaatctacttttttgattggtgttcaaataatttctgagacatttctccccattttagcactgtacaaactgtaatattctgtggttcctctaataatgtggacaatcacttatatttatatggtttcttagagtttacaaagtgttcgtcaagctggtcttcacaacctttctgtactacagtgaggacaaggcttttcgcaacttcacattagaggaaactaaggctcagagtggataagtggcctgcccaaggtcaatggcttgtaagcagccaaatatgaaacctaacacaggccaggcacggtggttcacgcctgtaatcccagcagtttgggaggctgaggcgggtggatcatgaggtcagggaatctagaccatcctggctaacatggtgaaaccccatctcttctaaaaatacaaaaaattaggcaagcgtggtggcgggcacctgtagtcccagctacttgggaggctgaggcaggagagtggcatgaacctgggaggtggagtttgcagtgagccgagatcatgccactgcactccagcctgggtgacagagcgagaatttgtctcaaaaaaaaagaaacctaacacaggtcttttgattgcaagtgccttcaataactcctagcacttagacaggactggcacctgaagagattgatgcatacagaatgttatatatatatgatggaatactactcatccataaaaaggaatgaattaatggcattcacagcaatttggatgggattggagactattattctaagtgaagtaactcaggaatggaaaaccaaacatcatatgttctcattcataagtgggggctaaactatgaggatgcaaagacataacaataatacgatggactttggggactcagggggaaagggtgggaagagagtgagggataaaagaccacaaattgggttcattgtatactgattgggagatgggttcaccaaaatctcataaatcaccactaaagaacttactcatgtaactgaatatcacctgttccccaaaaacttatggaaataaaacattttttaaataaagcattgtgttaaaagaatgttctagaactgaattactcagatagaaccaacatggctcctctgtttctgattcccaactgagaatgttaccaaaaattatgttccagctttcagaaaaatcactaaatcagaataagataaaatattgttagataatatataatgccttggaatacaatagtagtcacctgggaatacaatattaaaatgagttaaccacaaaaatgaattgtaagacatatgagtagttgaaggatttgtaactccaaatgtttgtttttgccactccacaattgctctataagacatttatatttatattctggttatcagatatctggttatcagatatagtctggttatcagatatcaacccaaacagacttaagttttaaaagggcaagaattgtattggttaactaattaaactagtaattagctggagggtcttctgtcatgactagatccaggactcaagcaatattatcaagcctctgtctctcaatatatttaatcttttggctctgctttccgctgaattgacttcaccctcaggcatgatctctggcagctcaagccttacaaaagtttaccagccccagagaaaacttttctttaacaattgttccagtacaggccctcagttagctttctttggcccagtgtggtgccaaatccttgcaccagtcactgcaaccaaggagatactatgttgattggccaggcatgggccaagtgttttactcaccctacttccagctagatgtgcagttactcccacacaaaccacttgccctgaaagttgaaaagagagtggttcccaaaggaagaccaggattcagttgtgggagggcaatgaatggcctgcatgcacacataagaaatgcccccacagaaggccaggtgcagtggcttatatctataatcccagcactttgggagactgagctgggacgatcacctgaggctaggagtctgagactagcctgggcaacacagtgagactccatgtctacaagaaataaattcttttttaattatcaaaaaaagaaatgtcccacagatgttatcatcatccccatttaaagatcacaaaaccatgtcccagaaaagttaactgaactgccttggttcacatagaaaataatggatctgaaaaccaaatccagttctgcatgactctaaaatctattctccttctcctccaccaaatggccttcacttcagtgccaatcaggagtctgggatttagacactgtgatccttcattcgcaactacatcacattaaaaatagtccttagtctccaggaactgtgattcacaccataaaaattttctccatgctcagattttggctcaatccgtcaatgcttcctcaggaattccttgcccaaccacccatctagaccaaatctccaagctcttacagtaccatatacctctctttttaatatttgccactattaaaataacacatttgtgaaatcatgggattaatgtctaccttcatgctagacatgagggcaggaatcacatctggttttttgcatgtttatagtcctcgaaccaaacacactacctacgtatttgttgaaagaatgaatgtatctattataaacaactcttttctaaattatgtatatgaattttggacaagggctggtgaccagagttcagtaaaaataacagctgattaattttcaaagaatgatggtaaaagcaaggaaagaagatttagacaaaatacattctactgttgtatgtccaagtattttagtctcccataggtgataagaaggggagaggagagttggggacagaaaagtctaaccttttcatctcatgactggaatctacttgctaactataattgaaactcaagggcaatcttagaggttatggacagttcctatatattaaaaccgtggttctcagattttaacatgtattaagagatatctggccaggtgtggtggctcatgcctgtaatcccagcactttgggagaccaaaatgcgaagatcacttgagcccaggagttcaaaccagcctaggtaacatagtgagacatcccccccaccatctctaccaaaaaattaaaaaaaaaaaaaaatagccaggcatggtggtacatgcctctagtcccagctactggggaggctgaagcaggaagatcacttaagcccaggaggtcaaggatgtagtgagccatgtttgtgtcactgcacttcagcctgagcgacagcaagaccctattttgagaaagagagagagaatctgagacagttatgaaaaatgtataatcctaaggcccactctgacctgagattctgattctggtctgacttaaagaatctacatatttacagcctaatccaccccctcaccccccacacactatctaataataaaggcagctgtcgccatccactcttttttttttttttttttttgagatggagtttcgctctttctcccaggctggagtgcagtggtgcgatctcagctcactgcaacctctgccttcccatttccagcaattctcctgcctcagcctccggagtagctgagattacaggagtctgccgccacgtccagctaatttttgtatttttagtagagagggggtttcaccatgttagccaggctggtctcaaactcctgacctcataatctacccatctcagcctcccaaagtgctgggattacaggcgtaagccactgcgcccagcccaccatccactctttaaggaacattacttcaaagcattctgtagtttaagcacgtgactggaaatgagctaaggatttttaaaggtgtgtctgaggtgcagccagctttaaaataaaacctcgctgactgttccctcagaagtcccaacggcctgtcctgtgattccatgagaaggtacctaccctatgaaaatcccaaggatgtgaaagacagagttctttaagcccttctctgcaaagtgcactttcagatgtctgctgatcatttgagatcactagatttttatgctttctgttgtaggccaggctgtctgacaagggtggctgactttctcacttctaacatgcattccaggctctgccatgcctttattacaacagtgctcactgcctcattaatttttcatcaacaaaatacagttttaaaagaattctactacgacagaggaacatgcatttcatgggaaatggcttttacttagtgtggtcttgtggaagtttaaaaaataaatgtaaggctttccaaatctttgcaattctcccaccattcaatcagtctataaaaagtgagattccccccaaaatttccaataattagaatcattcaaagagaaatcattctttctcccctcctttatttcctaaagtacattgcaaaatcctaaatcaagatgctcccaataaaccaactcaatttggtttaccaactcaaagcaattcagtttgtggagagtgacttcagcaatataaccagaagagggcatcagcatacagctctccaagaaggaagccactgaaatagaaaaggaaaaaaaaaaaaaaattaaaaagcccaaaccatgtagtaatagtaaatgcataaatcttgaaataacacccttctgttgtgattttttttttaaatcttaagtgagtgtcggcaactctctgtttggccaatcacattaacaaactatgtcatctttcatgttgtcagatgagaaatgccaggttaaaaaaaaatccggctgggcatggtggctcacgcctgtaatcccagcactttgggaggctgaggcgggcagatcacctgaagtcgggagttcaagaccagcttgaccaacatagagaaaccctgtctctactaaaaatacaaaattagccagacatggtggcgcatgcctgtaatcccagctactcaggaggctgaggcaggaaaatcacttgaacccaggaagcggaggttgccgtgagccaagatcatgccattgcaccccagtctgggcaacaagaagaaaactccatctaaaaaaaaaaaaaattccccatgggaccgttccagcagtatctatgatcattgtcatgcagagggtcacaggaaatctgttatccctaggatcaataataacaagttggaaaggcctggtactgtacttggaatcccctgtaaatttggggggtaaaacctctttattggattgtatgtactcaactttctagaaccaatcagattcaactagtgaatgcccattatatggcagattttgcttatgagactgaaaatacaatcaagacatatgactccctagacctgtcttcaatgaatttataatccagtaggtaaatccacctattaagctatactatattagaaagtgtgtcaaatgcaaggaaggggcctgtataaatgcatgtgtatatgaagtgttcgctctatgggtatcacacatggtatgtaaaactcaattaattctctagcaacaataagatgcaggtaaatacagatgaagactctgaggcttacagaacggacagcttatcagagctgggatgggaccccaggcccatggaaccctcagcctacactcttaaccttccattttagaagagtgtgctattgattactttgtttattacaaaaaattaatatgtgttcctttatgaaaatactctcagtgacccagccttaggtttcccctggcattgtgatataaggaagaagttctgcaaaccctatacattataaagaaacccaagtggggcggtaaagtttccatcaggagccaacagagggcagcaacagacaaaccaactaccaaaaacatcctcctgcggacacccttcatctctccactgggaccctcaagcctcggacagtgcgggagatgcatgtagcactcgagagcgtcaatttcttatcaccattaaaacaacaaaaacaaatctcactatagaagagactaaaaatgtcccccactgggatcaaagttcacttagaaagtgtctcttttaataaaggaaactaagggatgagggatgtggcactccttctctaagacatttgacatccgtggatagtaaatatgcctgagagcatttagcccaaagctaggaggatgcttgctttcccacgggctacttgcagacaagccagatgtagaaatgctaagtatatgtgctggatctggatgcactagagtgacagggtcctgaaggcgggcctgcagctgtgagcacccgccctgcactggcatggtttgtgttggtagagtgagggctgccattagggcacaagtgacaacagccacgccattgtgggggctgaggattgctctactgtgactggcacctagcgatcaagcgctcattgcttgtgacagcatgtcactcctgcacttgtctgagataagaagaagacttcaaagcaaccaaagtactccttcagcaggaagaaggggacaaaacatgtagtttgatgctgatcaaaatgctgcaaaaaataaaatactgaaataaaaaggcatgaataaatgaatgtctagcctctaacttctgaccaaaaggcccatgttgtatctgcgagcatggcagtctcagccaaggccacagtcacattaggtagaacatacaaaattgctgtcgtttaaccacttttgacctacaaaaatggcagtcacatgtagcttaacccaattatattaaaagcaataatgataatagctaaccttcatcaagtacttactaagtgccaggaacagactgtaagtgcattccccacgtgaactcattcagtcttcacagtaagccaatgaggtaggttctaagattgtatccagtctacagatgaggttatgaaggaccagagaggttaagtaacatgctcaacgtcacacagccaggaggtagcaaaactcagtttgaacccagccactcagtccagatcctcagaggagagaacatgggggagggttttttggagaagacaggctccaggggtcaacctcacaatctgcttttccttaacaggtcagtcagtacacgtttgccatgtgcagttatcgggagaagaaagcggagcctcaggaacttctacaattggatggctacactgtggattacaccgacccccagccaggtacccaccgaccctcaaggccacgagcccacaaaccctcaaccttcccaaatcaatggtcaactaataattgctgggcacttactccatgctaggcactaagtcaattcactaagggtttcagctgtgtgcatgacagtcacaatccctgatattatgccgtttccatcccggttggttaaatgccatcctaacctagtgctttggttttactcaagggattctctaatttaaacccaaaaagtaagagcatttttcttttacctgcctgtatccacatcaaatatggactccaccatacaatgctaaaaaaaaaattctgaaaaagaagtagtcccacatgtacaccaaggagtgtgtgtgtgtgtgtgtgtgtgtgtgtgtgtgtgtgtgtgtgtgtgtgtgtgtgttgtttttcaccagtgatgtgtgggcttggcaggtttcagtgaccaagggagcctgcccaatatatccattttccctagctacaattcaagagatcataaggttagctggtagcacttgaaaaccctccctaaatgtctttttccctaagaagacaccaatccacaagcagagacaatgaagcccttaagccttatgtagctaagaaaactacacgagcggtagtatttcttaaaagttctacaccgcataagttctacatcctgccccctcgcacctctccccccacccattttatctttttcccagaaaaaaaaaatgaatagaaatcagcctcaaagaaccttcaaaatgggaggggggtgcgaaatcatttcagcatattaatgaacaacaagcaccaacagccctctcccggagaagtttatttttatgccaaatctgcacaaggaaagcatttccaaccatactgcattatttggcccaaaacctttttttctactcccatattgctcttccacatgcaacaaaatacacataaaagaaaaacagagtttgagagaagatggggtgctaacctgaaaaggtgtggcagggaaggccttgggcccagcccacttagtaaaattagcacctgcagaatctcaaccgagtgactgggcccagcgccaccccttcggtctttcatatgttatttgctacttgccagagcagaatgcagagctgaccacataaggcatgaattaaatgctctgcctggaaatccttcatgagcagaaccaacgagtttgaaacaaacaatttcatgcaacttctcatggaaaggatggggctcctgccttaggaaaccagtccttaggacattctgtgatggtttgtgttcttcttaagccattgtgtatccttcaaaaaaatagattcagtcctccttaggacttttatttttaagtagaaggctagggtgaggagtggtggctcacatctgcaatcccaaggcgagaggatcgcttgagaccaaagttcacgacaagcctgggcaacaaagccagacatcatctatacaaaaaaattaaaaaataaccagggcatggaggcacacacctgtaggtgtgtgctacagggaggctactagggaggctaaggtgggaggattgcttgagcctaggagttggaggcagcaataagctatgattgcactgctgcactccatcctgggtgacagaaatagaccccaactcaaaaaatagaattgtaaagaataataaatttttaaacataaaatgggacgctaaagggccaatatgagaagggaaatcaataccaccttatgacaataattgcttttaagccagttcattttcctttccccccatgtgattgtatttagccctcagggtaatcccacaaagtggataagaccaggatcattaccccattttgtaaatgaagaaactgagattctgagatatcaaaggctattgtttaagactgcctggtggctgagctgggactccgggtctaacccatgtcacgctttggcacttgcagtaaagcatagctgcatgaacagctatagcaaagctatggttgttactttatcagatgaaagcaaaattatcttcactcagtggggagggcaggagtggagagagctattctatctacatgtgtaaggagtaactgtgcacatatatttttaaagcttatttctttttacatcgatcccatgggatataatttataaatttctatacgaaagatgtaaatggaaagatgtaaaatgtaaatcaattatgttcttgagaataataagcagcttcttctatctttccatgtgctaagtcctatttattccccaagtaatgtctgattgaaaacggagacttaaattctctcagttgtcatgggaaagtctaactcagaattttttaaagagtgattattggccaggcgcggtgcctcacgcctgtaatcccagcactttgggaggctgaggtgggcagatcacttgaggtcaggggttcgagaccagcctggccaacatggtgaaaccccatctctactaaaaatacaaaaattagccgcacgtggtggcacgcacctgtaatccgagctactcgggaggctgaagcaggagaatcgcttgaacctgggaggcagaggttgcagtgagccaagactgcgccactgcactccagcctgggcaacagagagagactctgtctcaaacaaacaacaaaaaagtaattattaaaaataaatgttcctgggccccatttctaacctgtgaaccagaagtagggagaggtcagaatctttgtatttaaataagcactgcaggggattcctgaacacagtaacatttgccagctggagagccaagtaatgcacattttaaccaatgtcctcagatttgaggagtctcctcaactgctccctgaaaggtgagtgtgcaaatggggaggacttcagactctacctctctccctctttctcttggttttatccaaattgtcagtggatccacctggtggcgattttgtgtgctaagaacccttgtggcctgttgctctctgccatagaagggagggatgcaattaatattgttgccttagtaccagcctacaatctacgtggttcccccagacacaagcatttccactaaataaactctacctgtttgggtccttgacgtgttcatttggtgaactggcaaattatgtaagtttcacttacaagctactccttttaagctaaaaataaaaatgcatcactttacctttccctgtgtatggtttggaaagtttgaaataatctcaatttctatccgattagataattaagccttcaaataaaagaatattaatccagaataattcaatgccacagtttatcaaacaactgaattattcttatacgactcataaagaccttttttaccctcataaatggactttggccatgcaagttgttggaagtgcaattcctttcccctagagagctggccagcattcctttgcctggtctgcctccatctattcccagacgtgtctttttgtctttgaattgtgggactgtgcccctcgttctccaaggagagcccatttgaggtcacacatcacattcttcagattcagtccccaggaattgttgctttttctaagactgatggccttgtggttatgacatgtggatcttcactttgtggatgttcactttgctttctcctctcttggttctctttcatctgtcgctcttctatctccttcttgctttccttggtgtgtcctcagcctctggtgctttctgaaaaagccctgttgctctctgctgctgtgcttgtcattgctgccatttctttagatgtttctctttgcccttacccactccaaaattaggcttcattttattgttaataatgactcttaagagagctgttagtgagggcccagccctggattcatgctttggtgcagtaaagcacagtggttatagtcatcagctgtggagacaaacagccaaggtcaaaagccagctctgacacatacaacccagctttgtgtccatgggctagttaccaccttccccatgacttagtttcctcatctgtaaaatggaataatagtacttacatcataaggctgttgggaggattgattaaaaatataaaaacttcctggtgtctttccatctctacctctaaataactgcacagtggagagggctgtccacttccccaaagtaactccatgaactgactttctgacggtagctccagaaatacagtatctctaccccagcagcaggccctgggtgagggggaggccttggggctagtaaaagtgatacctgatcgtgtttgtcctggcattccctgactgtagcaaaacagcttattcctaaggataccacgagactaggctacaggtctattgacctgctcttccttttttaactctttattgctcacttttcaggcttaaaacaactctcagagctcttcttcctcctccttcccctttcagaattttcctttttattgtgctattcattaggttcatcagattttcccagcttgctaactacacatcatcctactcaaattaggtattttaaaactttccatatgaaattaagcaaaatagtcccttataataaaaaccaccaaaaatcttttagtaaagctttattggtgtgatattatcagaccctccatataaagaagtagctatttattgtcctaaatccctggccattccaagtgcaaaactatcaatacacacccacgcttgcagcatagacacctcaataaattgcatcggcacaatgaagaagtcttaatgttaccagaaatcttttccaatgacaaatgtcaaacagattactggctggacctcactggaaatttggggatgctaataactcattcattctcctcttagtttttaataattgaggaggcgacgaggaacctgatgaagatatgaagtattatttccagctagagaatgctgagtaatctaaaatacaggtttctagaatatgttgatggacacaatgtagctttggcctgaacccaaagagaagtttccacctacttctcactaattttttattttttatactttaagttttagggtacatgtgcacaacgtgcaggtttgttacatatgtatacatgtgccatgttggtgtgctgcacccattaactcgtcatttaacattaggtatatctcctaatgctatccctcccccctccccccaccccacaacaggtcccggtgtgtgatgttccccttcctgtgtccatgtgttctcattgttcaattcccacctatgagtgagaacatgcacttctcgctaaattttaaccttgagaactgcccatggaaaaagatggatctagagcatattcatttattcaacaaatatttgtgcacccactatgtgccatgcactattctaggctccagggatacagcagtaagcaaaatagacaaaaactacctgcacttatgaagcaaagtaaattatatagtttgctaaaaagtaataggagcaaaaaagaaaaattaagcaagataagagataggtcacaagaagggaggtcagggaaggtctcaacaggaatgtgatgtttaggaaaagatacaaaggagataagagtgtgaatcatgcagatacctgaaaaaagagtgctccaggcacagagaaaagcaattgcaaaggtactgaggtgagcacatgcctggggtgttcaaggaagagcaagaggccagtgtggctgcaatgaagtgagtacatgtgtgcatagagggagagagagagtattaggagaggaggttagaggtggcagaggaccaattcatgggaggctttcaggccttgtcagaaccaacgcttttcctctgagtggaacgtggaactgctggcaggttttgagcagaagagtgacaggacctgactctagtgctaaatcagggactctggctgccttgtgagcatcaactatagagaatgaggatggaggcagacaggtcagataggaggctattaaaataatccagggatgatcctggctacatttatgatggccgcaactggagatggaagaagtgatcaaattctggtaatgtcctaacggtggaaccatcagaatttcatgattcattggaagtgggtagtgaaagaaagtaaagagtcagaattgaccccaagactggggacttgagtggcaagagagatgggctcagctttgctgaggaggtcagggagaaagaccaggagttcattgttgggtttcacaagcttgggatgtctatcagatatccctggggaaaagtcaagaaagatattcaagtctggagtccaggggagaggtccaggttggagagagaagtgtgaaggccatcagcatactcatggtacttaaaggctggttggcatcaccatgagagagggtgcttctaaggaagagaagaagggcaaggacagaagcccagcatttaaaaatcaggaagaggaggaggaggagccaccagacaagactaaggagcagcagccaggatggtaggaggaaagtcagggtttcctcctgaaagctaagtaaagaaagcatcttgaagagaagggagtgcaaatgctgctgataggtgggtgggcccaataaaatgagggcttttaatcagtcattggattcagcaatgtggaggtcactggttattcagcaatgtgtccactgaaacctggacaagtttcagtggggcagcagcctgattggaggggttgtaaggcagaaaaggaggggagagacccttgctactcaacatgtggtcctcacaccagcgccatctgaatcatctgggagcttgttagaaatgctgcacctcaagctctgttccggacgtactgaatcagaagctgcattttaacaacatgcccagggggttcgtatgggtactaaaattggaaaagccttggtagagatttccctttcgttgtaaagagaagaacaataggacagtagctgaagggagagatgtggtaaagagaggtttttgttgttgttttgtttgtgtttaaagatgagggagaaaatagtatgtttataggcagatgtttatcccccaagcaggcagcctgcttggcagttctatccccagcaggacacaaaaagataagatccaggctcagaaatacttcttcaacatcacggtcccactctgtggacaagtgaatctcagacttcccatcctaagttaatcactacccccctcttctgtcccaaggaaaagcagcagaaactgctttttcaaaggctgagtccagttgagaacatcacagctcagcttagtagaagttgttactcccttttcttccaggtttggagggtggccgagccttcttcaatgctgtcaaggagggagacaccgtgatatttgccagtgacgatgaacaagaccgcatcctgtgggtccaggccatgtatcgggccacggggcagtcacacaagcctgtgcccccgacccaagtccagaaactcaacgccaagggaggaaatgtacctcagctggatgcccctatctctcaattttgtaagtaaatatgccgttttacaaaaatagctctgtagagtaaagtaaaccttccaaagttgaattagaaaacctagttgcttttatacttaaaatttataaaatcatgtttgctgaaaacatatagtgaattcagggggaaagttggggcaaatgttagatgaaagtaattttaaagtgcaatacttgaccttctcccacaagcactaaatgaaggaaagtgtattttaggtggatttttatctctgttttggtgagagtacagaattcacagccaaacatgtatttgtttgagtccttcaaatatagtagattatgtatgtccttgcttcatttcttcctattaaaagtaatttaaaaatagggttgatttgaaatcaacttaaatctgcaatttagaaccatttaaaaataaatgatgacattatcacatgcagcgaaaaaaaaaaaaaaaacacaaaacatggtacctaaaatcccattccgagctaaaataccgaagacccaaaaatgaaactgtctccttaaacagccccagttcatattcgagttttttctcctcttacctctgcatacatttaatttcttgccccttttccatgtcttcttgctacctaaaatggcttttatctatcaatacttctgatacacagggtgaggtgaaagccagtacatgtttggaaatatttattaaaacaaagaaaatggagaaataaagtaattcattttcgttccaaacattcattctaaatagagtcttttgctttaccctgaatatcaagtcaatcagagatgacacaggtacaagtcatttttagcaataatcatgatgatttattactttagtatggaattcactgattcattctaggtcattgagcaactgtctagaaataagacatgctaatgagaaggacagacaaggtaccagctcttataatacctgcatcccagtggggaagcctagatagtaaacaagtgaacagataaataagagagcttcagacactggtaaataccatgaagaatgtcatttagtggtgactgagtgagaaggagagacattagacaaacaaagaagctttccctgagtttaggttcaaaggataggtagtcagccccacagatatttgaggaaagagaattgcagctgaaggaaaacaaatgcaaatgcagagacttaacctctaacacagtgcttgcacgatctctcctctgttgctcttaaacagaatatggatgtgggtggaataattttgcagctgtaactactaaatagaggtaaacttgtatttcagtgaattctactgccatgtccatttctgtccaacaagactatattcttacaccttgcaacacccttgttgatcaggaaatacaacttcttttggatcacaaattctgtctatcagatgctcccaggaattcctgtccagtactgatggtgatgcatgcccttgtggaacagtgtaaataatcatataatggctgtgagtttccacacagaaaatcatgaaagaataagaaagagattgcccacacctaccaccaagttctccactcttgtattctctaacatcttcctgcacttaggtttacttgagagcagtaaagagagtaatagttattagtcaagataaatcatacccagtatttgtttaattgttgtgtgttttttttaaagtatgacaaaaatccctcctttcaccttgggcaacatgctcctttgtaattcatttggaaacaacacatcctatcgtaacctcttgaaaagaagttaccccctgtatcagaaaaaaattctaactataatcaccattcaaatcaacctcataaagcatgtatctcaggtgatatttggaaaatactggtcttatttccaaataatcttcatttcttctaaagtcatttcaccttacattcagtgtctctgttctatcatctgcccagattaagaaactgctacatggtttgctattgaccccactttttcctcactagtataagatgaaggacattcaggagtaaaattagagacaagaaatcgattaaaaaagaaaacctgtgatggaagctgctgaagaagagatgtctcttcatggaaatgcatgggggctcttgatttagatttctgtctgtggataggattcatttagttgtgaaattagaacactagttgttaggcatcagcagaaagactcaattgaatacacacagcttgatgtgtatcactactctagttgaaataaggaacttttgttaaatggagcatccaaagcaaactcctaagagttagaatttgcgggggggggggggcgtaaatgatatcatccctagggaatatgtaaagtaggctgagaaatgagtgagaaaaccagatcatgcatgccattgggatttatcagtacctagtggtagatttaccttcttctgtactgtctcctttattactgccgaggaacgggagttcttcagagagcatgaggccctgctacatctaccaggttctaaaagaacaagccactacaatcagctatggagactgtgtaatacaggaaacaccttgcacatacacaaaaatatgaatggcacccattgagttctgcagtgccaaatctgcacaactgtacacagtggccatgtaataaatggcagcccttacccagaacttcagtctaatagtgtggatcccagccgtcccatggttactttattatccctgcaacagagcttcaacactgctccaaattctatctattgctagtttaagcacttaataaaaactgcagccagagtaccagccagtgtggcttctgttcctataatttacaagccatcagagacaaccagttaggatttaatcaacccaacctttatgcctgagcatctacaaaaagatcaagaaaggaaccaggaattttacattccatggtatcattgggtagttatgcacagcaaccaaaagagaaaaaagtgtctagatatgagggaatacagtcttccctcagtatccatgggaaattggttccaggaccccctgcagataccaaaatccatgaattttcaaatcccctttataaaatggcatggtattttcatataaattataaacatcctcccatgtaatttgaaacatctctagattacttataatactggatataatgcaaatgctctgtaaatagttattacactgtattgttcagggaataatgaccaaaaaaaggtctgtacatgttcagtatggatgtaatttttttctgaatattttcaatccaccgctggttgaatccatggatgcagaacccttggatactgaagagctgactgcataattgttagtggagtaagccacagaatggtggttagttcataattacttcacagctgctgtaatttgtaaaattcaaaccgtcagtactaaatagatcaagccttacacatgggtaactcagtcaaacccacagtgttgattcatacttaccgtgaccaagtcatcttagtttgcccaggacgtctctccttttagcactgaaaatcctgtgtcccaggaaacgcttcaatcctgagcaaagtaggacggattggtcaccaggtactaccacgcaagaaagatgaaaaacagtcataacatagttgtaaagaacaaattttcattcttcacttacatttggttgccaatctatacactgatttattttaatcaagtcacatcacaaaaattaagtcaatcacagattctctagctaacaaaaaatgtaaaaaaaaaaaaaaatcaagtattgcattttaaaaaggtttccttgacttccaaaaaggtaagggtcattgttaagtacttaactctgcacacatctcattaaatcttgtttttgaatatttgttcaaagtacttgcctttcttgctagtgaataatttttaagaacaacaatctttcagtgacttaactctataatcgctttattagtatttacaagacaaaaggaagctacgtagaaatggaaaaatacatagagaagggaagcaatatagaaatatttttggggtagagaaaaagaaacactccagtcttgtcatgtcactgtctgtttaagggaaacttaagaatggaccatttttatagtttggaaaacttgggagtaattgtgagtttatttgggtctttctaaattcagtttaacagtttttattttttgcaatttcaaaagctcagttttaaaatgaaaagacacttcgagaagagtggagtggggtatttatgtggaactgtaaaaactgaaaaaaatagatcctgctattcattagtttgtgtgtgactctacagagatttttgggagggtttcaccaacctttaaaacttttttgttcttttgtagtttttttgtgtgtgtcattgttgatttaatttttttcttttttgttaaaatttaacaaaattaagtcagcacctagctatacaatgtttttaaacaaattcttgcaattccccgatttttaaggccaatgctgcttaccttggaaatgatgtcaatctgtagctgagtgttccacgatttattatgctgagtggcctctcattgagataccttatcccctgtccattatgtgttagtggaacagtaaaaattagtacctcaattctcatttggattagggtggggtgggggaagagggtattttaagctttgacatttgatcaatggttatttaatatatcacttgcaatgagtcattttaatgtctgtttctcaactaataactgttaatcacatcatagaaccccaaagctgggtatttttgagaactgttctatttttgctaccacctgaacgtcttcaacagttagggggatttgggttactgttggtttgggggaggttgattttgttttttgttttgttttgtttaagttttcttgttcaatctttgctcgaacccaagaacttaggctgctaggttagaactcctgtctgctttcctgagccttgttgctagtctttatgttattctggtttgttccttcttaccctgctaacttctagctggactgaagggtaagtgctcccctatagctagcacagctcagataatcagattagattatctgacacctgcaatgtgcttccctcccccttaaatcttcctcatgtctagaatttgtagtacaacttttcatgttattttcctgaccttaggtttgaaatgtaagcttccatactgaaactaggatgcatgtgatgtgtgcataattgcctcctctccttggctttcatattggcatcaaatgatcctctgagtaaagccaaccattaacgtctaattttttttcattccaagaatattaattaacatcacaacaaaatggcaaataatgcctttgtttcatgtaattcacagctacctgactgcttaatgcctgaaaacagatcattttgcactctgataatgtgctgttgttgttgttgttgttgttgtttttcctttcccattccaaagattcgaatggtcagagtaccagtggtgtggtaaccatggataccttaaaaaataagtggggtaggaaacccagagttgttaactgagcaagactagaagaaattgcaaaatacaattaagaaagcaaatgcattatttgaacactaaagagttcattctagctggcttaagggtgtgctctaatgtaagacccaatagaggattaattttgaaaggagagctacaatacatggaactagcacacacaaaaacaggaaattaaggacaagactgaatccatgtcactcatttacaaatgctttggattcacagtcttacaatgccaaggtattaaccttggtatcaaggttgacatttaacctctggtatcaaatgtcattctgctactcccccaagaacaatgacaacaataacttttttgacatcatttgtatttgtattaatttttctaaaaatacccatgtaagagaaaaaggagacattaaaactttagaaaaatatttctcttaactattcgagttattaataaaaaagaacacatacttccttaatttatataggaaaaaactatcaaccaaaaatgtgttgaggaaagacttgacgttagacggagttagaaaaattggtcaagagagcaggcaactatgtatttgagtattctgaatgctaatttagaagaactaggtcatatcatttctcctgaccatttaatgatagtcttttcttcaaattttttttgtttccttctttaatttgctttttcctccctttctttcttttttcttttattttgcataaatgtacccctggctagcagacagacgtttttcaccacttcaagcagatacttaatttgactttacttttcttgaatgtctgatgaggcattttaaaaggcttatcatagaatgtaaacttagtgggaatttaggattttgctatactttttttaaagaatgaaagaaaggatggatgaatagttaactgaatgaattctgttctaaacaagtttacatgtatttgcacaacaacgcattgctatcctagtagatttttaaacaattgtttgccttaattcctttctgtagttttatctcataaaattttgctatatcttcttatattgtcaacttgcagttgctacgttgcaggaatgcaatatcaaataattaattcaatattaacataatttgtttgacccaaaaccatactgtaaatcatgtcccttttcactgtaaaagtaaatcactttttaaaagaatatgttcccacaatcaggtctaaaattttccaaacaccatgatttgatctaaacagaccatattaaatgaaggtttacctcactgttaactacgtaagacatatttaacatattattcactagttaattgagtattttcatgccatatagtgagttatagtaagattattaatcaggtatagaaaatttatttttgctcatgttggagtgagtgcaaaaacatcgagtactctgtaagttaatataactacagcaggagaaaactaaaatcatttatttattttgcttgagatctttgacaaaatctctgttatgatttttactcaaagcaattgtctgacaaataattatagaaattaacattgaaataaacatcacacacttatccttttgggggtattgccatagtagttttaaattcaagatttctgcatgatgcaatgtgagccttgagagcttccaaagaagccatcctcttttggccattcatattaccccagtttagctaaagggaccacgaagcaattaagttgtttctcaattaagtggtccatttgtgcctctgggcagcaggcatgtgaggaccagtcttttgcttgctgtgcagagctcaggcagggcacaacatcccctggttacttgactattccaaggaaagctcttctagaaaaatccataaacaaccagctgccatcagtcattgtcatttctttatttcatgtcttctgatgaggctgactactgtcattgttcgttattgtccaaaccatacattcactcttgtactgtcaagcagatatgacaagcacacattttccgtataagagaaatacaaagtcaccttttaatttgcagtttgggttcacagatgactttagagttgcattagctattctcttgcctctagcatccatcaggagtagcaacagccataactgtgctctaaattccaatgttaaaacagctacctctagcttattacaaaagggattcatgagagagaagagcctctttcagacaatttgttagtaatataatcataattattttcaacagtgaatttttcactagcccagaaaaatttccaaaatgtaatatcacagaataaaaaggtagatttgaccttttatcttcaatccctaagctgttagtataataggaaaatttcaataaaataaaaatttgaaaactacattattcttccaggaaaattacatttatttgctagacattattgcaagtctatctaaaaatatatatgttagaaacaagatcatataagtgtgcttgatactgagataatagatcatgaaaaatagtatatggttttcatttgtgagggaggaaaaaaggaaaagactatcaaacatgaaatgaacccaaatatcatgatcaaagaacaacatagatgacagagtagtcaattagggaccataccacttgaattttaataaagtagattaaatgagatgagagtataaaacccacataatagtatcactttaggaaccagtgttttcccaacattccttaaatgtcaagccaaaattacttccaagcaaacttggggcaaggtttagactagtttccgcttgaaagtgcacctgctctccgtaagtctgtatgttcatcaacctgcatctatgtcatagaaaccattgacagtgcttgaaatttcttaatgtcagtaccaatagcagcgttatccatccaagcttagtttgaagtcagtctcctatgcccatgtcataaaggactgaaaaatccttatgcaattaaacccccgaagtgaaacaggtagcaatgtttgcaaggtgtgttgaattatgccctagctgcagagcctataaaatcatatagctcactgtcagtacatcagtacatctggagcccttgaagaccaagcaggacttaggaactacttcctaagactaggtctgacacaggtaaagatgattgaaattggttcttaaaatgtcaatcgttgatttctagaaaaatacggttaatgaaaaagagcattaggatgcatctcccaaagcaagagatcatccaaacatcactggggttttaagcagccactttaccctcctaattcctttttgcttaacccgatgttcaaattcattttcattctcttgacacatgccaaatattggcaaaggaagtgatcccagaatgtcctgaattcaggaattgactctttcatactgcttgctctgggctgttttccctctgctaatgtcaacattggagttttctttttctttaatcaaccaattccaactgtttgtacagggaaaaaatggagttgcaaggagcatttatttttttatgtttgacactgtggaagaacagaccgggacagtgcaagaatgactgtatggtgttgcttgggaagcgcccacaagttctttgaaacagaatttggaacagctggaccactgcagtgttttattttaaaatagacaacatatgtaatgcatatggtcctagacatgtatggagacacaggcagacaatctgaatggtatccaaagacacctgcacctagaattctgtttccttctataagatttttttcccctaagagcacatgttcctacttttggatttgcaagataccatctgaatccccatgtgtgtgactccttaataaagtcaatgagaagtttactgggatgaaggtgtcagagtaagccagttaataacccctcctgaggacctggctcctctaagagctggcaggggaaataacagattagaaacttgccctcacagaacatgttatctaccaagggattcaattttatgtatgtgtcttgaccacagagaaactggaaaataacccaatgaaaacacagaaacaggacataggaattggttatacaggggcagaaaagaaaaataaagcagagagatagggaaggactcccagcttcctagaaatgataaggtttaagaagcaaagaaggaatagaacattagctataaatgcagagacatccttggctcactaactacttgaaacaaactggcttttcaaacactaaagatcctgtttgtttactcctagctaatgtttattgagcccttaatatatgccagggccctaggtactttccaggtacttctcttcagatcctctcaacagtcctctgaaggtggacttgaatttaacttcattttacaaatgaggccaaggaggcccagaggcattaagcaacctgcctcatatcatatacctagtggtggcagagctagtctcaaatctagtgtttgtgacctgcctatgcccagccacttaaccacttgctatgctagctcccattaaataagccgtttccaatcaatgtagtatataaatatgccataaaatcaagaaagaaaaatatttgttaatagagtgagtttctgtatttattctgagaagataaacttatgattttaactaatatgtgcttagtgcctactacgtgccaggtactattctagggctgggaatgtagcacaaacaaaaaataccgaaacccctgcttggatgagcttaaacatcagatttttttcattagcaccttgaaacagcactcctggcttactcctccttctttttttttttataacataataagctcagtaaatataataagctcaatgaaactcaaagattttgtgggagccagccacccttgtaagcgctcttgagttgtgggaaccattagaataatgagcccaattttgagtaaatgataatttggggcaagtaaaatccagaggtggctcgctttacttgctggaaattcccactgcattaagctccattccacacatagtgtgcaagggatcttaaggatcattaaattacagcctataacggcaggaagggaactgaaaattcagctcctcttacacagaaggcaactgatgctcagagataaacaattcagccagcatcctacagttttttaaaaacagagctcaacctaaaatctagacctcctagatccagtcctaggctcatgctacaagtggatggggagaaagaagaaagaaaggaagaagggaaaaggaagttttattttgacaaggttactttttgaaaatgaaagcaggctgattttaggcttttctgtaagcttgctttaaaacgttagtaaaaaatgaaattgttctttagacttcgactagaattagcaccacaaagctgcattcattgagccattgtgatggactgaggggtggggagtgggtctgaatccaggtctccataaaggagccaagtcgccttttcagatccatttcctgagtggccagcaaagtgaaataggtcatcagcaaagttttcaagagtttcaacaaacaaacaaagagaaagagacttgaaacatgtgccatatttttttaacagctacaaaagagcccccttctctctgagctaaatgaccagttgtaccatcataattgaaggcaataaaatagccaagccaaactggcagagtaaggccccggccggtttgtcagtttgcagccttttctgagaaacccgagagcaagaagctgctgctagccaaaatgcctgatctatctgttaaaattgggaggcgagggatggatgaggctttttatgaggatgaaacagcatgagcaattcgtgtgtaccccatgcttagtttctcctgagttaaattgatctgggactgacaggttggaggtgagagggcagagtctatcaaaggcgatagagaaatgtcacctggattgcaggagtgtcattatgccaggggagactacagttggagcaggtttaagacacttgccttgggccagaggagtcacacacatgccctagaagcagctagctttcccaggagcaacaacttcctggccatcctaagtcaaagaagaaatgtagtttggagaccaaacaaccgaactgaaagaagcctcctagatgaagcagccaacctcaagttgaaagcactttcctgaggataaatctgaggcagttaatgcagcaaggaggattctctcagattctctaatataattcctgcacatgtgatatcctttccaaaagctgtgttttattattctaatggagcgatttggctgttaaaatacacattcttcaacttgccttctggaaaccgttgcttctgcgagtcttgggcataaacgccacatctcgttcaaacaaggaccacttgctgcttctatgaaaaatgacaacgtttttttaaaaaagtcaaacaataaggaggtataaatctgaccataccatggatttaggtttgaatgatttattaatacaatatcaataataataggagaaatcatcatctggaagtgacactgctaaccataacccaagcttacagccataccccaagcatgggagaggaaaaaaaaaaagctgcctgggactgaggccacacatgaaaatgttatccaaactactcccaagtcagaaatcgatttttcccgtgtcctgacagcatcgctagttcctggcaggtccccgtattccagtaagatgtttcatgaaaaaggatgaataaaatcttttgctagatttgatagaagattctttttctccaaagtctgcgtatcaggagagtcagtaaagatgaggtggagtgagccaatttctttaatggagagcaccttcatttctacctctttaggatttgcctggacacacacgagttgaattctctgagttattttgcctgttgagtatagtgtattttagttacacatgttgagattaattagttagcccttaggaggttttgcctacagccttcaccccgtaaggaaaagtgtgaatacattgagactattaattcacaataaatggcagatcatagcccttgctgagtaaatttgtttgtctctttcctaagctttgctaactgagtaagcacactataaggaaatgtcctttattttcacaaactaaattcccatttaacttaatctccaggtttcaatgaaaatcgttttttttatttttaattttgcagggtggggactcaaaccttttatgaaaccaaattggcaatggggatttggaagaagacgatataaatattgtcactttgctgaaaatcagcataaccctttttccagataatcccaataattgcagagaaattgctgtagacataaccactggaatggcagaatctattaaaaaccagcaaagctaaataggctatcttaagcaaagatccgatctgctttcagtgtttggtgaaatgcaggcgaagttacggtcttatgcttagtttttaaagaacaacataaatgcactggaaatgtgatcatttgataaacatgttgatgccaatatcttcttgcctaaatgcaataaactcaccagtaagtgatgcaagttgacaatgggaggtaaaaagaatatcttggggatgttggtgggaggcaacggggaaacagctaacgttcataatgtctagtgaattcctgtgtatttgaaatgtcaaagaaaatgtgatgtgtttctctaaattgtgtctctctctacatgtataaatgaacagacgcagatagagctcaaaaacatggcatggatgaatttatctcttccaacccctgtaactttgaccacgcttccctctttgagatggtacaacgccttactttggatcacagacttaatgattcctattcttgcctggcaagtatattctttggtctacagcaatttaaacataacattttttttcatttaaatatttctctacctttatgtcagaagctcttttctccattacagaatccctttaacaattataaatgtgttcccgatttcctgggttgagatagttttacttaccaaagaaacaagactgagcgggaggaagttatcagtagaaacagatccaattccccagcctccctatcttagcttcccccttttcagctgctacatgagaaatattcccaagagggtaatcgagtttggcacctgcttgtggagaacttgtaaaaattgcctcagtagcttagagtttaagatgcccttccctccccatcccagatctggtaatcctatctcattacatgaatgtattctctttgtgtattttcttaaaggttaaaatgatttgtaaataaactttatttttcataagctaaattgatttgggtttgtttgtttgtttggatggcttttttttttcttcacaatattcacagcattttttcaccctttcagggaattttttatggtgctttagttatttggaaattcagctatctatccagcaggagtatcaatatttcctgaaatcctattttaaagctagatttaaatgatttaaattcaagggagtgctattatatttttactggatttctgaagatacatttttggctttaaactatcaaattcaaacgcctaaaaaaagacccaatttacttcttcctcaagccataaattgttatttcatttcttaaaagtaaatgctattaatcccactttatagatgggaaagatgagggaaaatgatgaaatgtctttatatagaggaaaattctcatccctgattctaaacactaaagttgagaagaatatctctatgtaatatttatactatataataagtagggttaagatattattgatactaatatgtataatgacaatctttcttttttctaatttttattttaaatttctttttttgtaccaaaagccaagatataaaaaattgtagataaaatagtcttaaacacagaaacagaattatgtggaataatttattaatctgtatctcatgaaagattcattgattatctcaggtttagaattccttcatcaaaaggatctgaactttgccaaattggaaaggaacacatcactttgacttaaaaaaaaaaaaagaaaaagaaaaagaaaaaagcttaccttgcattgcaaggcaatttttctcaaatgtgttttgtacaattatgtgattgttcacataattataaatggcattcattaaacttgtaagaatgtgcctctgaacttaaatcattcccttttatatataattactattcccttaaggaatttttttgaggtatattatttccaagactttttcacattatcattttttaaaacaattttctttgttttgagattcactgtgaaggagagtttataaatgctctctaaaaaaattaaaccagaaatgaaatattaaaacttgctttccattaattacttataggcttaaaattatggtccagaatctaaaattaattatgaatagcataaaatagcttccttccccatttgtatacctgtgtatattagtcattattccaaaatttcagaaaataacagaaattaaaaaggaccttatctcctgcctctgtatattccattttctcattattacaatctttttttcagttagttttggagaccgaccagcagggatacataaatttttctgtgtcttcgactgagttcctaattgatatttcttcaactcttttcaaagcagctattttggcatctacaaaagacttggtgtcatctgagtcgtagaaaatatattttaatctttcacagcagtgttgtttctaagatttagcatttggggtagcagatggagtggcaaagaagttgcctataggggcagcccactgcctcgactactctccgccctctgcagtaacttataatttgaaacaggaaagatgccgtctttcgttggatgcatcactgagctgcatgttgtcaattgaagattcccagatccctaatacaagattagagtgttgcaaaggcctctctcgctgtacttctgtggcctctacctgccccctagtcactttctctttttgccttttctctcccaagatggagcaatattcaaaagatgactcagagaagaccctcaaagtaaaattaagtttatatttaaaatagccccaaatttccagcttagaaagtatcacctaaattggtttatttcttgctttgaacagacactgaaaccagaaaacacaattttatttcaggctctgcttaagggtgaccttgagtggcaactcacttggcctttctgagcacctgttttcttaagtgcgtaatggggctagcaatttccatcccatcatgccaccaaacctgctctaatttgcagatctgaattcccattgtcttgtatagcagagtttggactggtcccatagcaagcaaataaataataagaatacaaacaattaccagaagagaaaataaaactctaaaccaggacacaagaagttcctctcagtttaatggaattacatctgattcacaacttgaaaactaagccatgctgttctctttggagagttgcgttattaccttcatttgaaaaatttaaaaaacactctttccaaagtgaaaggatttatgaagtcctggcatgtatgtagatcaaccctaaaatttcttcatgctctagagtagagaaaacaagaagacttggaatatgacagagctggatttgagtcctgcctctgttttgtattatctgtgtgagtcacttaacgaccaggatttccattttcttgtctttaaaataaaccttctctgtctaccttacagagttgctatagggctcaactgaaagttctctgttaagtgtaaagctctatatcaatgtagagcattaatgttatgatttcctcttatcagtaaccacgactttgccacatccccaccccaatactcctttaacgtgtatggttccgtgttcaagcagtaggtgagacactgtttctggaaccaagctgtctgctaatccccctccatcactcactagaaaattttatgcccttcttgaactcaatctttccatctttataacagggataacagaatgtacctcataggttccactgtgaggactaaaccgcaatatgctgtgcacagtggctggcacataataggcaatcaaggagtgttagctctggctatttttcagtccccttctctagccactcccaactctagcagctctccagaaaacaacctgtatttaaaagaaagtctctcctttattctttatatagggctggttcagtcctggccaggtgtttgtactagacgagtattgcgcccgaaatggagtccgggggtgtcaccgacatctctgctacctcagagacttgcttgaacgggcagaaaatggcgccatgatcgaccccacccttcttcactacagctttgccttctgtgcatcccatgtccatgggaacaggtaagtgtgtgttcgtgtgtctagaggtgatccttaagaaatggcactggcaatggtttatggctagtcttgcttttaggatctgcctgtcttcattccttcggtggtatgtgcacacgtacacacacacacacacacacacacacacacacaaagggcactaactttcttctcctttcaagaaacttaaaataaatggcaagcagggcttctagggcaagctcggaagttaggccaatctaggttcaaatcatagttcttccatttactagcaataaccctggttggtaattaagccctttgtgccacggttttctcgtctgtaaaatgggatgattgtatacccctggggttgttgagagaatgcaagtacctataaagggctcaacatagtgcctgaaacatggcaaaaacaataaatatttgcctttgtttttgttatttatttcataattgcttaataattacttccttagtgtcagtcactctgatacacatttagtatgtgtggtgagtaaaagccagacatcaaacaagggcagagttacattcagattgatgctctgactctgaggaaagggaataaaattccatgacaaaatttaataaagaaacatgactcagatggaatggcaagatggcaaggaggacctccctgaggaagtgatgctggagctgagaactaaagcatgtgtaggagttgagtggttccaggcaaaaggaacagcatgtacaaatgtcctgcagaaggaggaagccaagtacatttccagagctgaagcaagctaggtgaagctggaaggcaaagatgatgataacacttttaatttaaccatagagcctggaagaacttttgagatcacagtctaatcaaccccctcattttgtaggttttatatacaagcccagaacgtcaagtctcctgactctgtactaagtactctctttctttagaccttgcccagctcctggaggaaaagatccatgttctgaataatgcaaagcagcaaataatttaagaacattgccatttggctctggagacatggaataaatttccacactgccacagccagtttactatctcaatgtatgtagccttgcattagtataaagacaagcctatattatcccaaagctccccaaccaacagccagtgaagccacacccaggaaacactaggtggcttcagaaacccagcctcagatgcaaaagtcgctgctctggagaaatccacatgtgggagaatccagaattgactacatttattttaaatcagaactgtgtcagtcgtcttcatctttgcaagctatacaactaaaatctctgtaggattttttctgtgcttttcctccttctagcactgatgtatttttacgaaatgcaacttcaacatttagagctagataacaatagcatcataggtttgaatatttaacaggcaacaaggttatcatcacctcccattgttatgaggtttgctagcccagcacgtgaccttttatttgcataaaagatactcatgaaaactctgatacctggggggtatctgtgcataattctgctttttataaatatgtacactttgatgactatctgttacagcctcttggactgaattttttaaagagagagagagagagagagaagttgcattatattctctgggttgtcacactgtattctacatatgttactgaataagaaagtgttataaaataatgaagtgtttttgtaaactccctggtaaacatcatcatgaattatgatacacattgtctggatttcatattgtaagactgccacttgattcacagttaggtttatacatcttgtcatggaaacagttttggatttcttattttcttttcagttctgattttccttatgcaagtttgcatctttttttcttattattttagtttgaatgcatttgcgcctgctttttcatgcacccttctttttctttcttttgtttgtgcatgtgcgtgtgctcttgattctcctatggctggccacactctgtgcatgcctcatgcgaccaccccctctccaaagtcaacaaatgcatgtgtaccttagtgggctgccaccaaatacagaccctgaagggagcaaaactccctccccacctgaaccagaagctaaaaaagataccaaaaaggaatccaaaaaaagaaaagattccaaaacccaggcaaatcaagagctgaaaaggtaagaagttatgtgtgtattggcttgtgtttgtaatatctttaccctttccccaagcctccatccatgccatcacttccacttttgcaagctttgagtattcctaaagtctctctttaagcattttcaaaggtgcaattttaaaaaaaaattctagcaatgggcaaaaataccgtgtattgggactaaatttgagtcaggtgttcagtgacttttaaaacgtgttcatattgaaaagactaattgagcaatatgtaaacagaattgtgagtcagattgcttttttagtggcatctagttaggggcctggtaccttaccaagtcattcataataagcaacccatgctttataattttgaaattatgtttaaggagcaaataaaatagattggcataagataggcctatgcatttatagtagtgccatcattttcagcaaatacctattagttctacattcatctcataaaaagaaattcatctcaaataatgatttataataatgtcataagataaattctattaccaaattaatgcttcttagtagaatcacttatatactgaggtcacctttaaggcacttttaacttctaaaattttgtttatcctgtcctgtttcctatgtcctttctttgcgggtttataaattggcgaattggtgaactttttcccttttaaattaggtttactaattatttccagttttattctgtgcccttcttcaccttttataccgtcacccaaaattaacactgacattttaaagttttttgtttggttttagaactgatgactctgatcctggcattgccaagctacccaaaattctcaagcgtgtatgctgtatgcttcatcattataaatttattcactgaatatttctaagtcctgaaatgtataccgttcacttgtagacaggccaaatgaaaatgcaaacttttgctttctagagaatgtggcaggctgtcaatcagtatatgcgggtccaatagggaaggtcaaagaaaaccctgattccatgtggccatccatctccttcaccgcaatatgtaaggatagaggtgaaatgcaatttctgtttgtgtttcactgtaaaagttagattgcaaggcaacagtaacttgcaattaggaagaaagtgcatgcagaatgttgtaggtgcctgaaggtgaggtctgacggaatgacaaggcttcggagaggaagccttcctggctgctgtccaaggtgctgcttttggaaggatcaacatccaagtggagcagagaacaaatggccagtgttgaaaggcacacttgcttgaacctgatctatttcttaggccacgaaaaactaactaaagggatcttgactggtcctattgaggcttatgtgtgtgtttcagaatctttgtttgcattgcatttttttaataaagaagaaatcataatattaagtagcaattgtgtaacattctacagtttacaaagtgcttttttgtttttgtttttttgagatgaagtctcgctcttgtgccccatgctggagtgcaatggcatgatctcagctcactgcaacctccgcctcatgagctcaagcgattctcctgcctcagcctcatgagtagctgggattacaggtgactgccaccacgccccgctaatttttttgtatttttagtagagagagggtttcaccatgttggccaggctggtctcgaactcctgacctcaggtaatctgcccgactcagcctcctaaagtgctgggattacaggcatgagccaccgcgcccagccacaaagtgcttccaaacatttgctataaaatattcagattagctatttttatgttcattttgcagatgataaagtcaaacatctgtaaatttaagtagcaaacctagatgttctaagtccaaagctctttccttttgcactacatcaggactgtacttatatgctgaagacctgaatgttagaacctattctgcataaatctaggagtatcagatcccgtttctgtgcctcagttttctcatttctgtaaaatgagcagactgaatcatagtatctgtaatatccctttaacatctaaaattatcttctatggattacaataacaagtgaaatagtccatcgtcaggtttcataaataaaaatgttttcgaaggtgcaatttaaataatcataaataaagtttaattaaaataaggataatcactaccatttaataattacttgctatattccaggcactaagtgaagtgctgttgatatatgttatctcattttatccttattacattcatgtgagataaatatcgttattaccctcacccaatagatgagtgcttgaggctcgcataaattcagtcacttgcctgaaactcataacaaataactgtctgagcctgattcaaacatggatattctgactttggtgcttgcatttgtaaccactctaccttcctacctgtccaagattagcacttgtatatggtgtgagatggcaaacctggccgtttgatatttgtttcaacatttccaggtgagatgctacagcagtcatctgaattaaagagaagcctgaagatggccaaaactaatatggcctacctggagattttagctttgtggggaaaaccagaatttatctggagttttataccacctaaggggagagtctcctatgaacactaattaattgcctttgggattggggaaaccacattccaaacctttcaccagcatgaccagcatttggatgtggagatgttatctattctttgttccagatttaaaagcaattcatgactcatgaaagcaatggccctttaactgcctttaactgaatagagcccatttccactgagatctcacaaccagattcggattaggtaaaaagatgttttttacctattattaactcagcatttccaccggcagaggcagaaccttgccctgctgcagctggaaatcattaatgaccactgacgtggcagtgaccaagtttctcccaactgctctggaaacttgtgcaccatctccgtgaaaaactatgctctgtgaatcacagttactgtagtcaagtgtagacacatctggtcaatcaggaaggtgtttgctgttcataatttcaaacactgggatgtatggaaccatccacatgtttggcatttttagaattactgggggtaatccccactcccccaccccccacccccagcacacacagaacatttggtaatatctggagatatttttgattgccacagctggggtggagtggtgccatttttgtctagtaagtagaggctagggatattattaaacatcctataatacacaggagagcctcctgaaagcaaagccaaaaatgttaatagtgccaaggtcaagaaaccctgttttaaaccaaactccctggtgatgagctgcatttttcctttacatggatttgttgtttcttttacacaagacttaccctatgtctaaaagcctaacaggtaccaccactgattttcagtttgtacagtggttctcacacttcattgtgcacataaatcatgtggggattttataaaatgcagagtactaggtggcatcctcaaataatttcatttggcaagtcttaaatggagctgggaatctgcacttttactaagcacccctctcaaccatgaatctaaagcatttggtctttagatcatacatatttaggattttggttgtcaaactaggctgcccactagaatcacttggagagggtaaaaatgctaatgcctgggctccacctgcagagattctaattaatctggaatgtggcccaaacttcatgagttaaaaatctcaagtgatttaaatatatagcaaagttcaagacccactgattgagggaacattagtttgaactaactttttaaaactgaacccattttctgaaaagagagacaggagaaaaaggaaaatgtgagtatgctcagctggttgcatttggcgatcataaaatccacagatgtaaattgctacatcttctaatttttaaatcagcttctaaggttgcagtacttaattctcaccataatatttttagtattctttctagatgacatttagattagcatcactttggtcactatcccacagtgacaaggcaatcaaacagctctgatgattgcaagttgcgtcaatgttccttggatccctttattattgggattggaaatttttctcatttacattattatttaacatttcttgaatgccagtgctgctcttcacatatggcctgtgtagaaagtacattgtatcagcaattaacaaatctataatgccaaccgccgcaatccaaagtaagctgcatagattaatgagtaaagcagatgtaagagggtatgaatcttaaaaatctctggcagtgtgctctaaagatttcttttgggcgatgtatttggagccaaggtgctgcccatgttcagagaccatgtgatcccttgtagattaagatttgagtaaccaaacaatcaaatggaactcacttttctcctgttactctgccaggattcctaagtaagtggtttcatcctcccggttgcccaagatagaacctcaagagccatccttgacttctctttctccccagtgtgtcacaacaattcaatttctatatcctgacaatgcccttaagtatctctcaagtccaccatttctccctctcttcaatgccactaccatagtttaggtctctatcttctctcctctggaccacaatgattgccctattgactgtgcccttgcctccaatgttgggtggccgtttcaatccatgtcacataatggttccttttatttctttttggtgaatgccttcctagtagtaaatgagtaacacatttttttctttcactctaactccgtcctctctctttctcatacccgtgcatacacagacacacagacacacacacatacacacacacacacacacacacacataatgacattacatccggtgcttctcaaccctttttcccacaaagataaagggcaaaaactgtgtagtggggatagctctgttttactaacctctgcatgtagcactttatatagcaggcaggcactgatgcggtataaaaaacacctccacattcttggtctcatgttacacactgaacacaaagattattgcacttgtgaacatgagcatgttgctggctggccttccaattctgagcaagtacaggccttgcacatggctgagtcatgctctctaaattctaaggagccagctttacttaataggaagtacttggaagagaaagtgggaaaaattttcaaacaaattttacgtataagtaggcatcccagatgtccaaggagaaattcactttggaacttgtttccttttaacccacgtgactctctttctgactttccccatgagaacagcagattctcccatcgagacatgaaatcttgtgaaatatgctaaattacctattccattggtgcaatctttctggcccatagcaaaccatcagataatgtgtttttcctcttaaaattccaacaatgtgtctttatcccatagtcattgaattaactggtacaaaaacatattttcagatgttacactccttttagagtggatgtgatatcaaaaagccacacatactactggtctgaccactcagaattttgtatatggtgtcttcagaaaggaatctaaagattagttgtctgtatttgtctagaaataaagaaacacatcccttattcctcaaagggaaaaatctatgcagtgccaatttttaaaattggtcctcttgggggtaaaatgcatgctttcctgcattttatacaatttctctaatcatctgatgtgttcttgcttcattcagtacctggactgagcctgagccactttgactaatgtccttgtgcccatagcatccatattctttgtgactgttcagtagagagagacttctccacgactttcatcctttaatagagttaatgacaccttctgatactgttaggttataaccacatatttaggagaactgtaaataagtcaagacagtcctcactggtgtatttttgccccttccaagccttgtttggagattaattattagccccaggaagctacaatgcacacttgtaatattgtagaaactgcttattgttgcttcctatcttattctttgtgatacaaacactttgatatatttgttttagcagcgtgtctgagccccagggcatcagggcataattagaaaagggcatgggctggaaggaaaggagaggaaggggtgaggctggctttcataatgaagcagtaactatgagatgtgagggccctaattataatttataattaacataggattgtacaaaccatatagatgagcaagcagggatatctccttttgagaagataatgctttggtgctatcttgaatttgtggttattaatcacttgaaagagacaaaggaaaactttccatgcaaggattaaattcaaaggtatcattctaaaactagaagtaataaagagttagtttctgggagaactctttttctttttaagtcagtggttaaaagaggatgtttggtctaaatgtcctatttagggagcactgcaaagaacatctactaagatattctgtccctctctggccctttaagctctcatgtttctgggctggaacaatttcgtagcaagtaggattcagttatcatgcttgtttaaggacattttcatggatccatcatgcggtctgcaggcatgcatccatttggagagagagaatatatcatgtttacggtgcctgcaccagcatatgtggacatttgcatttggagatgaaagtatattccctcttcagctggagttttaccccttgttggtagtgactggagcctgaaagctggttatatgcggagcagtggaccagacactgtttcctcttctgtggaattcatacatttctttttacacctggattctgcccttaatcaccaaatagatgcaatatcagaacatatagatcattgtaagctttgaattaatttagcattctgaccctcttgaagagacatcttacctttcaaaagaaggtttttgtggcccagcttttaacataatatggagaaccattctagaaagataatgaactgctaaaagtctgtgtgctcacctgggtgtgtagtgacaatttaacaacactaaagaggtaaattcatttcacaaaacacattgaatcttgaattctttgactacactgttcacacttaatttcaaatattaaaatgtttcacattaaaaactcagtacttcattatattaatcctataatagatattagttaataaactccaggtcagaagcatttgggaaaaagagaacaatttgcataactagtcactcaaaggttgggcagctgggttatggtagtttcaatttgacaaaaaaaaagaaaaatgcaactctagatgtattattatttgtgacatggctcaagatgggagactgtgaggagagtgaagatgacagaactggtgctaaccactgtgacaagaacttgaagagcagccgacatgacatctttcctatcatgctgccgaaaatgtcaactttgtgaaggacagtgagaaaatggtttgccgaaaacttgaaaggtggattccggagatgcccgccgtgtcagatgcgatatagtctgctgtggctggagagactcatttctggctccagtgatggcccgcaggtgggagagcttccaggcttcagcacggctccaaaaatgactgcgcttgacctgcatattgtctcaagtttgcaggatcatgatataaaagaagcgagttgttagccagtgtgcagttaggtggaaccagagaccaggggctatgttcgcatgtgtatgtgctcatgtgtgtatgtgtttctaaagctaagttcaaagacatcatctattaaaatttggaacgttgtgaaggaagagatatgtgctttatgaacttatatcgagttcaatataagtaacaaaaactaactctgggtaatctaagcaaaggagagtttattaggatgatgctgggggcctcaaagacggggaaaggaatgctggaatcaagtgagctatggaagagtagaaagcaggactgacacagtggttcttactgtatgttagagtaacacgggaaaccttaaaaatgccagtgtcaggctgggtccagtggctcatgcctgtaatgccagcattttgcaaggctgaggtgggaggatcccttgagcccaggagttagagaccagcctgggcaacataatgagaccttgtgtctgaagaaaattaaaacaaaattaaaagatatggtggcatgcttctgcagtcccagcctctcaggaggctgcagtaggaggatcgcttgagcttgagatgtcaatgctgcagtgaacagagattgcgccactgcactccaccttaggctgaatgagaccctgtctcaatagttagatagatagatagatagatagatagatagatagatagatagatagatagatagagctttgaggatgcgacctttcacaattctaagaaacagacaagatcaaaaactactgacctgtaaggacagtctggtcaaggcacagctgctggaacaagcaaattccgtctgtttattctagccttgtatcatttattcaacgtaaggattccagaggagggtgtcctggtagctgaactgaggtcatagtccagcttagatatggagtggctgtgaaagggaggggctggcctctaggaagcccttcggctttaatagtaggggaataggcacctcgatttaccctcacacgagagtggccagaatgtggctgaggccactcctccaaatccaggggttagaaattggcaatggatgctaaaaagcctgaaagcaagaagaccagaatattcacagtcaggacacgagagcgtgagagagtcaggcttctaggcaggtgttctgtgtagacacatctcagcctggaattttctagctagcagtttaaaatccagcttcacccctcctcttctctcactctttgtgtctcctttagtgatttagcattgagaaaggaacaagatgcagagctagttttaagacagttgtagaatcacccccaaatattttcagaaagacaaaacaaaagcatggcgtctgaaagataccaatatagctctactatttattttgcaaccagcactacttggaatggcaccttgtaaacaatacaaatgccacttttggaagggattcatagttaaataataccatgtatctcttgcagaatatcttgggttccaaatccactccaacctaagagaaatcaggaaccctgaatcaaatataccctctctgccactggaagaaccacccacctaatattttttttctctagaacagtggcacttagagtgtggtcctcgaaccagcagcactagcagcaccagtaaacttgttagaaatgcaagttctcaacccctaccccccagctctactgaatcagcaactttaggggaccaaccaatccaggttgtcaccaggtgatgctgaggctcattcaagtttgagaaccactgctctagaaaaagtatgctgttgcttctgtggaaaaaacagtactctccaaagcatgtaacctgaatttttcagttaatagttctatagagatctatctaaacctgtatagctaacattgccaaattataggggtcgatgaacaagaaattgatgtttgacagaattttcgaaaacaatgaagtgaaatcaaacaaaaaagggatccttttgctttttaactgacctggttacaacctatgatctttgacaagttgttattcctgcatgtcttttcctcactttgtaaagcagcatctcctgttaccaataccatttcagagcaattctggcagttacaaatttacattttatgtcaaaatcattcgacatcaaattgttttatcacctgtttttattggtgaactctgtacttgtaccttacagacttagtaaagttagtttgttttatttaaaataaaagttgtcgcgctgacataggtgatcaagaagcaaatttaagagacaacactacttttcagttgtttacttttattggaatagtgagattaatagtgttcagaaagtagtacgaggagaggttatcagcgaagcagaagctgctatctgatacttttaataattacaaatgggaatcatcagaacaaaaggaaaaaacataatccattgttaggtttgtaataatatcttttatagtgagaattaactgagaaggccaagcatacactaaatgttcagtttttatcatctcagacacaaagcagaaagctgccttctaattgcctaattgccttagaaggcttgtagggtaatgaatgaatggttttattcacagagatatttatctcctaataatgaccacaaatatcctggctcttcatgttaaatagtctccatactttttgctgtgatcagtaaaccttttctgaactgtaaaattatatttaacagcatttttctctgggttaattctccactaaaaaacaaatgctttaaattgctccatttttcccccagttgagtgtgtgcatgcacatgctgattacataaacaaatgtgtgttcagttcattaacaagctgaaggttgtttaaagaaatttaaaaaccacagcttaaggaagttgtaggttgtagcatatacacgaaaagttacaaacaaaagcatcacatgttttgtggaggccagtaaattcatcctgttatctaactgtagattcacggacgtttcatgtaaaaaaaaaaaatttgtttttgttaagcatggtagcttgcacccataatcccagctactcaagaggctgaggcagaagaatcacttgaggccaggagttcaaggccacagtgagctatgatcacactgctgcaccccagcctggacaacagaacaagaccctgtctcttaaaaaattttttaataaactttgtaaattaacatttgagatttaccagagaatttgaaggcaacctacctgttgtttatcattttgcctttctttggaagagtatgaagaaatggactgaacaggattttactgtttgggggtattttttataaagtggggaagaggaaattttcgcatatttcaaatagggcatttttattatcaaaaaagaaggaaagctgactgattaacccgtaacaggaggtacattgctgtcatttgccaagtcttttgtgcagtcagactggtctagtataaaggattttcccaacttatgctggatccttgagaaggcctataaataagaccatttgtttggtctcaagatgacttgcatttgcaaactgaagaatgttccaatagaagttttatggtgacacaccaatctgcaaactggctcagccagtagtcaaaacaagtcactatgagatctgggaagctgaaggctttgaatgggtcagattatcctgcatttagtttggaacagataaatttgggctataaatatgtatcctccctttatattttcaacttgaatggtccataacaaatagagtatatatgtatgcacctaaagatgacacagaaccatgagaatatgatgatcaaactgaaatcatttatttaagctggggtcctttttattacaatgagtaacagtttgctaaaattggaaaacatgtggtttgttcttcaacgaatacatgagcacttaaataaatctgaacatcggtagttataggcaagaaattgagccatttaagacgtctgacaccgggaaagacaaacacttacaagtcacctgattttcataggaatttttgtgcataattcagggaccccaaacccaagtgcctacaagagagataggtaatacaatttagcaatgtggaccaggtgagtgcctgtcccaggtaaggaagaagctgttagccaccaattaataatgctaactgttccaaattttcaagaaaacagaaatcagaatcgtattctcaaacttccctaatttaaaaaaatgttggcaactggttcaaatttcttaagacgctgtgagccaaacagaacaagttcaggggctggacttaaccttcaagccaccagtttgtacattttaccatttcacaagaaaagagctacagctctgcacatgtttccaaaatgataacccaaacacaacccaacgcctttggaagctagccctgaatagctgggcttctcctgagctcacatcgatcactgtagttgtttcttctaaaatggacagtttcctcctgctagagatttgatttgatggtgtcagcatatgaggttcccgtcatttcatgacatgtcttctttcaggcctgatggaattggaactgtgactgttgaagaaaaggaacgttttgaagaaatcaaagagaggctccgagttctgctagaaaatcagattacacattttaggtaaggatctggggctggagagctttaattaggagatgagagtgggaagggaaaactaaaggacttaattttccaaaactgtaaatctaccagaggatacattggatatttagaaataactgagtagaacaagcaaatcaatcagatatggttccgcaataaccaggaaactttgcattcttaagttcatgttatttccacttaaagaacaaattcttccatgtttgagctgaccctggtcaacaatctattacaaaaagttgaatttgaagcttcttcaaggttcctaagtaaaaatgaataaataaaaaatcttgtgaatcagaacatggtgaacaaggaaggaaggcagtgatactcctaggagagtctccactttttccactaccgcagaaacagcactggctggcaacacagggaaagaatgaaccttgcatcagcctgggtggattgaatctcccctgcatactcaagagagccagcagattctgtgcttgagccttacatcacatagcccacttctcccttggagcacattaggtgtttttagtgctgtcctggtggttctggaccagagatcctgaaatagtaactgaaaaataataatagcatttgtaattgttcctatttattaaatacttcctatataccagatatagaactggaggctggagaagtattaactcgtggcataacaactttgtaaggtagttatcataatccccatttaaaccaggaacaaagtgaggctgagagaggttaaggaacttgcccaaggcaatccagctggcaagtggaagaagtgggatgcttacataagatagtccaggtttaagcagccatgctagtctctctgtcccatgcacagtgttctgacgggccagtgacaacctgaaaccagtcactggaacttgtagtggtacctgacatagtttttttctgtgccatcaaaatcctcctggataaatctttattgatcatacacactatatgtaaaatgcattaccggtagcagacggtccataacaataggaaaccgcaagcagggaaggatagctagcagaatcatgaatttgctctaaatccacttttctattccatatattgatcttttggggacttaagtaagtgtatttgaatttcagcctgttccaactaatacttttttaacgccagtctcgataataacatataaggtcacatttgagctaacaaatagttctccttcacaatagaaatctaaacagagccttatgtcaccactctgaatattcttttctgctgcagacatttgcagagtccctctttagtcattattcacacatacacatatatacattatatacacacatatatggtgtgaattcagattaacataacacaacgtgacaaaataaaaagcattttccattcctcagagagagttgctataggaatcaaattgcagcatatttcatgctaaaatgtaataatttaggcaacctgaagaattttgtcttttttaggtattgctttccatttggtcgacctgaaggtgctttgaaagctactctctcactcttggaaagggtaagaatgaaagtaaaagatagatcacatatatataaaaagacataagcataattgtaatgaaatgttttggttgaatgacctagttgtaatttttataggatttgtttaccattcatcaaatatcagaatagaagcgaggaaactgccaaaactcttgatattttatcttcaaactcccaaataggatatacagaagatatgttcctagcccttccctgactcatggacggcctttgccaatgctttgcaattctggtgctttctctttaagcatggctctcaatcttattaagtcacaaagaactgattttaaactttcacgcttctaagaagtatggatgagtgacacatttgcttgaaccttcttaataatccctctttttcctacttgaaggttttgatgaaagatattgttaccccagtgccacaagaggaggtaaaaacagttatccgtaaatgtctggaacaggctgcgttagtcaactattctcggctctcagagtatgccaaaatcgaaggtaaggctcccttctgcccccagttttgaatttaaattttgatatgcctccctggggaagtctttctcttttctcaagggcacctgaaaacagtggtccgtctgagtatattaagctgaaacctggaagcacctgaaatgtcgaagtttccttggctgtggccaagtaaatgaattaaaagacattacaggggctttgtaattacagttccctttgtaagggaacaatattgaaaacaggatgttatcagataactaaattccttctgagagtctgtgttggccctaagtatcggctctgtggctgatgttttcctatgaaggagttctgtagaattgcccccttctttaaacagaggaaaataaagcagtctgttgtccgctgctgatagcattggaagcaatacaagaactgaaaagagcaagatcaaggttttgctctttcttgcccccaaaagtaccttgtcttttggtagtgcttcaagctcgatggcaggttagtgctgagccatctgtgatggctccaagttggctttagatctcattcattcttgttactccagaccttaaatgcttgttaccactgccctctcaagttttagggaagtggtcactgatgacccagtaatcaccaaaggtgctttgagtaaactctacttgagaagatatggttctttgggacctattcatccacgaaggtattaatcacttttcattgttaccctgttggctgctatagggtgatttgaaagccacacccaacttgaccagtggtgtaagtgtataaatgtggaagttctgtgtgcaaaactcgatgtgtccgcattctggaatctgatgttctctcacacgtgaaacatgacacctgactaaaactagcaaatgcgcattgtctgcctcaagacaactggggggaaaagaaactaaccaatcactcagaccccatcacttactctgccaaaatccttgtttccttagagaattaggttaagattatgtcaaattcacagtgttctgtacattacgtgtcctccctctctcaattttgtctgtctgacaatgcaaattgtgtaccagtggtaatgaattcactgttatgcatccagggagaaacacttaagaattgggcaccaaaaggatgtttatcaactcttgacttggtaatgagtgacaaaaatagaggaacaagaggtcgttaaagggctatattagcaaataattgttccagcatttactgtcccaggacgtaatgattggttgtatttggtaaagtcagccaggtacctaacaattctaggcaagtccagagatgggatgggatcaagaaacgttctgttgccatggctgctgcctcataggtcttggtctagctattactactagtcttttggtaagatctgctctcttctttcagataaatctatccaaaaacaaactttaagatctgtaagtaaaaatgcattcatttccaaagtagatcagctggtctgtaatttccttttgtgcctcaattcttcttggttgtgttaattatcttttgcactgtgacttttaggtctggggattctttgaagaaaccaattcttttttttcaactctcttttcagagaagtacctcattccacactacctgctctcttccgcttctctccttccttgtccgtgattggctcagccactttaatgtgacctctgcaaaagtggctgagacaccaatttcaaagcatgctgggattgttaattcagacaacccaacatcctctggctgcatgtatcaggttttctttcatgaacatagtccaccataggctgagacattgcagcctgaaagatattactaccagacaactttcttttacaaggctctgatcctaccctcagagaagaaatctttcattttttacatttgagcccctctgtgagaattaacagctttgttatctgagaattctggaaagaagttgtagtaatattgctggagactatgtttatgaagaaatacctcaagagccttagatactaaagtcttaaatccttagtatcttggagccttaaatcaatgaaattttgtttccctttactcatgatgttttggtcattgtattcttgcaaacagctctaaagagacgtgtaaaatcatggtcacaatctctctcgtgactcacggcatgctgaatggttaatccagtagatctccaattttgaagctcctttttcttttatcctgtgtttatcccaaaatactctgtggctattttcctttgagctaatgtaacgttttcctctaacctatgacctttaacctctttacctctgacctaagcctcttgcatgcccaaatcctcttttatagggaaaaagagagaaatgtatgagcatcctgtcttctgcttggcctcccaagtgatggatttaaccattcgtgagtacctaccacctcctcaccatgctgtcttcactctttctgttttcattatttcaagaaaatccagatccaaaccaactcactctccttgcttcaagttttttagcattggcttgtctgttggttctgtctgtgaaacccagtgtgagaagtccagtcactttttatcagcctaaaacaggttagacaattaagccatttgtttgtgataaactcagatttgtctgtaagtttttcagttattctctgtctgtgacctgaatgcatttttactttgcttgtgtgtaaccctaatttgtaaagtgcttgtcactggtacacaatcaaaaggtagcagctaggctggggagcaatgcgttaggtgtcagataaaggatatttggggcaaaatcatgccttcttttccatgtttaagatgccaaactattatgggtatgagaccacaccaggtggtccattctctgtaaaaattagatcttatatgcctcctgtctgttctctatcaagctgggaagcttttccttgttccctctagagattttgacttgtccttgtcctctaaactttgcctagaacatatgacttaattgtcacttggagagttcatgtatgtttcatagcttgatttcacattaaacttaattttactaattttctatttgtgcagcattttccacctctgtgaaggagccttttttgctggcccccaaactttggggcggtgggaacccaagggcaaccttttctttccaatatcatgtatcacacataagtggggggcattttggtccacttgctcattaattctgcatatgtgttcttgtttctctctcttctctccttgttgtgctctctctttcaaatagagaatcaaaaggatgcaggtgaaccaattgtatatgcattataaattatcaggactgttgagttacattcagtttttgtttttgtttttcaatggctccttaaggtttgtactcccagagagccatgtggagttgcaataatacttaaggagttaatttgtgctgtctaaatacatctcatgcccatttgatgttgacctttatagagcagaatttctgaaaaggcataagctttaaaggaatagaattctggtttgctgcagagcttcatttcatccttggttataggattccagtgatttggcctcatgtgcattttttaaaaagttgtttaaccaaatgaatcttcctctttgtttttcatttcttttttctgttttctgccctattgagaagtttgtgttctttgatgaatgtttatcagccaagacagagagaagttgtatccatgttgttcttgtatgtatcgcatgataaagcaggaagcatggacaggatgaccgaacaggggctgttgctggaagttgtattagaggaaagctcttggaaagttctggcttcggaaattttcttcttgtttggtcccaaaacttctgatcttattttgaggagaagtctgacttaaaactttaataaattagaatagggatcatcatttttgtagtctaaagggttgtcaaaaataactatcagttaatccaaattaacagttgagcacatttcaaaacatttcagaaagcattcctgagcacattccaagcatagggctgcaataagtatttgaagactcataaacctgtgttcaagacacatgaacctttctctctggtagggaagatatttattcagtcatttattcactcattcattcatttattagacaaatggttagtgggagcctaccctgtagcaggtacagtgttaaaagccagagactatgtaaacaagagggaaacggctattagcctcatggagtatacatgcaaatgggtctatatatgtaaatcactatattgcaaggcctattggtagagttatgtgtaaaagggatggggcattgtcagaaaaccatggaagtcttcacgagatggtaaggattgaactgcatcttgagagatgaattagaataagcaaaggggagctaggattgggaatggaaagtcatcctacatcaagagaataatatgtgcaaatatgtaaagccagatagctaataaaaaataatgaatgcttatttaatgcatatcatgttccaggtatgattctaagcatattattaacttatttctcctcaaaatcccttataagagggaactattattattcccatagtagagatgagcaaacggaggcacagaacttaaaaaaacacacatccagaagtataagtggtatagctggagtcagcccaggcagaagccacacttttaactactctgtaattaattcaacgtagctgcaaaacagagtgaaatgatagtagtggatgggtgctgatgatggcaaggtaggcagggacaggacttcaaaggtctttctatgccataataatgctgagttcagactatatctcatggttcaaaatttcttaacttgaaaatcatgccaaccttggcatgcatatggattttttcagaagaaagattccacaggtctcaactgcaaaggtgatgaagagtcattgaaggctgtttatgcaaagggatgggttggcggtttacactgcagaaaaatcacgctagcaggaattaagagaaaggactgaagagagggaatagggtagaactggacttaaaagttgaggttaaagcagagatgggtttgaagcttggtatagtgaagctttttctaagtatatcaggtctcaattgcaatcttaatcataattacttctttcctggcctttaaatgttttttctttcttaccccttccctcccttttcaattttcttaatgagaatagagcacaaattcatggataggtctacataaccaactgtatggaggtggtagggcaccaccggagttacaggtgcaaattgtagggaagtgggtagaatactggggactgaaatatggacagctgctgagtcctttagtcagactatgctttaagaatctacagggctatgcagatggcattttggtggacttatgctttatgtttggtggcattattagaaattaaatgttcaatttaattacagtacctccaaaaaaagatgcaaaagcctgctagtctatgaaagaaaagctgtgactcctgcaaatgaattctattattttaaatacatttccatgtaaaccgtcacacattctgaacccagcaagctctgagaaagtctacactactattgctgttttgcctcagttcttggctaaatacttgcataattttctgagcatcataacgattccactggaatttgaaataaaacaactttttcctccaaatatggcaaggatttgcaaaatcagacagatgatgatttgtagacagacagcagatagatatagacagaaataattaggtaggcaggcagatagatagatagatagatagatagatagatagatgcagaaataggtaggtgggaggaaaggagaggagagaggagaggaaaggagaggagagtaggtagataggtgggtgggtggatggatgaatgatgggtaggtggggagagaaagagagaagagagcagccacctatgaacctatgggccttggccctgtgctaagggcttctgattcaatcttaaccttagactcataaagaagtctttatttttgcaccctttacagatgaaggagctgtgattcagtgaggataagtaactttctgaagcaggatttgaactcaggtctgtctaaatttaaataccatgcatttttgtctctttctaccatgtagactttttgcctgatgtggtgagcacttagacaatatccattcattcagtggataaggtcaagtataatacctaccactttttacataggaagactacaaattaacagagcagtcctttctggaactggatcattgacaaaatctttacattgtaaattcttcccgagggcagttgagattccccaaggttgtccaagaactgaggacttttcttctctccaattgacagaaaccttctagatcaggtcaaatctatccaaaggacttccaggaagattgtgtgatgttgaggttttgtatctttctctgtctccaggcaaatttcctacagatctaaggcttgttgaaagagagaaagagaaccaagctggcaaaactcaccaacacatagagccaagccaccaccccactgtcttccacaagggaccaataatagtgaatctcatccccacaggatggccattctgagatgaggaccatctcatgcttcatgtcttatacatgagggactaagtggttctcttttatttctttctttctttctttcttttttttttttttttgagacagagtcttgctttagagtacagtgataggatcctggctcaccacaacatctacttcctgggttcaaacaatacttttgtctcagcatccgaagtggctgggactacaggcacacaccaccatgcccagctaattttttgtatttttagtagagatggggttttaccatgttggccaggttggtcttgaactcctggcctcaagtgatccacccacctcggcctcctaaagtgctgagattacaggcatgagccaccacacccagcctttccatcctttttgtttcagtggtgcataaatcagggtttccaagcccagattattctgtggactagcacctcatctatactttaccataagtggggaggacaaagagaaacatgttttaaacactgtcaccaagaaagattttgggaaaaaaaaggatgtgttaaaatatgctgtgaacccacaaatatgaaaccagtgtctctctcttctatcagaaaaaaagatgtgatgctgcagattatgataaaaattgttgtttattgagaatttagtatgtgctaagtagttatacatatctcatttaattctcaccatgaccctgtgagataagtgttttattaccatatttcattgaatctaaagggccatcaattataagctgcgccattcatatactgtattgtgacatgctatcaaacataagatgcatccggatttcagaaatgttacgatgtgcctcttacttcaatgaaataagaacttatgcattcatgcatggaaatcctgaagtagaaacatgttaagtcactcccccaaggttaaacatctggttagttgtagagtcaaaatttgaacatgaccctgtttaattccaaagtccccattttcaacttctacactataaagtgcttgtgatttgttagcaatgaaactgtataacacaaaagaggtttcttggtcattgacagctagaaaaatcaaggcctggagaaaagaagccaggttcaaaaaaaatgagtagtcagtgactctccagtctcttgtcctatgtgctattcaagagccatcaccaccccaccaggctgccttacctttcagccaagatataacggccctatccacaatccattaactggtctgagcttccagtaggacatttgatgacatctagcatccacatgttagagtcatatacgtgcagctctaagaaaacactacctcaagcccagcctgagcactcaatgatttgttataccccaaattcaaatccttatcttgcctccactgggctttctaacctctgtaacctcacttttattttctataaaaggtgctaataatggttcctcccccagagaattattgcaaagattaaaatacatattctaaataaatcggttagcacaaatgcctggcacatagtaagtgctcattatatatattaatttattatttgtttgaaagtatttaaaaggatgttcttccaagttgaaatgtatagtataatgatatcatttgatttcagaaatgaatcataaaacagtgcttcttcaactttaatgtccatctgaatcactggggatcttgttgaaatgtaggttctgattcagcaggtctggggtggagcctgggaatatgcattcttaacaagcttccaggtgatgctgaagctgctgatccagggatggtactttgagagccaagggaatataagaggtattcaaattgtcttttattataaatttcaaatacaacattgcaatctccatatatatttgttaaatatccactaggttccaggagctatgccagacaccaggggagtgtgtgatgagcaaaagcagtcatgctccctacccttgttgagcttaccaaaaaaaaaaagaaaacagagacatgaaacaagcaatcacaatctgatgatgatagtaaagggaacaagcaaggtgtcacaggagtgcagcacaagggaattttacccaggccagggtctttgatgaattgcagagcaggggatagtgccagagaagggcatgatgtaggtcaaagactggacccctaagaagaactgactggggtgttccctagccttgtttcagtgtttgcctctattcatcatccctccagatgctccaagctcccgcccaagacagcttgtggcaatgtacataaaagtttatttggggactaagtgggtacttagtagtactactgaatcagagaaaaaaaagaactcaaatagcctaagcaagaaaagagaattttttggttcatgtagctaggaaatccatgaaggagttggtctcagaaatgaaaaatgttcatgtgttttcatatctccagctgctgacaggcttctttaatgtgactggagctaatggttgaagtttgggaagcaatatggccacaaatagcaccagccttttatcctagctaatgactctagaagaaaaagagcattcctctccaagcaactgtatacaattccagagaagggccacagtggcccagcttgggtcacatgctaaccccagagccagtcatagtacccatgatggtatgaggtactatggttggccaggtgtagctcatgtggcttcccctgaaggatactttccttggaagtcccaccaaaataacatggagtagagaaggtaactcccctaagcaaggttcttgcacatacaaggacagatttccaacacaatgtccatgcagaattaagctcacttttcttatatgcaacagctcagcccgaggaacaaagcctgagttggcatacaataccaaattagagaagaaaaaccattacaagagtgttatatttctttctttaatttaaattaatttgtattaagttaaataaaattatttttaattgtcttaaatagtttttgtttttgttttttgagacggagtcttgctctgtcacccaggctggagtgcagtggggtgatctcggctcactgcaacctccgcctcccgggtccaagagattctcctgcctcagcctcctgagtagctgggaatacaggtgcacaccaccatgcccagctaacttttgtatttttaatagagacgaggtttcaccatgttggccaggatggtctggaactcctgacctcgtgatcctcctgcctcagcctcccaaagtgccgggattacaggtgtgagccaccgcgcacagctgtcttaaatagtatttaattgcattaagaaacctgatgttattctctggcttggaagtttaagttatgatgtttactattcagaattcagcctagtacatttgttaagtaaccagagactttggataagagataagaattcctgtgtagtttgtatgtatactgaaaacacagagcattttatttttcatgaaagcactgcattggacaggatccactgagaattcccttctaccaatatttgatgacctaccctggccccagcactgctctaagccctagaaatacagaattccctggcagacagggagatagacaaatgtatataatttcctattatccagggccagaagtgctcaagtagaagcatcgacagaggagctgaagctttgctatgatggcactctcttgttatggcatatgaaggcataacccttgtcatgaagggaagctctcaaaggtttttaagcaggagcatgacaagttcagatgtgtgcttaacagagatcactctgactgctgcatggcagagaatgaactgcagaagagaaaagggactgaaggctgccttggaggctttagcaacagttgaggtggaaatgatgagacctgagtcatatgcccaccccctcggcaagagtgtggataagcacgtgatctagtacggtgtgagataagagacattttggaggtagactggacaagctataccacctaagtccttacagggaaaagacaacgatggctccaatgaaaagcatgggaaaaatccatgatccatccaacagcctgtattaacacatactttagactgacctagagctggaaccttttgaaagggagtggatattggagaatcaaggggatcaagtatacataacagacagtcccactaaataaattgtattagatttcaaccttgcatgtttttggcctatgtagccatcattttagggaagctgggtattcaggatagtatgatgtggctatctgctaagctttctgttgctacttgagcttttatctacccccacccccagatcatagcaaattgctacaggctagttattttctgtaattgcataatacaaatactagcatcttcagcaacacatcaataggctggaacttggtaataagtgagtttccatcaatcatattcatctctcatatgatatttcagggactggcaattcactagctagagccagagttggtcaggttatttaagggctaattggagtgtctcttgctcctggatgcatctcttccttggcttagataagcctgctgcggaattctctttttgtttttctgcagtcacatttaactctctctctggaagccaagcagatttaattgtgtaaacatgagcaatggtaattgggtaaatgaagttggaaaccaaggtatgatgtttttgttttgctctttgaggaaaaaaaaatagggagcttgtttttctatggtggcaaacctcactgtcagaattctggacagacagttggcaggaggaaatccctttatgaatttctcatcaagacccatttagctgaaatatgtatctgctgcctcatgggtgacagatcaacccagaggcgccttattgttttattcaccaccagatcaagtctttctctacccaggttcagttaactgggtgagaatgagtcaggaatttctgtgagaactgcacatgcaggtaacatgcattcactgaaagagccatgaggatggattaccagaaatgctcttaactttaggcagtgctgtcagtggaaaaccagattttaacaaaatatacaatatggagtactattttttatgatgaaaggattagtagttgcctccttttaaatggttatcatttaaaactgagtcttccaaattctatttacacacatttttttcccaaacaatttcaataagaggaaactgttaatttttttgtcctgtattctaaacactgaaatggtccagcaagaagaggatctcatgcttttaatagatgatttttgccagaatattatattttatccatatttttcaatcttttttattaatgtcactagaattccatttcctacatgcctgcagtaaaattcattttcccagttgaaaattcaagcaaaccaagaaggaaacttggcaatggagtatgtccctctcaccatacagattgctttataaaccagaactattagaaaggagcaggtccaaggttaatgagacactcattaaagagagagaattgcagaagctgatagtgctctgtgcctgtactgaaggagaggctattgttataggatgtttgctgtgctgatattgtaaaccacatgacagatgggtcaagtgctgattacagtattctaacatttggaatagcaagtaacatatttgataagctggcaagtttttatatatgattcaacccacaatataaaagccacgagaattccaaattgaaaataattaaatgagctggaaacaatcagataccacacattttcccccaaaatgacagattttgacatgttgaaattccacaaagggagcaagaatatttcctagctcacttgaactaataacggcccttcatctgcttttgcaaagcaattaattgcagccttctcacaatgtggaggtagcaataaacatgtgtaggcatcttgagctttacagagatcagtcccatagattgctttctttgctcttatcagcagccctgtaacatatacaagaaaagatactctcaatttatagatgaggaaactaaagcacagagaggttcaagtagcagatgcaaggttacgtagaaagtaagtaacatatgggggatgacaagccagatcttccaactattaatatatcaagtcctatttctggtcatctgtaaaaaagaagcagctattaatgtataggtgttcttcattgtacgaagtgtatctttttttggtcagtgctgctgctgccatcattcatgtgtatccatctggataaagcatctggtatttgcattcagcctctgagtgtctcggtggtggtggtgggtgggggttgctggtgacactggtaagagtccttgtcaaacaatgtcacacctctgtagtgttgaagaattgccaagaaagcagcagctctccatttgtgttttatcatttttgcttatttggttgttcttttcagagtttgtcatcttacttgtcaccctttgttaaagtcactttgtctttacttttttactgtctctcttcacctacccaagcagctcccctgccacatcctgggcctcctcctccacccacccaaacacagaccagcatgttatatcagaggctcaaaggcatgcctaggccaaaatcaagtaccgtaaactttcatcattcctctacttggcagctttctagtttagtttgcttttctgttcacctttcttcttgaaattttgtttcagtttggaacactaagctgagactcgggctctcaagtataattttataggttttgagatactcaaaagagagcatttatttccaaatgtccacatattttttgtctagctatgtctgacatatgcaacattttcaaatctcaatgtcagcacaaaataacattgttgttgcgtaacattttgcatgacaattttttctgtgttatgagcttcaattctattgtatgaaatggttcttaagtatactatatttttagttccattttatcagtgctccagctagcgcaagcttgggggataggaatattgtaattcatctgaagacagcgttaagtggccaaaaaaaaaaaaaatcacttctaagcacaaatttctccttgacctctgttggggagagggaagaagtgctaaaggattttgcacaatattttctttaaagacaacatcttagggaatttacttttagttccattttgccatttagctagtagtacagcagctatgcaaacaaacaggaaaatagtgcagtgtctcactaatgtggcttgatctacagatgatggaatcacagctaattaatagtaaatgaaagactggctacatgggttaattggcagatcaagtgttctagattaaaggatccttaacctgcttactttaatggttttatgttcaagtaaaattgcaaagggttttattaaacatactgtctgtatatatacatcaggcatacacatatctgcgtacatgtgcacacactcatagaatggctgcatgcacatgcacaatttatgtgtatctattgatatctattgtagtcaatctaagagtactgcctattaaaacaaatcttcaggtggtcctagcttcaacatcttggatttttccaaacataaaaattattgacttttttttaaaaagtgcataaaaatattggtatgaattatttatttatcctatgtcataaacagccagaattcccctagatttggggagtgtttcacccaaaaggacaaagctctctatttttaaagcaagagatttcaaagatgtgccccaagtgggatttcctgaagatttgtattaatgtgcaggcttgtctgttactagaaaatgtatgtaagtgtgtgatgtgtgtatgtgggtgtatgtgtcgaatgggtaataagcataggatgaggaatttgcaaattgatgtgtaaatgtgaatatcaacgaacaaaaaatagtagcctgtgcatatttactatcaaaatgcaaatacctcactctacacatattacccaaaaatatatacacagtatgtttgtagaaatgcctgaaagtctacgaatgaaattatgatagtctatttatcaaattactaacaggtcagatgccccaaaagcacagaagtcaatcttgtcatacactctttctctaaatatatgttgctctagaccaggcaatgggctctcagcacctaagctcccacatctacttattctgagtgttggttgttctctgcctaatccacatgtttatgtttcccacagccccaccttcaggctctaaccagatccagccacatttccatctgggtttggcagagataatggagctttccattgacttgaatccaggaagcccattttcacactagccctcaggccctgttagactgagactttcaacacctggctagtcttaccctgtcccactaatcaccttacatcccatttgctagaacactcttcttgcatagtgtctcgctgaatttatttttcattattaaatcctaaattactaatgacctgatatgttcattacgtaagaaatgcataaaagaatattaagaacctttttttttgtaaattagcaatctcttatgattttaagtctgcctacttcctcccacccactgctgcctgccagaaaccttcctatttagtaataggtaattctttctagcaagaaacatcctgaagccaaaatatacctgtttcagatgaagagatgaaaagaaattttgccagttcttttgcaaatgtatgtacctacttggggaattctactaaatgatgtttatttcactatatcccatgtgctctgactctgagacttcaaggtttgaagggggctaaacatgaaatacaagttcccctggaattcagactggttgaatccaagcagtttcactggccaagaaaacctttatgttttggccgggcacagtggttcacgcctgtaatgccagcactttggaaggctgaggcgggcggatctcctgaggtaaggagtttgagaccatcctggccagcaaggtgaaactctgtctctactaaaaatacaaaaatcagcccggcgtggtggcgggtgcctgtaatcccagctactcaggaggctgaggcaggaggatcacttgaacccaggaggcagaggttgcagtgagctgagatcgcaccactgccctccagcctgggcaacagaataaatgagactccgtctccaaaaaaaacaagaaaaagaaaagaaagaaagaaaacctcctttatgttttaaatattactgttttcccaaaggaaaaaagtttgtaatttttggaacataatgacattgtcaaactcatgaactcagctctaaaaagaaggcaacataagccagggttcagattcttcttgagctgggtaaaaatacaacactttcagtttaagagaaactaaaaacaaagaaaacaattaagtacattgtttcagtttaactgataaaatttcaattgtaacaaccagtagcacaaactatcacaacccattcaataatctactcctaacacccttttaagaattattattcctgactaatggcccaggcatatccaatttttcttttctatctcctccctggacaacttgaagcagacatttgaatctgcattttcaaaatgagcgttccaacatacgcgagcctgcaatgaaaaattacgctgtagcatttaataactaatctaaaaaacaaatgtaacagcaatcaatattaaacttctgttaatcttcccacttcaggtagcataattacaatctagagagtggtatagtacatttatgctgtctttaaagaacatgtgtacaaaatgtcactaaatttgatatgggctgtcatagacttaatatagcttcatatgcaaatttgaagctggagcactgcttttttctaatatatattataataatggtgataataataaaatggctttatggtttgctcactactaattacatggcacttaacatttgcatgaattttttttaaaaaactgataactattctcaatttcttatccactagttctaatggccataaaagtagcctgccactttcgctgaattttaacacaaactcttgtactacagaaaatgtaggccggttaatcactcctgccaaaaagcttgaagatacaatacgtcttgctgaactagtcattgaagttcttcagcaaaatgaggagcaccacgcagaggtgagcaggcttggtgggaagtgtatcttactgtcccttagctgagcttgcagagctgattttcccagccagattgtgaataagatgccttaacacccattttcttttaactgggattgcaaagggaatgaaagtggaagttttgcaagaagtctttggaaggttattttaaccaaccaaaaagtggttgcatgttgtatgtttcggcctaagttttcagatgtttctagcgatgaacaaatgaggtgagtgctttttaaagttaatcattcaagcagcatctggttaccattgtccagaacacaaaatattttttggttttttgtggttgtttttgttgccaccactgttgtttttattagttatttggtatgagaaccacagaccttctttctcaatttatctcggtaacttactctgcttgtactacagtcttcattttttttttcatcttagattgcctgggttgttaaacacagtgacagaagcaaattattctgtgtcgttcaacttgtcgattctccaacatacatctaaataaatatagcttactttttttaagaaaccactgtcaaaatgatccttttgataataattataaaccaagggatttcaaggctaactaaatcccaaacctataaggacttaaacaacctaacacttccaaaaaaattccaaaatttcatgatggttaaatggttatatcaatgctcatctcaaaagtgagatttaaaatcatctctcttaaaataatctttttgaaaattgcataattctccccctttctctacattcagatttacagcaaaggggaaaaatgacatttcctaaaagtaatttctcaagtacctaaaatggtcattccatgactaaatggaaattgccagtatagttaaataatatataatacgccataaatccagccgtcccgactaatgcctgattgcatatttaaatttcctccctgtttttctactattttattcaatcttggctgatcatggcaggggaaagaggtatgtgactaaaccgaatgaaccagccacctgctgtcatactttgtgcatgcccttccagtaccatgtcttctaatgggacttttcctggtgctcctgctttctaacactgacccaaggaatgtaacagcaacttccagtggactgcttgtggaatgggtgaccctccacggcagggtcaatgtgggtgattctcttgtgcgtgcatgaagcaattgatatacttaacaacgactgcagttacatcccaacacaacgcctcctacctgccttgattctgtccttagcctggtgtagtttcctatgtctgtctgtacttacctttattacagcagatgagtatcaaacttagtaaccagtagctcaccggagtgatactaatcttcctcaacaaccgtctctatgtgaatcatatatacagtatttatatatagagagagtactgaagaatttttttccctgaaaacccttaaagaatgggggtaagaccccttgaggcaggtagaactaattcatgcagcatctatccgcaacgcacagccatgagtgatagggaaaagcaaatcgataacctccaaacatgtaaacaattaagtgggttagaatatttttcctacgctatcctataggatgttcttttcagattgcaggcatctggggttccggcgatggtaagtgtgttcttcccacgtgtctacaaagtcatctccagaggcatggaggggctccagcctgccctcctctgatctgagtggttgaggctcttcccatgatgctgggccaaacccacacattcttgaagacataaatacaaagagcacagttttctcagtcacaattgtgcttttaagtgaatcagaggagaagaaaaatgacagatatacttgatttataatcaagttatttttggaggctgctacgggctaagaaaggatgtatatttttctaaattgctcaaaagaaacaccaaaggagggcttatatgctaaacaaggcacgtttcacttttccaaaaagccctttctcgctgtgttaatccttatcctaaactgccctaataaccatcatcacaaaatattttaatcttgtatattcaaaagccattcaaattaaatagagtagacatcaactcaattcccattaccaactttaaaacttagtaatgaaaacttcagcatactttgaagtgcctgagaccaaattttcttttagataaatgtacaggattctttccaaaattaaaaattttacccaatcacaaaatcttctccatcaatcaaaagctacctattgagcgtcttccatcttctgagcactgaggcaactaccttggtgctttttgaaagacaactaggcataggacagcctgtccttcaagcaatagaacgcagggtgtccaggagtttaggctctgtgccagagaagtttggctttgaatcctagctttgcctcttctcttccagtataacttctctcatcctgtaaagtggagataacaatagatggtcattgttagagtggaaggccacattcattaaagcatctggtgttatgcctggcacaaagtgagcactccacaaagcttggctcttttgttatgaggaacaaattgctaaggaaacaaaatataagaatatctgattatcaaagtgacaaaacctgtgtggaaagtaccaaatgaacagaataaacagaacgtgttgagagcagattcatttcaaggtacagtgggccagaaaggcactaccacctgttctcaacttttacttacagattgcaatcacgtggacagctcttgaaaattcagatctccaggtcttgtcccagctcaatttattgaaatcttccagggaggtgctgagcatgggtaatttttaaaagctgcccaggtgattccagtgtacaaccagggtcaagactggctggagtacagtggaagaggtagccttactgctggcacactaaacatagggtttttcttccccaaaagaaaaagtaagacaattatgttctactgatcagtactcactaccatgttctctgggtgctcagtatattaaaaaaaaaaaaaagaaaagaaaagaaaaacaaaagactaaatcctaagcttggatcttggctgtgtggccatgctgtttggtggtaccactcaaatcaaagtgactagtaggcttgcctcctccacctaaaataaaaacaataatccttaaaggcattttaaattccaagataaagtaattaaatgtcccaagaaaagaaatctcaccagctaagagtacatcatatgcacacacatgcggtatatggtagcagtggtcacagttatctcttaattgcagctaaactctgtttccagagtctaatctattcacaaacatacacacacgaattatgccttcatgtatggttgctacaccttcccaatctctctctatgtatacgtatgtatatgtatatatgtattgtggtatatagaggagtacatatatacatgttagtttgtgtgcaaaatatacagtgtgtttgatgtagactgtacccctaaagcacacatctttgtctttgaataacgaaaagctctgggtaagtatttagtagccgaagtataactccttattctccttattgtctttggaaaaggtttataagactttagatgcccatgaacattgtgagttagctcaagtacaaaaatagcattcacctgtatgagcaagcataaaataaatatttttaaagcctggcctttcccaacccggtcacacagattctgttcatttaattggaattacacttttgctttctggttgttactgcccttgctagaatcattttgttcttcttggagagtcaggtttgattataaggttttgaaaagaattcccttgaatgtacaaaaatagctctggtcctcacttactctacagtccccaaatttaaattctcttggttcactagatccctaaactgttctaccagactccaatagcaatgattcatgccacagtagtcatcgttctttgcagggctattaatatctaaatgattattaatgcaaggatggtaaatatttgctcaataatatattaaattacaatgagggatgaagttctctatagatcgtagaagtggcacttcttatgacctctggtttgcaacttttaagctaaaaagctggtaagaggccaggtgtggtggctcatgcctgtaatcccagcactttgggaggccgaggcaggtggaccagctgaggccaggagtttgagaccagcctggccaacatgatgcaaccccgtctctactgaaaatacaaaaacaaacaaacaacaaaaaaaaattagccaggtatggtggcaggcgcctgtaattccagctagtcaggaggctgaggcaggggctgcagtgagccaagatcgcaccattgcactccagcctgggtaacaagagcaaaactccgtccaaaaaaaaaaaaaaaattgctggtaagagccaggtatgaggttgggttaataaacttttaattgcaaacatttgagcttggtttttttgttttgttttgttttgttttttcctgtcattctagggcaaattatatctggggaggcaactcagtcttcccaataacttttcttggactcatcctgaagatgtaaagttagttgaataactaaagaataagtactagccaacatttagtgtacctttgtgaatttttcaaatgtctggaatcaggattgatgagagtcagccttccacacaggggtggagatggaacttcatccagcaagttccagggtttagatggtctctgcctaaaaggctggtgtctgggaaagttctgggggtggcatggagggtttctctatctactggacttagctaggtagtcagtggagtaagccctaaaccccagggctctcatctgcaggtggtgaaactacaataaaacctcatcggttcagacccaaatattggaatctgtgaaaattcaattgcagatgtgactctttctcttatgtaatatatttaacttgatctcaactttctcaggaaattctaaagactcttcttacaagttagaggaatccaatacccttttttccatcctaggatctatgaaattaaatctactgtttctttgacttcaatttataagtcatcttatctataattattacatgcttaaaaaacgtttacacttatgttgcattaataactaatgtaaacttaatgaatactttttactttagtgtccaattataggctacattcaaaaacagtaaaaggatacctctttttagaaagtccaataagttaggcttttttttgctgacaggccagcatctcccctctcccattaatctgaatcagtgaggttttactgtaaattaaaatggaaacagcaggtgtctatttccagccaagccaaccttgcagaatggtccatgacttgatttttttcatttaatttgcaaaccagccacatgttgataaaggagaagtaagtaaagtgaaatctcgtgaaagaagagaggtggacccctattctgcctcctagtggctgttagaatatccctctaataactaatagatcacagaagagcttggccattgaacaaaccctttcatttatggaatttttccataatcatctttcatattttcaaatgccttcccatctttttttggtgaatgctccggaaagtgtttccaatgtaaatactttgcggcattgaatggggatgtgggggaccagaagaggctggcaatttgtttttgtttttctgctctctttgaaatcggcaaaacagggcctgttgacactgccactcattctgcatgctccctgccagaaatgattagtcaacatgcatgcatgcctttgaattgaattcacatctggcccagtctgatgtgaatgtcaccccctgagaccctgcacaatgatttccaagggcccatgtgcatgaaaatgagttacttcactgatattttttggttttcaatgtacatatgtgtccaacccccagaaaagtaactcctgatcttactcagtgttttctagcctaagcctgatctttcctccagactggatacaaaaccaaagcctccttgcttaaaaagattacaactcaaaagttttgtgacaattgcaacaatggttttctttgacttagtatgaaataggagtaacatttccaatgtgtagggaaacatgagttcttgagtttttgtatgagaccatagacaagccccagatatgtagatataagtgaacaataattacaaattttcaagttagaccagcagaaaacccataaacacagtgaagaaactcccagattttaataccttagagcaagaactagccaacaacaatgacaaagagcatgactcaaaatgtactgagttattgtaaattgaacagaagttccacgtctgtcatttctactgcagcatcctctgacccataggtcagaataaaggctctctatggcaggcctggaataacgcaaagcactgccttaaacacttaacaccccaattgtatcaaaaattctgttctctttacaataaaattaccaaaccctgctggatgcaccattaattttgaacagtgagggctggaattcacgtcttatgtccgagaaagaagctcatcacttctttgtctattgtttttctgccaaattttaaaggcctttgcgtggtggtcagatttaatggtggagcatgcggagacgttcctgtcactctttgcagtagacatggatgcagccttagaggtgcaacctccagacacatgggacagttttccactatttcagctgctgaatgattttctccgtactgactgtatgtattacctttgactgtttgactttcctaagtagtgtgcagataaacagatcactaagatgtctttatcccaagcagactacaggcttgacatagctcttcatggttttattatgattaaccccaccccccaaaaagaaacatacagctgaagggtattccctttcttccaaaaagtatcctgttctagggacgctctctcttaactagacagaataacctgagagtaatgtgagaagaggtatccattttttgtgtgtttgattgtctctcaaattaattaacctcttcatattttgcaatttttatcaaaagatgctttctagatgaaaaaaaaatttccagctgactaacatgtcaagcatttcagagtatgttatagtgacaacagccataaaatagaccttcctccccagggagggtgatgaaggagggcagagtatgaagaatgttctttcttcctaggaacttaatgggaagaagggaagtgggtgcaagaaaaacagaaaaaaaaatagtgtggattgttgtttctgttgtttcttaaagtagcatgatcgtttttccttttagaagatcaataccaaggggtaaagtgtttttgaattccatttcaatgctttttatgtacttttttccttctcttctctttttggcttccttagaagcagtatatttaatgtagaagacaatcaatcatctgtgtgtgtgtgtgtgtgtgtgtgtgtttgtgtgtgtgtgtgtgtgtgttgtacgttgataaagtagctgtgggttcttaacaagcttttgcttatctgttctagataatttgtgcaatggaaaatttcacaaacacctgcaagacctgtttgccccacttgttgttagatatgtggatctgatggagtcctcaattgcacaatccattcacaggggctttgagcgggagtcatgggaaccagtcaagtaaggaaaccttttttgataccatcggagtttgggtacaaatggctggagagtaatacagaaatggattaatgatgtcatatgggtttcactgttattgtggacagagagaaacaccatacatttcttctactatgatgctcatagcttctttgcccaaatggcaggagggtcggggatggaggaggtgggtagggtaggggaagaggctgaaaaaacgtttcatgaaatgaaatctcttattgcacaagataaataaggaagaaggaatataaactcggctgtgatatttgtgtggtatgtcttactccaatggtgttatctctaggattcagtgtttcccaaagtgtgttcggtggggttctaggcagggaggtcagcaaactttttctataaaaggccatatactatatacttaggcttttggagccacataatctctgtcacaactcaactctgtcattgtagcatgaaagcagtcatagacagtatgtaaatgaacgagtgtagctgtgttccaatgaaactttgttaacaaaacaggtccatagtttgccattgcctggtctaggccttttagatgcacctttttaaaaaaaacctttatggccaagtatgtttaggaaacaatacctaccccactgacctagaattttgtgtaactctgtttaacccggattttcctaaatgtatttgacaaccgtgtgctttttttaaaatgggacatataccctgcaggataaattatgggaaatcttgtgggttgcaagtttgtcaatttccacaaatgtttggcaaattttaggtcttatttgaaaatgtttggcaggcttggtgccatctccattccccaaatgggaagagggcttgacttgaggctccagagggtcagtctcagactcccctttctgaaaaaatagagactcctatatggagagtttgatggttatggtttgatggtttgaaaagctccagtaaagcctactgctggatttgccttgttagtttctttctttctttctttctttctttttttaaggaaatcatttcgttcatgctagtattttacatctttgggatgcagcaaacagtatggagcaaagtagagggatgttacaagcacattttaggaactccagaacaaatattcatgaggcctttcctcagtttggaagccttgacttgcagcctatttttaagcagttttctgaactgagaccctcctctaatgttatactgtataaggctctcactgataaattaatgcaaaataggcttttctgccccccttccacatctgagccacaagaggagtttccctattgcagggaggttaataaccagtagctcctcctttgcaaataccaagaaatttaaattttagtttgttattctccagtttataacagtctcttaatatggccctactgacttttcactcatgagggtagaactggatcccttgatggtaaattattgagagcctctattttttttcaatgttcaatacaatgaagacagttgtgctggagaatagctattaagaggaaaaggttaaaatgagtaatatttacgttttaaaataacaatggtcttgaaataacatttacttacttgcacttaaatacggagactactactaccaacacacatggaagagaataattggtatccttcactattccttgaagagccctagatttagtgcccatttactagccagaagtcaagggttcaaacctctatgaacttgtttgctcccctgcaaaactgaagttttaaaaatgtgcctgtccagtgtctgagaattgtcatggaacttcgtgataatgtcactaagtcattttataatctgttaaatttcttaaaagtcaaacacggccgggtgcggcggctcacgccagtaatcccagcactttgggaggccgaggcgggtggatcacaaggtcaggggatcgagaacatcctggctaacacggtgaaaccccgtctctactaaaaatacaaaaaattagctgggcgtggtggtgggcacctgtagtcccagctactcgggaggctgaggcaggagaatggtgtgaacccaggaggtggagcttgcagtgagccgagatcgctccactgcactccagcctgggtgacagaccgagatgccgtctcaaaaaaaaaaataataaaagtttaacacatgactgctacttctttgggggcattaaatattcttaataccatcagaaataaagatagactcaaaaatcatcttcatacctggaaatcttagtctagggatgttttcttgggaatatttttaccaattaaaaaaaaatttgaactcttgcatgggcaatttaaaggtctgcaaattgtgaataaaggaataatagttgcgaataataacctgagaattatgcagatacgtgtgtgttttttagtagctttttgctatctaaaattatgctgttagtgaatatgattgtggtttgttcaattcatactaaatagtatatgcctttcagagtctgtggagatctttaaaagtgccaactaagggctgggtgtggttgttcacacttgtaatcccaacactttggggggccaaggcgagaggatcacctgaggccaggagttcaagaccagtctgggcaacataaccagactccatctctacaaaataaaaaaagtagccaggcatggtggcacagcatgtagtccaaactactcaggaggctgaggtgggaggattgcttgagcccaggagttcaaggttacagtgagccatgatcctgccactgtactccagcctggggtgacagagtgagtccctattaaaaaataataataataaataaataaataaataaataaataataaaaacagtgctaactaaaatacaagctaccacacacactgtatcagccgatttttaaacagagtgtggatgccacggggcagctttgcagaatggaataaaatggagtgtaaaaaagagcttggagacatgttatgtgctaagaggagtgactctctccatgtttcctacaacgtgaatagaaataaagtgtgaacttccatctgactacttattggtgggttgatgaagaagcagattcatttctcttcttagattttttttccaagtgaagaatgatctttttggcatacttctcatcaagctcaccccaaaacaagaaactaacttaggtaaatagatttagtttgctcagtcttttccatttttgccacagaatcttccaatacatacatacacacacacagcctttctttcaaacaattgttatcctcaagtagttctgttcttcttcttttcaaaatttataagcacctcgttataagtaaaatgagaaatgcattgtaatgaaatgcaatgtaatgttcaaaataattagcatgcaaaatgctgaagaaaaatagcaatctgacaagaaaatgctaccaatgtattgagtttgctaaaaagagaatgaaaaatatcctttattcttcagattttcttatttcaaaatatggccctgtaaaagaaaatagatatcatcatttaggcttgatacaattaaggttatttaagatgaacaacaaaaacaacaacaacaaaaataattgaagttatttgacggaaagggtaaaatggctgagtcctatggcagcctttccctagaaagacagtcttccatctcttcgaaaagagaaaagggaagctacatctctgtttccgttaagccagacacagtcatggttagaatctctatgaattggtggacaatgtcatctctttgcttctaaccatagctaaagatagtcagcttctcaaagacagtcccaagttgtcaataaaatctggagcccatggccctctcatgggtttccatcaggacatgtagtagggtcaccactcacagttgggcaggttgcccacaatccttctggcagctgtgaatatgaggttttggtcctaacaagaaatggacaacatttccatcagctcttcagtgttagctcattggtaataagccatggtggccttcaatatgaaagaaaacctagaaaacaactcattcaaagtcttaccaagtctagtagctccaccacccttgcctactaccttttccctgacagatggtcactcaatctttacttaaacacctccaggcatggggaatccttggctgcatggttgcccacttcaagttaggactgttctgaggcaagagccagaacttaactctggaggtggggttcagaaaccagaccaaattgggaactagctaaaacaaggatggggcaaaagtggctttccataagacattcccaccagtgtgccctgtcagtttaccattgccatggagttaccactcatttccatgtcaatgacctgatgacccagatgttactaccctttgcctagaaatatcttgcataaacctctccttaatctacatgtaattaaaagcatgtataaatatgactgcaaaactgccctgagctgcttgctactccaagcacactgcctgtgggaaagccctgctctgcaggagcagtcacagcactgtaacaccaccagagattttacactaccacttcaataaagcatttttcttccactttaccatcggctcacccttgaattctttcctgggtgaagccaagaaccctcatgggctaagccctactttggggctctcttgccctgcatcagctctgaatggtagaactaaacactgcttcttaatatatgcacactgtaaaatctgggattctcatttctcaaaatgcactttctcactctgcctcagatatgcatataaaaagtattttttaatgtcactttccaaatagtcatagatatcaatatcttttttttttttttttttttttgagacggagtcttgctctgtcgcccaggctggagtgcagtggtgctgtcttggctcactgcaagctccgcctcctgggttcaagcgattctcctgcctcagcctcccaagtagctgggactacaggtgcctgccaccacgcccagctaattttttgtgtttttagtggggcagggtttcaccgtgttagccaggatggtctcgatctcctgacctcgtgatccaccagccttggcctcccaaagtgctgggatcacaggcgtgagccactgcacctggccatcaatatcttttttgaaaataggttttattgtatatatttaagatataaaacataatgccataagatacatgtgaagtaaaattgttactatggtggaacatattagcatatcaaccatcagaccaaagacaccttagcaatatgcaggtggcctggtgtcaaatagacaagtaatgtacttggtgtcagatctcatgattctgccaataatttgctgggtgaccttgggccaccaagtgtcctgagttgagatcctccctcagttcacctccctgaggctcagtatcctaccttgtcaaacaaggactttgaataaccaaagcttttccaatgctaacattcttgaagatatcactgtccatattcagacacatatacacatttgatcatcgctgcctccctaacacctataacagggcctggaacataacaggtgctcaataaatgtttgttgattaattgccatatttgttaaagaacccacacaggctgaaaatgataaggatgtaatgggaaaactatggggatgtttccccagatgagggtttcaatctagttgggtctgagcaacatacacacaagaaaaatgactttatgaaatgtcaaaattatcatgaaaaaggaaaaacgactctatttgccaatgtaaaatctgtaatttacaaataacataaggaaaagttatgaggacataagaatagagggaaatcaatttccactaaggggtcatgaaaaacgtagcttgagagcaggatttcaaaaggggtagggatgctgggaaagatgatgtacaaaggtagaaatacaagggagggagagcatgcaaacgctgagttttcgccagcatggattataacaaaggcaagccataaagttggagagatgtttgggaggttctaaagtcccacaaagtttggaattttttttttttctgtagatgatacattctcaatgggggctttacagctcataagttgagaaaattgactcaggtgggagggtggcgcttaaaaacgtcttactctttttatatatatagcacagatctacatataatacataaacagatattctatatatctgttgtattaaattttcatggagaaggaagttgtggggcagggtgataatgagtaaaagattgtaaaatactgctctagattctaggaagatattagagaatgcccctgccccaaagtagggattagacctaagaacaaacactgacagaggcttcagtgctcaaagcactaagaaaagacaagatgtgctacatatatgcatgcaacaactgattcataaaagtagaaggcattttgtatcttaaatacaaccccatccataaatctaaagccaaaatctttgagaaaggtacaactctatcccttctgcatggagtcagtgtcttgattagagtcaattctagaagcaggaatgacttcacctccactcatttctatccatagaaatgatgagacgtgcacacatctgtgacattcatccatgtaagagtgagtagatgagaatgtttctaaaccatccacggatgggcactttggcctaaatggaagctattctttttcaagagtccccaaaatgaatgaaagagtgtaaattttaatgcatataagttgttaggattgcaattcatacttcttgtactatccagagatatccaattatgattctctcagagatgcataactaacttgttttaaggtagctgctaaaaaggccctcttcaaagtaataattcattatagtcatcagcagttccaggagcctgattggaactaagtgctacttaaaaattcccccttttcacatgtatattagtaaaatattatgcttagaattacctccttgattctttatgttattaatatccaaatgaaatattagtaacactagtaatacactacattatttttctaaaagcagaaatatcaagcatgtttcatccttttaaaagtagagcattataaaatttgaaagcagagcattaaaaaaagagaaggaaatgtttctatgagtccagtgcagtagtctagctgaaatgtcatattttacaaatacaatatgttttgattaatagaagtattttttttatttttgtgtgcaaaatgaagcttgcttctaatttgtgtacccgccacccgctaatatgtttaaattaaattgcttttgcatacatttgtatgttatgcactcctagctacttttaatttgctcagaattgacattttaactttccgggctgccatctctaagatcttctaattccttgatcattattcagtgtgtgtatcatttaatgatcacatttgcttatataggcttacacatgtctcagtggaaatcgccaacggttttgttacatggcagtgtttaagactaagagccaccagggactgaattcaaaggcaaattccccatttaaacagagacacataaaaggaaaagttccattttcccttctgtttaatagtcatatagttaatcttttcttgaccattcccacaagagcaccctttagttccaagtagagatgtataattggctttcccaaaatgtgaggtgtaaaggacaaatttatgagacacctgtttcccttacagaagagaatgccaggtagacaattttgcattctaggtttttcagtctatgagctggggctatattgccattgtgaaagaataatctgtttctagagggagacaggtatccaggtgatcttcaaggtccagaatttctgacttagcagaaggcatgtacccacctccacccccccaccccctaacttcccccttccctaactcccccactcccccactcccctactcccctactcccccacttccccacccaagcaagcccagaggcagctccagctcttgcaggagtcctgttagtcaaacacagcttgcccagggcagagctgctttggcaaaacttgctcttctcctgcaagatccaaaaagagaacctcaagtcctttgccaaagtgctgtcaacttcacttaaacaggaaggctcctctcagatgcagagttaggctgggctctaccgtgccagtgactttggctggatggaacacccttaaaatgccactactgagacacacggtgccagcttgaggagccgtgtatgacaccgtccttccaaagaaatacagttgattcaagttgggggttttgttttgttttattttctccctctacttataaaaccatccatctctcttccatcacgtcagttgatccatctttgtccaaaaacaaaaggctggtatgaggtaacatttttaactttttagtcacttattttaactttttacagaaaaatacagagcttgattaattttcacaaattgaacacacacccatgtaagccatcacacagatcaaaaagtagaatctccccagaagtccctttcatgctttctcccagtgtctgtcccacttccaagggtaactattatgatatgaagccacattttaaatccacttttggtcaaagagtctaatacaagagctgaattggggattgttttcatttccttggtgtctgtttctgtgtgtaaacatttctgcatttttgttgaacttagtttgagagagaaagtttctattttctttaaatgttctataaaattattcaaatctgatctttcttcttgatacaatttcataatttcaccatcaactgacatgccattgcccatacacctgtctttagaagcagcagttagaaagagcttggtttctgtacatcaccattaggtgtgcctccaagtgggtgaacttcctactctatttggtgtctaacgtctgattgagaaatatgcctccatcaacagtaatttgttttaaaaataagaaaattgaagtgctccaccatttctatcaatcccagtgacttcacagcaaccccagccccagccacaccaagaattccaggaacttcaagttcttagcatgagaaaagttctagactcttatggcaatggatatggaaaccaaaggcccctcccaaaggcatgtgatcattgtgtatgggtgcacttttaagtcactgtgtggttaatttttccattaacttttgtcatttctctggatacagagccacaccacagcttcccatctgtaagctgctttctgaagtgtgtcgcttgagtttttgctgttgtcttgctgtggacttggtcaatttatttacaattgtcgtgtgcttctgccacatctgcattgtcactgtgatggtattttttctttctgtctgtttcttccacaggagtttaaccagtaacctacccaatgtgaacctacccaatgtgaaccttcccaaagtaccaaatctaccagttaacatccctctaggcatcccacaaatgcctactttttcggcaccgtcatggatggctgctatatatgatgcggagtgtgtattcagttcacattagatctcatttaaatttaagtgatcttggcatggatatgtattgtttatttctatacatcctatataacagagatggagatggataattagacatattttgctgatcatacagagacaatattgtttatttctggcatgcatcatgtttgtaagatgtttgctatatatacagcactaacaatttgtcttacgcccactgaatgctggaggactatgtttcacttcctgaattcttttgcaaaaggattctaccctttttggcaggtgacatgactttaggagctagacatccaaaaatagtggaggaaacctctttggtgggctggccagtcatctctggcctgatccaaatctaagaaggaagcacacctacctagaatctggggtgttttctttaaataaaaataaaaaattcctagagaatgtttaaaccataaagcatatttctggtgtcagcaaatggcaggatatagtaacagtatgttcagggctaaatgaaaatttctgaatggatcaagccttagtcacataaatgttatgtaaaaaaatatattatgtactttccaaggtcacagtacaatatggtgctttgagagctaggtaatgagaagttcaataattctcgaaacacaagattcaaacaataaataattaaatttgtggtagccatatcatctgaatatagggctatgctttatactcatccacatgaatgtcagagttgcatgggccacttcttgaaagccagcagtttgggggagtgagggttgagaagccatttcttctagcttcaaaaatgaatcttctctccttttttagttagcaagaagatcgagcacccctaaattctacctcagggaaattagaaccacgtgcatgatttaataagtgaaataaggtttagcgattctgtacccttctttgatccttttcttagaccacagctaattacggaccagataagctttttcttgaaagaataaattggcacgttttcaaagggaagtgttattatcaaaggaataaaaaatggtctgaaactggcagtgatgttttgaaatcttagaatcacattcatcaagacggccctcagcatttttattcttgcagtaatccaggtggaggacagaccattaaaatgactgctctagctggctcctccaaagctgcctgatatttctacaacctacaattgctcacaagttcacactaaaatcatatggtcaatgtgtctgattctcttttaaaggcaaattacaacctccaaaaatttatatctgaaaaaaagcttctaaaaaagaacacaaatcatattcatgctaagatgactatatgaaaaaattagattaggtagtatctgtgaaaaatttaaaaatatcagaaagcttctcttatcttcctctgtgcatgctctgtgacactgtttttgaaaagatatgaatcaagacattgtaataaagcagataatggtctccgttcaattaattaaggcatgagtgggaacacattttggtaactgctcagcaatcaaaataatcttggtgctattgccttaacattaacagtttatcttaaaaataaaaagaaaatattcttttcctcatgtcaaaacttaataataagctcttcaaagaaaaaaaaaaccctacaagaattttttgaaactctgaaaccagatgggtgtcaaaatgttgttgtaataaataccaattattgcattcatatgtacttaatgatttaaaacatacaaccatgcagttccaaaacggggcttagactagacaaagttggggtttctttttcccaagcataggttggggcagggggaaggctgaactttcacggagaaacaacgcattcccccacttttgaacaatgctcacggcagtatctgaaaagaaggcgtggattctcaatcacccaccaggaaatgcctgattctatatcttttcataattccagtttcttcctttgccacctttcattttaagggcgtgtttatatgttacctgctccatcgtgtcagatacgtctacgtactgacctcagactggtctgtccttgaaaacattaccctgttggtccaggccgtaggctccctctcagcatgcttgggcgtgtgccccctccccgccctgcagtagctgtgtatgcatttatgcactagctatatttctctctgaagcattaattcaatgcagctggcatctgtcacaatagaaacacccactctcatctgtttctatagacgatgtcagaacaagtggtaatgcatggtgtgttggacattttataaattactgtgttagcattagtggtatgcgaggaagtgggtgggggggaggacacccctcagagctccaaatgggattgttacaaaaaagacagccagccagaaaagggcaggaggatgagagatggagcatttttcatacacaggctttttgtagatgccccaggtaaaagtttcttagacgtcatcgtatagaaaggcatcaaaaccaatttccccaactgcacacaggactgggtaagatggtgcaatggtaaaagagctcaggttttgagccctaaagcattgacaatatcccttgtccactaacttccactgtctcgactcacctcatcctggtgaggaccctgcctatgcaatgggctggtctatgaaaattggaacagtaaccaaactgaactagaattttggaatcaaggtatccaggtgtacccctcttgatctgagtcaccctaatttctttccagctcttcaagagagaaagcaggtcctcgctcaccactttgttagcactgtcctttgaaaacgaaaagtcttgtgcaatctccaagaggtctccactctggaggggagctggggaaatgcatgaaaccctgaagtttaataactgcatgttgccatgtagttattatctgttgagactatttctccccctggttcgtggccttcatctgaatcatcacatgtgttaatgtggttattaaaagaaggctgatttttaccatacaccattctcctggttgttatggggcaacaccttccccagacttctcactggtctggggtaattggctgagcaaagcacactaagtcatgtatggtaaaactcaaaatctgccggtggagactcgcccccgcctccaccgccaacacacgttgttttgtatgttgaagctgctgtttgccttctagcccccagttgtctctgtgttagtttttgtagagcctgaggccagtgggtgactctcattttctaatttttgtcctgccagtaatgggtcaggcacctcagaagatctgttttggaaacttgacgcccttcagaccttcattcgggacctgcactggcctgaagaagagtttggaaagcacctggaacaacggctgaagttgatggcaagtgacatgatcgaatcttgtgtcaaaaggtaagtataggtggctggacaggttctgcacaccctccccaccatacacagactcagggaagggtagatggctgctctttcaattggctgtagtttgaaactaattggagaaggggattgcttgtcaaagtcagctggagtagtggctgtcaacgtctaacttccattcacctgccctccatctgtcccaaacccaaaataatctggctgccaattttttcatggttgttggctttaagaggaaaagatccctgtccattcttttttgtatccctgatatctagcagtgtctggcacaaaatacttaactagtaagtatttgttaaatgtatgaatgtgtgcctgagtggacaattagaagggaaaaaaagaagaatatgcaattctggagctggcgtatccagtatggctagcagaaatctaatggttttctaacaatgtggatagggccttagcatcatcattcactccgtatataaaagatgagcatatatgtgggccaacttgtagttgtcttgttgaaaatctagctggatttcaacagcggggcatgagacatggaacattacattttgcctgcacatagattccctgttttgtcactgtggcttttaggactaggttaggaatgctgtacttgaagttcccaggcagactgttctgagaaggtgagggaaaaaaatgaggacaacattcatccattcagcaaacatcatttgagctcctcccatatgccaggcacagggctaagttcttggcatacaatgaagaatgagagtagtagaatccctttcctcatggagtgtctccatatcaaatatagaaataaaattccactgaggggacatcatcatcatcactctgtctacccccagatacacatccaagttccttttctagttcataactgttgcattatttttcctcattcaaaaaaaaaaaaaaacccagattgcaagcagcacaggctactccaaatctccagatgttgtgtagcttggttgatggatcaattgtgggtgatgggggccgggtttgtctggaagttctttgaatttattatttcatatcttggaagaggaaaggtgaagtaatatcatcagaactggaaagcaaagaagcaaaagaacaatgcaatctcaggtaggtgaacagcatctcagcaggaattgagaaaggaactatgcactatggagaatctgggcaggtgtttgaggccacttccagaagcttaaagttgtagtgatccagattttttagtattgctcttttattctctctcttagaactgaaggcaggcctacttctcaaactcaagatcaaaatatttccttagggtcttgaattccacgatctcctagatagtctatatcaattttaggaaaagcaatgcttttccaatggccaaaccattccataaaaaaactttttgcgtgatctgtcctaggggtgaaatgcattacagtaaaggcttaccagttcctaaactgtgcacataattgtacagaaagacatgcatgtccttcatggagaggccagtctgggtagggagcaagaaatgggaagatgctcagagaaaatggacagatatgaggatgtcacaggtggatagggactcttatcccttaccatgctgtaatcatgtcttcacggttcagacacctaaagagggtgagctgcacagagccagggagtggatctttttcatttggcgttccttaccctccccaggtctcagcaccatgcttggcacacagtagctgttaagcaaccttttactgacagaagttgctccactgcacatgtatggctggcctggacacttaaatttcctgatgtcccttttaaatcagcccaaaagcagacaagagcaaaaatgggtggaaatacccccggacctacagattcagaggacagagcatggacgagtttttgaatgttttaatacatagaatctacattagaagagcctagaaccgttgttctccttggtagaacagattctgtgtcccttgttctaagccaacatagcaaggacattgtttcataggtataaatatgccatgacaaaaagtcaataaggcactcctcatgtttcagtgctccagaaatttaattcatcaatttgacagacatttacagagcctctagtctagtctatatcaggttacttgtgctgaacacaaaacaaggcatgctgtcttttgccctcaaggagtcagttgagttaaatgacctctccttttctggcgttttggtcctacagagccctctcagtcatattaattttgcattcagcttcctcttttcacagccctgcactccaagggctatgaacagttctcctgtgaaaactgaagacgattacttcattggaagggagcaatttagcatttccatttctcaaattgggccggaactggcacacaagcctcagaagatcagcacagggacctgtccaactcagtcctcatcaggcctccttttcacaaaaccggcaaatgatgtattttcagcgtagcttaaaatgatcatcatgattagaaagctacttgagtgcactgaatcttcagaagccaagatacatttatctttaacatgatcatataatatataggggtgttttaagggtttgggatttttaggtgttttttttttttttttttttttttttttcttaagaactgggctcccaaccttagaaattatacttggcttctctgcatgcactcagggtgtgttagcaagctggcatcctttcctgagctaactagctgtgtggtcctcctatgcactgttagaaaactgctacaaattcctcttaaagtaatgctttcctggtggctgtatgatctccagaacttgacagtgaacaatgccaaaaagatgcatcaggcaaatggggccttaataaagccacttactaaccaggtgcttttctttaaagacatttgatgatatcacccacttccctgaaaccttttaaaatataactaggccccttttacaatgctgatgtcaaggataagatctcccacctgtattaccagctggccatgtcaggctaggctttttctatgagttgttagcacattgctgagatcctaatttgaccaatgtcagaattatgttactttcagattccaccatcacacaattcttgaatttgtatatgtatattaagcgtacatataaaatagttgtatattatgacattttaaatcataaaataatgtattttattgcaaaataatacattgacattgaaaacaaaacatagtggaagtcccccaataccacacctcctaatttccctcccctcctcaaaggtagccatctttaacagcttgatgtattacctttttatgtcctttaacaagcaaaataaattttgtagtctttaaagcaatgtaatacacttgctggattttaaatttttgtctctttcaaaaccagaaaggggaaaataaaaacccacagcaataaacatcatttaagatttttttccccaccacgaggttttgaagattaaaaactgctttggtttttgtttgttttgttttattaatgaagtaattcaaggtaggcagttgccaatgtgagagaacttacatatgctatactgctataatcgagtttttgtgaattcattcattctcctgcaattaaggttctccatagcatgtaaactatagagagaaatacgccaagctacaagtgttccgggtactgccggaaaggaagggtgtgcatgtctgtctccgtgaataggccttccttagttgggaaagtcatttaaaagggaacacatgtgaagtcattgttgactgaaactgattacagccttcaattttctttttcactgacctctcagaaaatatctcctccacctgctgccatctgaacgctgaattggtcttttcctactttgttttaatagaaccaggattgcatttgaagttaagctgcaaaaaaccagtcgatcaacagattttcgagtcccacagtcaatatgcaccatgtttaatgttatggttgatgccaaagctcaatcaacaaaactttgcagcatggaaatgggccaagaggtaaaaaaaaaaaaaaaaatacagatttttttttccctcttcattgatcatgtagaagaaaacttcacaaattccttccatctaccctagtctgctagtttcagaaatacactctaacatttgtggattaagccatggatgagtgttcagtatctgtttgtcaagtagatttctaaggcatgtgctgatgagaatgtcagtcacttggaagtgattcttggctggagttggggtggccatatagttctctaagctaaatgaagtttgacgaccttatttattaggctggtgtctcgaacagatctgtgtttgccagaatgaaagtcattttcacatttgaagtgcattttatcactttgaacatctggacagcaagagaggcctttcttgcatcaaacaacttccaggatgtataatgttagatcaccctgctacccaatccccagccagcaggttctgaatttccaaaaaaaaaaaagaaaaaaaaaattgcagactttcaattttccttagactgaattgatcatgaatctttcctgaccaaaagtttagtcctttgctaagtttgcaattccaaagcagtatttaaaatgtaaaggagaaggaaacagcaacttgggcttgattaaagactatcatgatcatttttctctgatggccttaagccagctagatattcatataccaatttagaattaattcagaagcatttctggcaactctatgttgttgccaattggcataaattgctcctaaatcagatctttcgataccagccttacatgttcagaatttttactaaattatatttgctccttattcgttatttattttctctttcagcaccttccatttttaaatgtgggttggtggtattctcttcctggcaagatcatcttcaaccttgtttcccctacaagtcagcttcctcagcccccacccccaccctggttaactctgttcctgactaattttcttgtcgaggaccttttcctggggattaagttctaagcactggagtcaaattcagggtgcccttggttctctgtcccagcatcgtgtgctcatatgaatgatctggggcagtggttctcatgtttcagtgtacgttaaactcacccagagagcatctgaacacccagatcattgagtctcacccaagaatttcagataggtctgcggtgtggtctaagaattggcatttctgacaagttccgtggcgatgctaatgctgctggctgttccagagaccacactatgagaaccactgatctggatactcagtatgtaaacctgacttcaggggaaggactcaggtaggaaggatagccccccttggggaagacctgggttcggtgttcagaaacctagattcttcccctggctgagctgaaagctggagtttgacaaatcactcagcttctttgggcctcagtttcctcatctgtaaaatggtagcactattctagttttattcagggtgtttttagtggcacaatctgtttttcaaagcaaatcaagaaggccagcatgtgacacaaataaaagtacagctgctctggatggagaggggaggagggggcctagagtccaagctgccaggtggccctctgctctgcacctcttcactgcccaccacccacctaagctgctctggaatatttaaacaatctcttaggcttcatcaagcccactttaaaggccctgtttttggtgatctcaaaagttcattgagatccctttgagttcatattttccagaatcctgttcctccttaatttttctccccttggagctactgtttttaaaattgagatataattcacatacccataaaattcaccagtttaacatgtacaattttgtagttttagtgtattcacaaagttatgcagtcatcaccacggtcaattttaggacatttttatcacctgaaaaactgagtacccattaattctcacacccctcccttcttcacagccctaggtaatcaccaaaatactttctatctctaaggatttaactattctgaacatttcatataaacaaaatcatacaatatgtggccgtttgtgtctggcttctttcactcagcacagtgttttcaagatttatccatgctgtagcatgtattgttcgctcctttttatgtatttattgaccattgtatattttctttaaagaaatgcctattcaaaatcttttgcccatttaaaaaattgggttatttgtctttttattattgagttgtaagagttctttatatgttctggatacttgaccattatcatatatacgatttgcaactattttctcccattctgtgggttttctttttcatcttctcgatgggatcctttaaaacataacaggtttcttttaaattaaatgcagtgcagttgacctatttccccttaaatcttcttgagatgtacattttaactgagttttctaaggatggtgctaggccagggtgcagaagggttgatacaacaggactggtcttgccttctcctcagcagcttttgcagtccctccccagcttgattcaatgacggccatgtttcaaaagctcccacatacctggtcagatggttaaacaattcttccaaacaagccaagtcactttgatctgggctgttttgcttttgagctgggggtttagggagagtagtgggagcgtgggagttgctgtcacaaacttcactgagaatataaaaaaaggtatggagccatttctcaggggaaaaaaatactttcatatattattactctacaatttcagacgacctggggaccttcttgaccaaaccatagaccccagttggagacagaggatgagaaagaccaagttgacttttatcacaatggcggacccttcttttctctttaccactaattgcttctgggccaaggtagaatgaccttagcttgacctgggagtctggttttatagaagaataagttgccttttggtttaatcatgacatcgtatggactccataccttagctgccaaacgatgtgtcatcatttgctgaatgaagaacatagcatgcaacacacaacctttgggaagtatgtggtttgttaaaattgggtattaaataaagtcccctaattctggatataaaatcagaaagttgtcttggacttgcagtaacatttttgacatgaaacagcagtgtctatttctttctagacattgttctatttgataaagtagaaaagactacccatactctccccatgtgactcaacataatttttttaatgaaaacaaataaccgaggcttgtaaacatttcttgtttctcccaaaatagcgcgcacacacacacacacatctagactgaatatctttattaagggcccatccaataatgcatcctagtctatgattcttattgtaagactgttggtttttttcccaagccatcttagagagatctttcgtgacatttttccttagtataattgaatctgagacacttaaatgaccagctgtgggaaatgaggcttctttgaatgccaagtggctgagaacaggtgagaataaagctagcttgacttaattgtctgtaaatatgtacttcttctaagtggtctagcacagtggctgtaaccttaatcagaacttcaatggaaagtcatatggaaatgtttcctccttgatttttctcactttgtagaatgggaatattcatctccaaagtaaagctgagttgctaaaatgagatttaacaagaatatctggaaacatcctggaactgggataagaatagatgaaagtccaatgtttttatgtagtttgtatttctgagtatgggatatgaagcccatattatagacctagctactaataccagcctccacctgggtcccaactccctcaacctgctttagattagatactggccaggtgatgaaatctccatttttaagatcgcatcctggatttcatcattgggtaatatcacatgtaaaggcagctgctgaaacatttgttaagcatagttttccatcttaagtatttatttttttcattaaaatttgtgaagtaccaatagaagggaaattgcgtattaaatagtttctcacttggtctagtgtgttttcatctcatttccaaggtcagatggtcttaacagaaagacaacatacacacaatctgttctatgacaaggcaaaacgtgtagcacaggaagtcaagtggaatgattttcacacagtaattgtgaatttgcacctcagcccatcagaagcaaaagtgaactgaccaaactttccaggccattgaatattagtagttccctcaggatataattttggagtatagggcaagttaatccaagaaggccagtagaggccggacgtggtggctcacacctgtaatcccagcactttgggaggccaaggtgggcggatcacgaggtcaagagatcgggaccaccttggccaacgtggtgaaaccctgtttctactaaaaatacaaaaaaatgagctgggcgtggtggcgcacacctgtagtcctagctactcgggaggctgaggcaggagaatcacttgaacccggcaggtggacgttgcagtgagccgagtgctgctgcactccagcctggcgacagagcaagactccatctcaaaaaaaaaaggccagcagagaggactggaaaatgggaaaatggtaaagctccctctttgtaccgtatctggatagtcgatcagactgcaaggcattttataacaaaattgtctagtaggaatgtttgttaattaaaagttgccccactgatatatatataccccttcatggagcttcacatctgcacagaacaatatatctcccaagaaagatcaaggagtgaaagcagagtactcactattactccagaaagcaagttaatccaataagtctcatatatcagggaaaactagcaaaagggattcacgtattctgtaattacttgaataggaataggggctgctttgatatttacctctttgctacatgataaacagagtaattattaccctgctctgctatcttccacaaagaagcttatatttaaattgaggcataatttacatacaacaaaatatagagattttaggtgagtttagagaaatgtatatacacatgcaaccactatgttaatctattaatcatagtagtagtagtaatactgccacatagcacctctcagtttctaaaccacgtttccatgcattgtttcattatttggttaagtgaatatgatgtctatattcacaagttataattctagccccactgcaaaaatgaggaaatagaccaacagagattgacatgataaagtttcccctggatgggagagacagaataatcatatcaaaatactttgttttataagcagaaaaaaagcaacgttcattataacagaagaggaatggagatgatcatatttgtatggagtgaaagggagagatagtgggactgcctggagaaaaattaaggcgaagtttggcatggaaaaattgaaatgggaagaggttcccataaatcatcatatttccataagccacgatgtctcaaccatgtctccttatgaaagggtttgaagtttctagctcctgaagagaaagcttgtttctcttgggagaaagaatgacatcattaactcctcagagtaagaccctaaatctttgttggtgtgtggagaacaattactctagtctctatttgccacttcagcccagtttttcaagagagtgttttgtttctcaatgatgttcttctttgcttggtatatttcatattattttgcacacagctagcttttctgatttagtttactcccataattaataaatgtgaatcatttatagcaatgcaaagaaaacctagacgagtgaggcagtcatatgaggaggaaaagtaagcatgtgattctggatcttatctcaagacctaaaaatgaatttggagccctgtcaattttcctgaattcttttgctctgacatctttctttgtgtttctagcaaagaattctgcagataaattttttgcatttagcttcaggtttatgccacttaggagtaaattcctttttgaatctagcagtatagccaacatgggttctgattcaacgggactacaacatacaagccattagctgtattatttttcctctaatcaattaaaatgaaactggaggagatgactaagtgataagactgtctctctctacccttatctaatacttgatgaacttgaacaactaacaatatttgagtcacgatgacagttgacaaaatattttcacatctagactctcacttgatctcccaaacagagacttatgagtctgaaggcatgactacaggaaaggactcgggcactggtttttaaaataataatactagcatagacccgctaaaaatctttatacagggttggctttgttcccgttccaaaatcagagtttcatactggtttctcccttctcattggtccaggatgatagtattattatctcttttgtttgttttttacagataaggaaactgagttaaattttcataggtaacatgacttcccaactttgcactgggactttatccaggtcttccaattacaaacaaacctcgcctatgattctaaatggatttacctaattcacatccctttcctcactctcaataattctgattgccagttatcagaatattaaaccacattactatggcttatttccatatgtttacatagacttttgaatattttatttaatttttattttctcatgtgtccttttgtcctaatttgtatttgcactgttcctttttttttctgttcctaattaatcatccttctgaaagtttgctaaaatgtgggtaagtgcattttccttttcaaataacaatgtcttgcattgttattttttgttagggaaatatgggataattcaaatggatactaaaatgatctaataaatgtcaaggagctggcatataatattttgtgttaaaatcacttttcctttttccctggcatttacagcagatttttatttgtgtgggggtttgtcttcacattactatttaaatgtaattgacaggcacagttagagaaatttaaaaacttagcagtggtctcagtgtaggctctcatactgggtctgtttatccatgtatggaggaaatgagtggcttgccacaagagttcagaaagagacactttgcctttatactgagtcaagacttggagacaaaatgaggagttctgaggtattaacccaaagaacctgagggtttcagaacagtttttgcaaaattagtcacagtgtcttcatcaaattccctttggaaagggaatctactacctaagccacaacccccagcagttttccaaagataatttttaatctcctgtgttaaattattacagtatcctgctttgtaagatccaaatcaacacactgctgggtcattaagtcattcatgtgtgctatttgtaaaagtgtttaagtgtctacacacattagaagcatcgaaagccttgagtaaggaacaatgaacttggtaatatttttaagagcttcagatctctctctatcaaagaactggagtcaggatcttataaatatttctgggactaaggaaataaacggggtccgcaggccaggctttatttataaattaagttgtctaaaaattactgacggatgcagtgccatcacctcccaaacatgctaatatttgtctttctgtgttcttagcatcaataccattcaaaaatagacgaactaattgaagaaactgttaaagaaatgataacactcttggttgcaaaggtaacctccagcttcaggtgaaatgtttcattgtgaacactgctttgttatgtctccatttccattaaaatgtaacacattaaaaagttgagctggatacttgtgtctctcaggaaacaagattgtacatcacccagcctcagctctaaatgattttccgatgatctcgagccgtgtgaagataaattgatgaagtggcatatgttaacttaataagaatttgtccccaaacgttgcgctaggttatatgagaaatgtttgttttgtttttcagctctgacaaagttagatttttaaatacagaaagttaaacggtaataaggaattctgccatcatgaaaaccccttttcctctagtttcacatgcagtgagagtcataataaaacataaaagtcagataaagctatttcagtcaccctcatgaattatagaattttaactaagtaatgctgaatgggaagacatttatatttgccagtgctaaacttctgtttcccccaaattactgataaaatacaaataaaaatagattggattaaatgtagtgctaatatgtaacgtagaaactgctttgcgcagttttggattttaaaaagtgcatttaatattatcgcatgctatatgcaactcaataatattttgtcactttgcacttctgtaacactctatatttgcaatcacataataatgaagagaaagccggataagtcaaatatttctatgtaaaggcagtctattcctttctccgaaggcgggaatcaaataatagactgcagaaatgaacggagggctcgatcccagcctttatgtggtggggaaatgatgtgctttatggtgaacaattatagtttgaaataacatttttttcttttttgctgtttttctagttcgttactatcttggaaggagtgctggcaaaattatccagatatgacgaagggactttgttttcttcttttctgtcatttaccgtaagtaaagagcttctttatttcctggcttttgttttaatttttggtttcggcttgggagaggagttatgttgtgtcattttgttttgggatgggtgtgtgtgttaattatagtcaactattgtataatattaacactatgtgaaaagccaaacatttaataacagcaggtaatccaacatcatttctatttcatttgtaaaggtacaatatgtgtgtattttttatgaacacacacacacattgctatttgtatgcatccagagatttgcctacctaagcccaccttagctagctctggcaaatgacttaatgtgggccaccatttcctcatctgtaaataagaaaaattaattttagagttttaaatgaagacctgcactcagtcctggaaatatgttttatatggtcctcactgtgtcaagtatgttcttcttaactgaattgcctacatttaaaaatcaggagaattcacagaaaattctgtatttctgggggtgcctgcatagcattctaggtgcacagcaactctgctggagctgtgtcttgggggtcttagactggacatgtgtttgcagtttgctgtaaccccctcctggctgtttcactcattcacatacctacctgggcttaggagccatttaagtttacaacttctgggacatatgatctaattatttgcaaattccaagaggccctgattctgtgccagaattaggcaaggccatagaaatgaggtagctaagtctgggcagaaaccagccttattttctatggataaatgatcaatgaagatggttgctataaatggactgcttcgggggcccagttctcccactcttcctgatgctaggcagacaccacagctgcatgcttccctgccatttctgacagcaggttcctgctggctctgagactagctgttttcctctgacaacaccataggaaagggaatcaatttaggacccactgcctgtgggtctttaaaacagcctcactgtatgaagaatctcccagatagtgactgaatgccaagacaaggcccagcacagggtagtggatggcacattattgtccttggaatccaacagatccaggctcaaatcccattgccaatgttaacagctgtctgatcttaagcaaatgtcccatcccctcagaacctcagttttctcatttgtaagggagtgcagggcagataatatgttccctaatgagctatcatgaagataataacgtaggcaaaagagcttagcataggcctagctcataatagagttcaataaatggcaactattatttttaaaaagtaactaatatgattattgtaaaatgcagacatacatgcacacaacttctttccaaatatgccctactttgatctttccccaacccatacattaatcttcctgggaactaagggaaatataaacagaacatttaaaacagtttcttctgatatgcagttctgaccttcccaggtacgaggattgaattcaatcccagaggtgcgatggcccctatccctggagcttattggcaaaggtgaggtgggaaggggataatgacagtaggaattccatccaatttcacttatggaacattcctataatgtgtcacagctgaaaggaaacctatccaacccactcctttgacaaagcaatgaaggcccagagaggggagtgatttgtctgaggtcacacagcaatgggcagagtggggacaggaaccagtgtgtcctgccagctttcccccaccactgaatggcttcctggagagagtgggattcagctggcaattgcctggcactggaaggcagatgggcaaatgagtggggaagattcataaagaaggattcagggcacatgagtgggaaatattagacaatgtttcattcctcagtgaagtcctggaaatggtgaaaagaaacagaattcagtgcaacatttctggaaaatgtttccctgacacccgtagaagacattgctttctttgtgtcttcactttgagcaactgtttttgttgcattggacttgaacctgtgaaactcaggaaagctcctctactctttactgagcagaattcaatccaccaagggccccaccctaattactggcctaccaagaggactatgggaaggtggtccaggggcagcgatatcaagaacagggcaccagagagtctcacaggaagattagaaacaggacacccagagcatcctatgcagaagtgttcaaactgaaattcccatcctctcatctcccttttcagagacattttgcagcctcacagcatgcctagcaaaggcagtgtaatgcagaacacttcggtgcctgttgctgggcccgtaacttccctccttagtgacacttctcccacacacttggccaccccaggccaaaagcacccacttatcatttgcagcccgtgttctcatctcctgccagtattccagtattagagaaagtgaactgtgtttagaggtggcaggaatatctccacacatggattctgagttcctgcccaaattccaaatggcctttgatggcttccttcggcccaattgtgttaattccccaggagtggagtggaagtaaaaaggatgagcagaggcagcaggtattgtgcaaagagcttgaaacctgtgaaagaaccagctgtgcgtcctaggaccctgtgcagaggcatagagatagtgccgacgctctggcatgagtttcttaactccactcccatttctgattcaattccttaagtattactgtgcacttaccacgtccccacctcagcagagctgccaaggatgagccatgtgctctgccccccagaaagctgacgagtatcgacaaatatgccaccctttccccctctttctcccgctgagcgcctcctttcctgggtgggcttgtttcatggtccaagccagacattttggaaaacgtctgcagtggcacggagcaggcaggaatatttatttctcgtctccatctgcattgcttcctctcttggagaggagctggagggaggagggaggatgagatgtggcttcttcgtgccagcccgagaggcgcccaagcgcaccctcctctcctccctcaccagcttcagcagcagtagcagcctgggatttatggaggcaggcgcctttcgaacttttgaaagatcagcccagttggaagacgcaattagcaactatctgcccatttcccttgactacaagatgtgcttttgcgtgggatgcctgtttggaagggtccctgtcttgtgggtagccactcgctgttcttttaggaggccaagaagagggcaagcaggtacccaggttcctcccacagaaagtgacaatgctttcctctgtcctctgcaagtgttaacaaatatgctggttctggaattcattcattcatttactcaacttctatttactgagcacctatgtgtcatgttctgtgctaggtgctagggacacagcaacgagctagaaaggtgtgttctcggcccttttgggagcttacatttagtaaaggagacaggcaattaaaaatgaaagaaaattatccggtgggagaagcatttccacaggacataaactggagagcaagagaaagcggggaggtgatattactttagtcaggatgctcaggcaaggtctctctgcagaggacatgagcgacttaagctctcaagcttgaaggagtcagcgatggatacagaagaggggagaatcttctggacaaaatagcagctgcattagccaggaggcaggaaagcaggaggcacttctgtggatattttggaggccacataaacacggtttagggattaagtgaatgttgggggtggagacttgactggagagggcaaaggtggaaagcccgagaactatgatataccggagagctcagctgagctaggagtcctgagagtccatggagtacagtaaaaaagacagcacagggtagggagactgggatggtaacccagctctgccccttaccaaggagctgtgtgacctggaacaaggtaccacatcttggcttttaatctccttcagtgtaatatgatgatggttatattagatgaattcagaagtctaaaataactataagagctacagctcctattccttaaacacttgctaagtgcctggcacaaagctatgtgctttaaatgtatttttcctgctgaatcctcagaacaatcccattccaacaacactcttctgcagatgttgaaactaaggcttggaaaggttaagctccccccagctcacgtgaattcttccttcactaaaccctggggcccctgcagaggaataaagatgtaggagtagcccaggccccatctcaaagcagacagaaccttatcaagttctgtctgaactttatatcaagtcttctcaagtcccctagaattcagacatcctcctccgatcaaataaatccatttgaggtggtcacaacacaacatggaagccactcacaacaggaagaataaagcctatcttagggctgtcaagggcctgaaacctaccgtatgtccagtcttctttgtcttaagttactctcattcaccctgttttccttttgccagcattttgattgtcttgccacctggaaatgaaacaaaacagatatgtttctccccactagaatttgcgagacgtttgtgtaaatcagtagcattgactgcttttgtgcagagctcttgatgccatgccttagaacgagaatgccacctgggtctaaagcccaaactgaatcaatgacattcacttctgttcacagaacatttttgttaagaggcagtctgaattctagagtggggtgaatattcctcagagtttgttagtattttctctgatggcatttcacttatgctttggcttcagggaatgtccagggtaggagagacggctttttacagtgtgggttgatgatgagtgatgcagacagaggttttggttcaccctccagagggtaacatcaccagattattcactgccaaatacatgtaatttttaagtcaattggcttctatatttcagagtggaggtgtctgccttggacagaagcaccaactgtggtagtagtagctggcgtttattgaacacatactatgtgccggacactgtgctaagtgtatgcatgcattttctcatttgatcctcacaatcagtctatgcaactgatttaattagcatccccattttatagataagtgatggtgagtgatttgtcaaagtcgcatagttattaagactctaccctaaattgctcctttattattacaaaaatgttattccccatatatacacagaaatctgtaggtgaagtcaattagtgacttttccagaaactatccactagctgatactacttctaagggaaagagtcatctatttttcatatattaccagcaaaaataatttataaagattttactcaccagccagctattttaccgtagtactgaagtaatagacattcaaaattctccacttcctttgtgctgtccagataatcattcattttacattagtccttcattctatacctgtttatggagtgcctactatgtgctagacactgggggggttagcaatggataagatggacaatgctgtttattggacatttgcatgagggagatacatattctcaacgggtagtttacaagcatggtgattactcagaaagagagagtagccagtgcagtgtaactatggaccaaagggacccaacctcatctgggagaccattgaaggaaatgacatttgggctgagacctaaaaaataagtagagttttgcttggcaaaggagagaacaaagagtattccaagatagaaagacctggaggtgaaagggaagatctagtaaattttaggaactagacgttccttgtgaaaggccaggccagaaggagaaaaatgacaggcatggagttaaagagcaatcagtgcaggagcctgatcatgaaggagcttgcctatggtacagacttccagcgttttcagcagggaatttagcaaaatcaattcagctggagaagttaagcgaggtcacagagagaccagctccctgttataagccagctgggtttgtggtcttctgatgctggagctgagggccaccttccaatggaagccaccatttattttttctaatgtattttgttcatatgggccaaccaaaaaacaccgcgctttaaaaagttagagaagtcttaaacactgatctgctatatcttctatcagtttctttcatcagccactccctagtgtttcagaatttgacatcccctttggggtctgtgacagatcattttattgcctactaggacatccttatttccagttgatgccatgaaaatggagttaacaattaacacacttgctgtctgaagcaacccttcagaagctttacagaagagaaaagataagtatccaaagttaactatttcacttaatattgtgtagtgaacagctgaatatcattcaaagcaaacataagacacacacagtattttctccagactgtgtggtctaagtgaccaggtcacagaaatgctagctacaaaagaaatacctaaagaatatgggtatttcccagcactttgggaggcagagatgagtggatcacctgaggtcaggaatttgagaccagcctggccaacatggtgaaactccatctctactaaaaatacaaaaattagccaggcatggtggcaggtgcctgtaatcccaactgcttgagaggctgagccaggagaattgcttgaactcgggaggcggaggttgtagtgagctgaaatcgtgccacttcactccagcctgggtgatagagccagactccgtctcaaaaaagaaaaagaaaaaagaaatacctaatgaataggtacatggcttcaaacaggaaatagttgtcatgaaattaattatagattctatcctgacctccaaatcacatgcagtgggaagtttatcgccagaaagttagagagtgattaagataaaggtgtgactgtgaagcccagactaacagaaacgtaggcaggctattgaccgtttctgagccttggtttcttcatctatacagtgggaatgctgatagctgcctcagagagccactgggctaataagagataaacagtagccctttcataacacctggtatatagttagtaggtgctccataaatagccattcttagccttactgtcaaattattcaaaactgtaagaaagtttacatgaccctggtgcttttttaaaaatttttttttaaattatacttcaagttctgggatacatgtgcagaatgtgcgggtttgttacataggtatacatgtgccatggtggtttgctgcacccatcaacccgtcatctacattaggtatttcttctaatgctatccctcccctagtcccccacccttcaacaggccccagtgtgtgatgtttccctccctgtgtccatgtgttctcattgttcaactcccacttatgagaaaacgcggtgtttggttttctgttcttgtgttagtttgctgagaattatggattccagcttcatccatgtccctgcaaaggacatgaactcatccttttttatggctgtgtagtattctatagtgtatatgtgccacattttctttatccactctatcattgatggacatttgggttggttccattttctcaccagttcagtcttagcataccaatcatttctcctgtaagcaatccaaactattacccatgacaaggtcaatcaaaactcttgtgacttatattttagcatattctttcatgcaaaaatttgattcatcaaagtcatattccattatgtttagtgtattttagcattttgtgttttattttaatgccaaaagaatttttcgtttttacatagtctctaaaacacctctttattaatcaaaatgtttgcttaactagaattgaatatctcattctccaagcatattttggtttgaatcaggtttatttcagtgtgcactggggtttcttatttttccagttctgccacttcctaaagtataatcttagacagattgattaatctctgaccttagttgcctaatctgtaaaatgggaacaataagacctacattatgtggtgtgggtagaattaaatgagaaaatggtggattggagtaagtatttgacacttgttagacattgttattattgtaattattagtgtagttctatcactgagcacaaatgttagcatcagctactcaatcagccactgctgtatgtaaattgctgaactaagagtggtagagataggtttaaaaaaaaaatcttactctactgtctggaagttagtgtctagagtgcattcaatcgaaggaactttctagactttctggttcaatgtttccactgatatgctagagtctgcttggctcctacctgctggtgagagccgatctccatttctcttcctatgttcgaagttagggatgtcacattggtagcctaaaactgaccacagcaggagcattttactgaaattggcaaacactatcttacttatatttcagtatattattatattgggttttttttttttttttagacagtgatagataaagagaaagggaagagagagagtgtgagcttttcagaaaccagcataccactgagtatatcccaagtgcaggatatgtaccacatgggacctcagatgctactggtgttagatgctccaaaaactcatcattaaacaagaccaatcacattgtgagagggttattatttttctaattctcttttcatctttatccttatgtcaagaagaaagtttccatttggtgcttgtttgtctttcacacttttctaaaaatctcaaattttcatttgtaacagaggacggggaggcttcaggctcaggacccttagcaggcaaccatgtctacccagaatttactaccattattttagttatattgtatttattttcaccctggcttttttcttattgagagtgatattgctttttcatttatagtagaaacatgtttccctttataattaagtatttttaaagtgagctagtttaaggaggaataataagtaactataatacagatggttcatgggttgcagccaaaatcaggaaggtgtattgatgctggaagtctgggaagtactgatactttctagccactccattttgcagttgcggaaactgaaaccagagaaggaaaatgacttgcacagctagtttaatagaactcagacctcttaactcatcccttgagccttgcaaaaatcctccctgggattgcttgttttcttcactctttacctgagaaaatgaaaacaaaaaagagagagagagagaaaccaaaccactgtgttacaaacccaggctatgatagataagttgtcactggcagcagtgacataaattataccttcaaattcaggctaaagcagcctgcaggaaaagtcaaggacaccagaggtcacaagtgaccccttcgtgcagaagcattactattcagtaacaacaatatagccctcacttgctcagcaccaaagccatgtggaagccagggacacaagtaagacatggcccttgtcctcttcaagcttgcattctgtcacccttcttagtgttgagagatgttcaaaaggcaaacaaaacacaaaaatgccagaagggggcaggggcccccacttaaaatccgcaaaaataagcttacatgtctgcttggagattttacaaaattaaaactttccaatttgcacttccaagtttctcttaaaataagatcatgtcacaaaaatcaacaaaatggaaaagcatacaatgtggccattaggagggcaaaccctggagtccaaggaaaccatgcttcaaataccagctccataatgtcactagttgtggatcttttcaaaagtcgattaacctctctgagcctcagtttcctcatctgtaagcaatgagaatttcacgcccaccattgtgagggtgaattccttataaattgcttaaccttgtgctaggcaaagagtaagcatgcaaccattgttaagtatcagcagtgttaagaggctgggtctgagggagcccttgagccttggaaaaatcctctctgggaatgagggattgggacagaaatgaggaaaaggaaaactggaaggaaaaacaggtctacttcaatcaggcatctgttcagaagccccagggggtggggggtggggggagatgagaacatacacttcctggatctagtctcggagcacagtaccctgaacaacaggagatgagaacaattctcatcgttaatgaggctgcggctcctaatcagagcatggaatagaatgcgtttgcttaatagagatcatttccttgcctcttgcccaactccccagcagtgccagcagccctttgtttaataaaaggtagggactttgaggagtatggtgggatgggctgtaggaggcattactaccctcattactatgataatagtttaatcacaatcaatatttatgaacatgcacagaagccgtacaatcaaccagtagccctgcaactcagttttcatgttcttgcctaaggatgctttgcaggaaaacctcggctctctcccactttcccatggccctctgtgaagctctgcagtggttcacagaggtcatttcagaatattatccttgatggttacagttttatatatgaggtcttatttgcggtcagttaatattataatacattttgttgttcaaaatacttccacagtcatggtaggacttttcccttcaaactttgttaaattgtcttgtgaaaaggcagtgtagggacaacctgatacagtacagaatcctttgaagtcaggcccacccattagggttcaaatcctagctctgctacttcttgactgtgtgccctgaggacagcaacttaacctctctgagcccagtttcctcattcataaaggaagaagacaagtccttagaagacgtgaataagatactgtaaattaggtgttcaatcattggtaaatgcatcctgattttatatatgactatcagttattaaatatttctgtattgttcatgagaaatctgagtagttcattgcttttcccaaggtcacatagacactaattgagaaagtaggagtaagagtcaagacttggtcagtattctcttttccattatctgaaatggttccatttataggcaacttagagaaaccttattttttaaacatctcaaactttaactcttttctttcaaatgggaatcaaattttgaaagccagtgatcatttttcaagcaatggacatctggtgagctacttatgagaaatttttggtgtcacagttcccacctctgtaaaaatggcatttacaaactctggccctcttataaaaggaagcaacggacaatggcctcatgatgtatatgcatccatgtagcatttgacccagtgctcacatggaaatagtgcctcccaactggcccagcacagtactgacgttcggtaagcaaagaagacatttcaggccctctggtgacagagccctgggaatccatcatgctgtctatgattccagatatactttaagggttgtgtttttctccagtcctcagaaagtattggaaggggctttcaccgtaattgtcacttggccccaggcagaagccactgaggtttgctcaactgctcacccgcacacgcagtcccagtacatccgcccactcacacattctgtctcacccaagcagtcagtccctcagttggcacttaaaatttattcatcttcccaagatgcacttagagcatccagattatgtattgagtgttggttctgttaggttttggttttgcctttatagaggacatacctctaaaccatgacttcatcaaccaaacaccttgagaaggtcaccctgagaaagatatattcttcctgcaaaatccctttctccactagaattgaaaattgaaaattctatcacttttgttccttttttcaataatttttaatgaaagtcatatcggcacatggctaaaaaaaatgaaacagtacagaaacattcataattttttttaaaaaaacacagctctctgtcctagtcctttctgctctcaatcccttccttcaaaatgaaactttttaacaattttttaacccctggagtgctaagtactattattatattgtttattattcttattatttagagatagggtctcactctgtctcccaggctggagtgcagtggcatgatcacagctcaccgcagcttcgaactcctgggttcaagtgatcctcctgcctcagcctcctgagtagctgggaatataggtgcacacaaccacacctggctaattttttgtttgtttgtttgtttgtttgtttttgtagaaactgaggtctccctattttgcccaggctggtcttgaactcctggtttcaagcaatcctcctgcctcagcctccctgagtgctaggtttataagcatgaaccactgcacccagcctttgttgtcatttcttgattggtcaatcttagtgattatttgactccctactgtaatagatagagcttcagctcactttacatcatccacttctcctccactctccttctgttacagttattacagtattgttcttcctgtcttggtaccattataactttaagctgtacccatccacctttatttcctgtttcacccacaaaatgagactatgacacccatatcttttttcttctcctgcttcctcctccaattaatttcattttctaacatagaaattcttaattcatatcacttaaaaatgcaataacctatatttatgaatgtcccttgcgtctagaccagcactgtccaatagaactgtctaaagtgatggcagtattctgtatctgagctgtccaaaatagtcactagccttatgtagctctcaagtactctcaactgcgactagtgcaactaaaaagttgaatgttacttgtattttcttttaatttatttaaatttaaagagccacatgtgtagggtcagaccaaccttaatatacaagtgcaattcactaaaacaacctgactttccagcagaaatgacaatgatttctggcacatagttcttactatgcccagggactatgccttttgaactgatcatgcctagtggtactttcttagttgtcctataagagtgctacagctcaaacacctactgtaagaaagtgctagaaacctctaacctctgccctgggtactgagtaaagagtgccattctctaaagttcattcattcaatatatttttattgagccactactatataccaggtagtgtagacactaaggaaagagagcacctacattctagatatgaggctggtgagagatgaaaaatcaaaccaacaggagacgaaatgattttaggcatggcactgagtaacatttttacatactgaattgccttgacacacaaaaaaatctacatttctaaattgcttgggttagggaagtggaaaagggagcaaaacagcatcattaaccttgcagcagaaatttcaaaggccaaacattgaagtaaattttgctagccctttgacgtggtggtgtggtctgcagtatctaggcaaaggacaaaaaaaattaactcagagctcttgtgaagtcaaacaggcgggggtggagtcagctcatggagagaataaatcatttccttgattgtttttttcctttttttttgtgagagatcatggggcgctcgggcagtcactaatgcggtggtatctgttcagacttctttcttcttccatctttgagtcttacccaccagacttctgtttgcaaaaagggcctaatccactttttttttttgtctgtgcattgatttaatagtatcaaaccctgaggtcctcgtggtctgcacctgggttgctttttcccctaatgaagcaaaagaagtggtttaagcccctgccgcgctccctatcaaagctgcacaatgattaactcaggtcccctttttagggccaggcagaagaaaatcccttagtcatcagcattgtgaaaaccccagaatggtgagtgctcaatgaaaagattaccttgggcacctgaaaaataatggaagagctcaatagagaaaccattaagcctgtctacactggctaagtgaggtggagggtcgaggtaattagctgggacattcaagccagagaaactattttggaccttctgcactgactcaaatgtattcaagtccctcatacattttttttttgagaagccatttaaggttacaagaaaaaattaagacttaaatatagctaattaataaaagtggtttcatagtttttttaaaaaaagaaactaaataataggatgataggcagcttagggaatgggaggtccaaagctgtaacttattagtcatgtgccttcaagccaagttgcttatctcttttagccttggtttcttcaactgtaaaatgggaatattaataggatccccctcaaaaggttgttgaggcagaaatcatggagcaagcacgttcatcctacagctcctaatgtggtacctgtacatagtaaatgttctttgtttcaggcacaggaaaacatgaacaattgctcactgacagcggctcttcccaattttatccttagcctccgtcagcctctctggatttgtgtctctttttctaagctttttccagaactggctctatctggagagtcggggacaagagggttcatgaatgctgctagagaaaagatatgggttgtcctaccagaggggatggtcagaaagcagggagtcccaggagatgaagttctgctgaagtcacagttcttgcctccctttgagggcagttgagaacctgctcaggagggatgccagaccaggtatctggggcaagccctaccccctcccctttgtctcctgtgccctagggtacatggctatggcttggtcctggagagtaatagattgtgttgttgattataacccagggcactggcctggggaactgccctctcacttatgcccacactcagtcatacttagcaaagagaacaggtctttgctgtcagcctcaacatttagagggtgagttctcagtgcatagggtgtcacagaattggcagaaagtatgccagactgagaatcagctcagatacctgttggtaacctggggagattccagaatcttttttatagcaagaaattgcccgtgggccagaggtggggagtgaaactgactatcaccaccaggctgaggagcatgtgctttgtctacaccggtaagccaatattaccagtaatgatgataagcacagctacatttagttgaaccctttgagtagcgttattactgtcccatttacaaaggaagctcagagaagttaagtaatggctagtcaccaagctaaaaaatggcaaagccagagttttaacctagctaatcctgaacccattctgtaagccacttctctagatttaaagttaaaaaagaaaagaaaattacacacacacacacacacacacactcttttaacaaccattgatggaaaaaaatacacaaagacaaaaagctactatattatatagtgcttttaaagaaatttgcgttttgttcatcaaaacaatatcttattataatgtaaaatagccttgtgtagatggtaagggctgttggttatttgatctagatacagtgcctggtgcatgcttggattttctggcaataattccaaaactctagtgggttgggaggatctgatcattcccttctacctagagtatagctggcaaaaagacatattcctatggatatggatatggataacttaagaaaaggtgatccttaaaaagggagcactgctgacattgtacaggaaaagattctcatcctggttctgtcaatttctccgctctgctacatttatctactgtaaagaatgtaactggtgacaacttcctacctctaaggggacttgaatcagagaatgaaaagcagccctagagataaactctcatgtaggtaaagaaacaaatccaaagaaaagaaaagaaaagaaaaacacgtccagagccttctacctagcctctgtttgagcttctccagtgaggtggaggtctctatcaccagaaatggccagttcctggctggagtgtgatagctgtttagacctttttctagggccctgtaattttacacattcattctgattctatactctggaaccattgtgaacaaattcaaacctgcactgaagctccttaattaactacatgaatattatggttttctttgcaattagcccatctttttctaggcaagatgccttttctttcactttccttatagaatatactgccagaatcccccttttcctcatcatcaatgtccttcttaaagttcaatatccagcggccgggcatggtggctcacgcctgtaatcccagcagtttgggaggccgaggcaggcagatcacctgaggtcacaagtttgagaccagcctggtcaacatggtgaaaccccatctctactaaaaatacaaaaattagctgggtgtggtggtgggtgcctgtaatcccagctactcaggaggctgaggcagtagaattgcttcaactcgggaggcagaggttgcagtgggccgagatcgcgccactgcactccagcctgggtgacacagtgagactccataccacccccccccaaaaaagttcaatatcccgaaccaaaaatgatacacacatgtctctaaataataatagaccacaatttaccctgggttattttttcctgttattatgggatgggaggaggatcaataagactaagtgcaagtcatcatttattaaataaaagaacaatcctaacaaaccgagggctggtgcatgagggagagtggatgattttcatttgtgacagaaacttgcctcatcttcccaaactgcctgtaaaggaatagaatttggtgtcattctccggattgtaactgcatgttagtagtaaatggtaaatggtgtgtttaaaggttgctcatttcagctgtaacaaaacccctaccaactgctaagcatcaacatcacagagtacaggaggcaatttctagctgagaagaattgttctgctagcacctgctctgaccaccgatgcttgaattcctcatacttttctaccaatattgaggagatcaagagttccaagggagaaagttgggctcagatgaccgcataggagtcttggcttctctgcctcctgtctgtgatcatgagcaaataaattccttaaattctatgggttttacgttctcgattgtaaacggatctgattgaatcaccccctttttgcagggtggcttaaagaagaaactgtttgtggaagtgttttgcaaatgaaaaatatcacagaaatgttagataatagtatacatgggggagacatgaaaaaaaaaggcaagccaccttctttcctgaactaagttctagcatagcaatggcgaggaaagatttggggtttagaatcttttagtagaaatgataattgtgcaaaatctggagagcctgcctcaaatccctttaaggactaagagtattctcctttacccaccagcctctgcaggcagtcacctttctatacaactatgttggttttcagactgatcagtgacgtggctccttgatgcaatcttgcctctgcttacttctcaatcatcctgaggccagaactggtcattagctttctctcattgcttccctctataaattttccctgagtttcctttctaagctggtaccaggtgaatcaatgaggagacagccatgagcaagaccaagatagcctttgctctcatgacattatatgggaggtagacattgcacaaaaaaaaatttcggctgaattgcaatcaatgctgcaagaacaagtgtaaggttctaagagaatctgtaacaggagactccaggaatcgtcttgggggctggcaatgattcaagaagatagaatgcattgccctctcgataattacctaattgatgtgtgttccttgctttaaagtttacaaagcactttctcatgcgttttctcatttcaccaagctttcagccctgcaaagtacacagtattgtcaccttggtctagaaatctggaaaccaaggctaaggaacttggcatgatttccccagggtcaacgagttctggcactgaaagaacttttgactctatattctgggctctttccaccccaccctattggttcattggctgttttctcttgagagctgacattttggaaactagcattgagaaaagagcaacagaggaaatcactcccctgggtacttttctgggagacatttgggtgaagcttgattcctaatattgatctcagccaaattgcaggaggaagcctggctgagatgtgaaaagacatcctaactgctttttgtgcattgcagtctttgtagttcccagtaaaaacaggaaaccctctctgaccccaaatgtagctccttagtcttaattgtgcctagagaaacatgtgtgacctgagtcaaaatgaaacacacagaatattaaacatactcccataggctttatttctcaaacccagctgttcattgacttttcacagtactcagaactcacccacatttgcttatgaattcatcgtcttagctgccatttgttctgtatttacatcctggggctaagtgtgaattcacccttatcaacctgcggaaataagcactattactaataataactccattttgcagatgaggtaacagaggctcagagagatgaagcaacttgcccaaggtcacacagcttgtaagtggtagagttgggattcgaactgagatctgactccaaacttcatgctctcaaacataacactctagcacgctaccatactccctccccacaaaactaaaaattttataaccacttcctgcacttcccatctggaatttttagcacgtaaaagcaggagacataacggcagcctttgggcagttttgaaaggttctcatccccctacccgcagacaccatctccctctgggttgaggatgtccatcttcctcttaaaaacctgagttaatgaaagctgagaactgaggtttttagttatttagttaggacaacctgcagccaaattacacaaagacccaaggtaccagaagtaacagcaatcttagttgcttctctagactggtaagccccggactaatccatgtgggtttagctagtcactttactttttttcagagggagggaggaaaatgtaaagctcccgctccagcaacagaatctgaatcagtaaatttgcgtgtgcattctctctttctgcaaagcagtggctatggcttgaaaaaatagcaaacagattttattttctagtacctttctgtttttcctggtcagctccatgtgccagcatgttgttttgattctgatggggatacagcattgagcagtgaacaattaaacataaacaccagcctcacttccatcctcttctttcctctttaggtgaaggcagcttccaaatatgtggatgtacctgtgagtatttgaaaattgtttctcatggggtttttttgttttttttttttttcatttttactttttgttttcatgagaattttgatagtgctactcatattaattgctgctagctaaactgtgtgttgctgacttggatcatcagaaagaagccaagaatattttgtagtagaatttttttttcagataagaagacggtatggtttctttcatcaggaagaaaggtcctgtttgagggtaaacccacttcactttcactttcattttcattggtttctctgttgtttcattctgttttcatcatgttcaccaaccctcctgtgtgcacaccttcagaggaaagccatgaagctagaaacttgcacaagggtgatagtattttttgttaggttgatgaaaaacttaattgtggttttgcaattaaaaatgtggaaaacataatttctttgcaccaacctaataaaaaaaacaaataaattctaaatttgttcattttggggtcaattctgcaattgttttaaggaaacctcataaaactgcttataatttagtgcaggcctcattaatgaagagagctctcaaagttcacagataaagcactcgaagtttcccaaaatttacatttaaattgaggttaagtacaacacatgaatgctaaagtgtgggattacctgtgataaatcaggatacatttatggacagactttgccctgcctattagcaaaataaaattggagagattttaatatattccagtaaagtgaaaaagaaaatgattttgtttctccatttctaacaaaagaggtgtgagtctattataaaatattaaatttagagagcttatctcaacagccaccaagggtcttgtactaagcatttctcattctgaacgtggttaagtaccccccttgttcaaatacttatttgttaaaatttgtttttttctaaaaggatttgtattaacatttaaattcatttccccaggaagctaagtgtgtaatggtttactggcttatttctcaaaggaagacaaaatagaaaattggagtgaatttagcattagcatatattgtgtttgtttaatgaaagaatgtacaatcaataattatgctttgaatttatatgatacttcctatccacaaacctcagattccttcaggtagacagttcttataatggagaatagaaaaagctcacataactgcagcagggagagaacttaagtaatttactttctcaagcctccaaagtataaactttcccttcgtggggagctaactactcaaattttctggccctgtttctccatctttaaaatggagatgacgataatacctaagtcatgggtttgctgtgcaaattaaatgacacaacatacatagaacatccagcaccatacctggcacttattaggaatttcagtccaggagaaggacacacgtggtggtggtagtgtgatgtccacactctattgcatatagatggatgggggatgaatttgcagacatcagcgttgggctccactggtcttcaacagtgatagaaattgaaattctcggctttcgacccaaagatttggtagctgtggtctattctctgtaggatccagagcagagggggtatctcagccaggtttgaacaggtggcctgtagacaaggcccaaacacctagagaaacttgatccagccattggtactaacatcaggttatgttagattgaaccacatgaaattggcatattggtgaggtcaaagaagtcaaatatcagccatttcatatgattcgatctaataattcctgcaagctaggttcagatttattataaagatgggagggcagtaagtggactctatatcaaaatgcagggtgccctgatctgtactcattaagtgtttatggattaattatgctaaattagaagactcgttaggtgcattagtccattttcatgctactatgaagacataccagagactggataatttataaaggaaagaggtttaattcactcacagttcggcatgcctggggaggcctcaggaaacttacaatcatggcggaaggggaagcaaacacgtccttcttcacaagacagcagaggtaagaagaatgagtgaaaggaaaaaagcccccgtaaaaccatgacatctcctgagaactcactcagtatcacaagaacagcctggaggtaaccacccccatgattcaattacctcctactgggtccctcccatgatacttggggattgtgggagctataattcaagatgagatttgggtggggacacagccaaaccatatgtcattaggctatgaggaaacaaattgaattagtagagttttcacactctggagggcagaagaagttgatgcagcatgttccaaaatgtggtacatttaccactgattatacaaaatataataactactattactgctactacaaccaagcgttataaagtactcactagaacagtttacattttatcttcacaataacctcactttaaatatgaggaaactaaggcacagagaagttaatttgctcaggatcccacatcgggttagtagaagagctgagatttaagccaatgcccttacaaattctgccatactgcaagataattccagttagtgcataaacaaacaccttgatttggatagtggtaattattttagtgcatattagaaaaagtatttttttaccagctattaatgacttaggacaaagctaaatgttaagttgattaacatacgctttaatagctaataatattatagtaaaccttttagtaaataaataacaattttatagaaaacaatagtacataatacacgtatattctatatgtacattgtttatatatggtagataatagtaatcatttgcttctgaaatcaatcctaggaggggttaatattatcattctgttttatagctgaggaaactgaggcacaaagaggttaattagcatgcccaaggtcacctggtgaataagcagagtgtgactatcaggtgctgtcagttggaccataaagcctgcacttccaggggtgtggtagagtagctagcactggttcccaaggtcaattatgtgcatctctctccaactccgccttcaatgagagcacattggtagctcaaaattagccttgatgggagtatttacaccatgcaaattggtaaacactacaaatcagggtgttttgttttgttttgttgttggttttgaagagtcagtttatgccgggcgaagcagctcacgcctataataccagcactttgggaggccaaggtgggtggatcacctgagttcaggagttcaagaccagcctggccaacatagtgaaactccgcctctactaaaaatacaaaatattagccgggtgtggtggcgtgcacctgtaatcccagctacctcctccagagaggctgaggcaggagaatcacttgaacctgggaggcagagattgcagtgagccgagattgtgccattgtactccagcctgggcaacaagagcgaaactccatctcaaaaaaaaaaaaagagtcagtttaccagcataccactaactattacctattaagtcagcagtccccaaactagaatgtacagcagcaatacttggcaaaaaaaaaaaaaatttctggtttgtttttgttttttattaattaatatattcagcttttattattattttttaatgggcacataattgtttttgttttgttaatacagagtcccaggccctcacctccagagattctgattcagtcattctggggtggagcctggatattgctttccattaagttcttcacataattctgataagtagtacaagttgggaaaccaatggactaaatcagtgattcttgaccttggctacatattggaaactagggagcttttgcaagcattaatgcccaggtcacttgccagacaaaattgaaacagcatctttggggttcagggcccagacatcagtatttttaaagctccccaggtccttcagatttgcagccaggcttaagaaccatcagataaaatcatttctcaactcatttctatctctgaagcctctgagatcacctgtgtttccctgtgaggtttttgttagaacatttaatggtttagttccatgtgggcactagcagttagtcacctttgagatttgtctcttaactatccacactactggagggaagttctagtaccagtcacctaaaacattacatgatccccaaagcatatgtctttgttttagatgtagtttttgacccattggtatatgtaggagatttgcattcataagtagggctgacttaggatgctggaagtttgagctcatttttctcaagctcagaagtattccggtaggggcaagttcagattaaaatgttcttctttttctgagccacagggtagcttattcacaaattatgtcttccacacatggatgcagttaactatacagatatttgtttaagtgttttctaaaatctgtgtcatattcaatcagtctgtccaagccacatttaaaatacacaatgtcattatgagatattaaaaaacatctaaaagtttgtcccagtgtgtgcgggtagcacaatgatataaaagcataatttaatagtatcagctgtctggtcaagtatattttccagctataactaagggttagcttgtttgtgaacagtttttcttttaattgttttgattggaaatctacttgaaatgcattacacaaccttcttgcctttttaaacagggtactgactataatcttttctcaatgactcaggatcaccattgtgaccatgtctttccccagtggctgcatagtgacccactcccctccagggcctcccaagatataggggaggcttgcccctgccctcgatagtcccaaaccccagcggttggtgagtctgcatgtctggtgttgcagttgggcagcctcctccctcaccgtcaggcataaggaaaaatgatagctctctcttatctgcacagttttttcaaacaatccccctcttccctatttctgctccatcaagggatggaaaccaaacttgttggaattggttgggagtgggagcttgaggactccattatgagaaaactacacatgttttgtgctgaggctttatcatttttattttgacgttggctcctctgaggcccccttttcttcttggttctagagtagattctaaaggtaggtaaggctgtggaatggtataatattatgggggggggggggaatcatagtaattcatgtttgtattacaatatatggctttcaaaacatttttacatacattattctagctgatgaccataacagtccgtggaggtaagtaggggagctgttagtaatcccattttatagatagcataactaaggcccagagaagtttttttttaactcttcttttacagaaaagtttaagtgatattcacaaattccaatttgtgggagatccagtaaaaatccatgcagtgtgactgaagagcttgaaaaaggaggagatggagaaaggatttgctcattcattcttgaatttgtccattcagcaaatatttactgggcccctactatatgctaggtaccattttgtatgctggggatgcaatagaaaacaggccaaacaaagttcctgggttcatggagcttatgttctagtgggataagagagaaaacaaatagtgtataatacaacatcagctattggtaagtgctattggaaaaagaagagtcaaaagggagcaaatcatggagtttcttaactacatgggtaagatgaaccacactgattttttaaaataccagagtttttaaaacttgaatgaagtgcccctttgaagacagtgaaacttcgtgaaaagagaaggagtggtgcaaatacgcatcattgtagattactgtttcttctaacattttgggttactgatagatctgccgcacttgactttgtaccttagctctaagatggttgcatgcgcccaggaaaaggccatattgccacaagcatcaccaggggagaaatagaaacaataataagtttctcaagtcccccaggtagagatccccatccctactgagaatgccctttgatgcacagttgccaaacggagagaaggagagaggtgcctgcttagaactgatagctatcacttacatctcattggagaacctctattgttttgtatcataaaactgcaacaattataggaccatcatggaacctgctcaatccattcgctgaaaattgtttgaaagtgtaacacttgactactgtggctttgggttgtcctcattgtttttcaaattaataccttgtcattgtttcagcaggtgttaagaaatgttactagcatcccaggggccaagcattggccctttgcatgataattgtttgctttgtatcaggaaaaaaaaatacagtcctactgtttctaaaccttcctcattttcaccctggaaattacacagaagtgttaactaacttcaatttacagtgcctgacagtcacgtctagtagagaaatgatactttgtgatctaaggtaaatcacagtaatgaaaactaatctttttagttattagcagacatatatatctactgtggaaatttgaggggtttgtggccactctcctaatgacctatattacagtgttttaataggtttctttggagataactttgattgtgacatctcaagcagagtgctttctgagtttctttttttttttacttccctacaataagtcatttcctaactgcaggatgaaccaccagcttacctttccagaaaatctgatttatttaaaaatcaaatcctctcctccttcccctgccttttgtttcttctcttcttcttcttctttttaatccttggactttaaggctgcactggaagcaaagacaaatggtttagtgtctcctctgagtgaactaattaattagcaaatactatatccactcaggttaagctatacacacacacacacacacacacacacacacacacacacacacaatgagacttgggtaggaagaggtatagattgaaacacaattttttttacttagtactttctcaatattttaaaagaggaaaaaggaatgggaagttccatcacccgtctgataatatattaaggacagtggaaaacagtatgtttggatattctttaatgcaggtttcaatccaaggcaaagtcagagaacatctatgggttatgcagtaaagatttatccattagataaatttgccaggaaaaaatttatcatagaaaaactatttataaaatcctacaatctcaatgcccttcttagccaggcttgatttctggaaagaggaagcagttctaatatcaattcctaccagcccaggctgtggacagcaatcccatgcctacaaagctgatccagcagaagcatctcagggtgtgtgagggcaagtagagggtacaagtgaatggtaaacaaggaagagtggctgtctgaaaattcgttttcatgttttcctgtttctttacagaaacccgggatggacgtggccgacgcctacgtgactttcgtccgccattctcaggatgtcctgcgtgataaggtcaatgaggagatgtacatagaaaggttatttgatgtaagtaaatgccttctcctccttgaaaaccaaggaggagaccctccaaaatgtgacaaaataagagacaggaggataagtcacattttgagaaaatggattggttctgattcagactaaatcttttcctctccctctgccttaggctcttatctgtcttgtgtctgttctgaacccactctggtgtggcagtgtctcagtcccaatctgtgtgatacgtaggacggcacacagcctctcggcaagcaggctcattcctgcacgaagcttgcaaggcagctctctctaactggcaaagacctttcttggtcatggttttcctccttgcaatctggcctcactttagggagatattctcatcagggaggctgagaccaactccctctcctgggggtggcgcctccctgacaccagctgtggtgtgcagatgtgcagtaaatgtcgcatcgttatcacttcaaagataatttcattcctggaagactggaaatccttaccctgggttttggcaaacacttacattagagttgctcagtcagttgcagctttaaaccatggcgccccctgcccacccagccagctgataatttatgagaaacaggtgtacaaagaatgagtacattgggctgcggacccagatcaaacttcagaaaatgcagattaccaagggttaatcatttttgagcaatcttatttccactgagactgcatctgcacagcaaagcaagccactgaggcaaaaagaaaaaaaaaaaaaaaaaaaggaacctgcttcagtctcaaattgcctatctcttttaggccaaagcagatgaggctacctaatttagccagatatttcatctcgggtttccaccgaatttgccagtgtagacccggccagagtgcatggaagctgatgttcttgtctccctgtggctctgagtgtgcagcctacttctgtcttgtgaaacgtgagctcctcctgtccaggtttccatatttttagtgccaatgcgaacattaatgttttggtctactatggaatccatgtttctatttttttttttctgtgattgtgttcagcaatttacattgagtttgtgtgtgtgtgtatgtgtgtgtgtttttgttccacagctaagtgagctcattgttggcaccgctttctgattctgcggcttctgacttttatatgctttgacttccagctcatttgctttcctcgtgtgtagaaaggctcctttctttttttttcttttcttttccaatcgtcccctttctgtgcttgatacccctctttcccctgcatcacctttcctcgacaaaacccttcttactttttaattcccacccatcctctctcagataaaaatggaacttatctctcatgtcaaatgttttatcacattatatcaagtggcatgaattagaatcaaataatcttcctgtgtacatcttctagcatgacccacatccactgagaatgcctcatacatgcataaagctcaccagcgggtcctcccccttctctgcatgcatgccttatatgaaagtactgagcctagaatgtccggggcacaatcaccatccaataggcattgaaaacagagacaggcaggaccctcgggtctgcagttaggagtgtggacactctgcccatctccattgaattaaattccaaaccacaaatattcaagaagcctgtgggttgtccttttcaatgcctaggttgcctttctttttcctttgatcagtatcttccgattctcagttttatgtggcccgtgtgtacgtgtgtgtgtgttattgtgtgagtgtgtgtgaataaccaataaccttgtgttctctaaaacttaaatctagtactgaatttgatgtttaatctgcagtttagcttgttacttaattgacaaataatccacccttgcctctctttttttgaaattagaagtacaagcaaggtagccttgctgaacgcagcaaggcacattatctcttttgtggctcttcttaaaggaaagtgcaaccaaatcttcatttaaaaaggaaaagtgcagccttggctagtacaggtggtaaaactggacttgcctgactgttgaagaccacaggcaaaattcaagccctccagcctttaattaattaattaattaattaatagtaaattaatagtaaaaagaaatattactgagaatatttttttccgaaagcaagttatagttagggacattcaaaaattcacaagtaactccagtcccttgttgaattccactgaccagcataaaatagcatcagtaacattgtggaaacccccacaatttagtctgatgttgtcccaatttggttttcccaacggagtcttagttataccctcctgagtatatctgatggtaaaggcttaactattacaatcactcactgcacatcactcccggccccgtggaaaaaaaaaaatttttcaggagcttatttagagataacaagtttctttgccatttactttcttactttctaaataacctgatctcctactttacagaatattggtgctaggcaacctaactgatgtagtgcaaaaaaagttattgaatctgtcatggatttaaaacatttgtcattttaaaaacccagagcttctcgaaaagcttcattaccatgcagccttagtaatttaattcagtacttactgtttttctataatctagcagcaaaacatcagattaccaacatgtttgattattttcggcttctgtttcctcaagcatggtgtttatttctttgtgtacatgctctgcaaatctcttgtgtccaccaagctaaacaagggaataggaatatcaaggcagaagggtctgtgaaagctgccactctaaatttcttgctgcaaatgaacttattctttaaatcccattccttaatgataggggtcctggggcaagtttctaaacaattggcagaaacctattgagaaagacttgttgctctgtgagatttttcttccaaatcgttgcattttgataaatggcaaaaatgaataatagcaaattaacattttgaatgaagaaaaaaatatatatctccgagattgtttgctgtttgggggttgttgattctgactgttgtgtcattctctggtttttagttcctgctggcatctgtcattcagaggcatgttctaagagttcctgttgtgtttttaactgtgtttcaagtctcagttttatttacctgataagtcctttaagttgttgctgtttggtattgttcctgtttttgcccttctgagtgtgcccttgtagaaaaggctggatggttttagtgtgtgtttgtatttgagaatatttggattaatagctggtcatttaacggtgcattttctgctttaactaggcccctacccagtgctctctgagctagttttctctctgccacgtcattgtacttttggctggaagtgggtgcttgtgggagattatcggcatagcatttgggactctatatttgatgttctgcatttttatctattttattacgtaacttaagaacaggctttccaaattcatcctcaccgattttttttgttttaaccaagcattctctaggtttattggagaaatacatttggacataatgttgcctaactgggttgcttttgccattaagattcctttgtttattaatataattgatttacctagtctttctataaaatactaatgacttttttgataacgcacctaagaaaaaaactaaccaatccaagacaaagtgctgatcagaaaagaatcggcaaactgtttcccataatatttcagatgtgcagctggacattttttatctgcgtttttatattttttcataaaaaatgaagtgtaattgtatattgttttcagttgctgcagaataacagtttataacattttgaaacaaaacaaactgagatttaaagtaagagaatattccaatatacacaaaaacaatgaattcaagtagattaaagatgctgaatttttaaaagaagatcagactgctgtgagactcaagtggaagcttagccttcttgaaaattattgctgacattcaaagaaaatataaaacatggatatgaaataatctccatattcctaaagcagcagctacagaggaaagcacaagctcaagaaataacttgaagacagtgatttaaagttggagtatccataaatcatgcagatggcttttccctccttctctagtgattaattcaacatcttccccaaaataaaaacatgctttttgaaattagagatcagatcatcaagagacgcacctaagatttcaaggtctaaacaaaaattaattttctttcttccttgtacttcttgaagacacagactgagaagaaaatcgggattaaaagagatgtgcttagggtgaattcatctgcttaaacctcacaggctcggagatgagtgattaaaaagccatctcgaacttggatggaatccacattggtagtaatgccgcatccgcactggctttcttcaggccccgtgtcattgggaaccaggcccagggaacatttgactggagatgatacatggattatataggtcaattatacacttaatctgccttctggaggattaagtatttgcagattgactctgcatttggcttctccgtggcagttatcagatcaggaaagggcctcttaccaaaccacctcgtaagaacttaatcaagcagtgtggtcagcttcggaaggggctgctactcagtattctttgcctcgcacggattttaatttgctgttccattttcaaatcgtgtatttgtccagtttgtgtggcagaacaataattgagtgtgactagttcccttgaaaagggtaatttgaaacatgaaacctttgcctgttaaaatatatttgctatatttatatatgaaaccacagatacccttattttaacaaccttattaaattactaaagcaccatacatgtgagcatatatcaatcaaagtaggaatcatcctgctggaggatgaaagtaccaaataataggctacaaggaggacatgacgctatatctgtaaggtatatcaccagctgtccaggtaagggaaaccacttccaaaaatatgaagtggggagaggtgcataggattcactaacacaataagttgcacttctaaggggctgattaaagaaattcaaggcatatggcattctagacactgagacagtgagttatctcctctctaagcaataagcagacgtgagtgccctgaatgggacttactgtgcagtgatcatgggccctgcctctggaaccttcagacctgatccttactagctgggtgaccttgaacaaggcatttaatctctaagagcctcagctgattcatctatataacagggatgataatcgtggagttattatgagggtgaaatgccatatgaatctgcagcatcgagctctgaggaagcattggtaagtgttagccaccaccatcatcatcatcactatcatcatcatcatcaaaatggaaatgcttttcccagccttctttttttccttgttaagcaaagtttcatattcatgttaaggtgctatgagtctccccatcactttaagacattaaccccaagcttgcttagaattgcttgatgtagagcagcctggtaccttttttacttttggtaaaacatcttcctgaaacaggcaaaatagtgatggtcaggagtggggctttgaagtaagacagacagaaggaggaaacttggttctgccacttttgagctttctaacctggggtcaattatttcacttccctaagcctcaatttccccatctgtaaagaaactggcttcttacagttttcgtgaggactaaatgatataatgaatgtagacagacgtagttaaaaattcaatgagtctcttatcatcatcatccttatcatctcatagaactacttgttccttcaagtgattttgaaatagcctagctctaccccctcaacaaaactacactgcattgccaaataaatcagaattaaccttcggaacttcagggttttggggggtgggggcagagagagggagggagtaattaataccctttactattaagatgcagtatatgtatattgtagacatttagaaaatatggctaaccaaaaaataagaagattaaaatgttgtgttcccagcacccacatatcattatcagtggtgttttttttaatctttttctatataattatatatatatataatgtactctttttctaaaatgagtaagcaaaaaaattgctttttaaagttaatggtcactatttcccatgccagtaaattttcctctcatacactgtattcaaaattacccacttgtccccaaaatattctttacagctggtttgtgcaaaccaggatttgatgcagggcaaggttgtgatgccccttaaatttattttgaaccagcactggcccttttttcatgatcttgacttgttatagggactgccgtgccaattgttctgcagactggaggagtttattactatctaaacatagaactgatttgctgagaaaaaaaaaaaaaatcaagctgaattcaaccaagtagttcttttaaacataattagtaacttagcagaattcaaccggggttttttatttaagctgttctctgtatgtaaggaaaacttctgaagctagtttaaaaaaaaaagattgagggggggctaaactgtaaaaaactcacagaggccagagtacaaggtggccatgtgaagacatacagagattttaactactggaataaggcacagctatctgagctgggtgggtaaatcagagggtcacagtccagcatttcttgtgtcactgtaactgctttgaagtcttagactggtgactttgacacacacatacccatactattgggaagggtcctttgttaattctaccgggattttccccgaggttatcaatctgaaattaagccctccaaatcagtctgaagctgagcttttccatactctttagatcaaattttaattgaactgtgacctcatctctatcctcaattatgaagctaaagagcatgtcagccaggctactaggacatcccttagaatctgtgagattatgtgtattgaaaccagaaagctaatccaaatgaactgggaaaggcagttacaggaagaagagacagttgattctttcatctattttcgagccccaaagtaaactctggcaattaagtcataccctaggccatgcattacagctgtagagtgtcatttcccaaaaagaatacagaaactggagacaagttggagggaaatgagaaacccatcactcaccttgattggtaacattacctactaaatattgttacgtaacgggtatctatatatatatgatatatatattttaaaatagggtgtgtgtgtatgtgtatgtatgtatgtaagatatataccttattagggagttaagtttccttggcagaggaaaaccatgtattcagtcccaatctaagctctgtttggattcttggaagtgaacctcaggatacttccaagctaaaattaaaaaacaatccaagttcgttttcatgacttatgccctccagggccactcgaattcccagtgtcttcatgctttctctaactcccaccatccaaatctgcttttaacagttttgataattcctcttctattaggatgagaggagatgaaccgagtgttttggtgcttttctgatgccctattgcagtgaatagtattcaaatgtcaatcccctcttcccccatgggcttcacaattacaagtaagtgataacaattaattactttgcttttggagtcttaggtatagaaacacatttccattccacatggacttgggaatgcttcactccatgcctgggtattttgaactttcagcaatcctgcatacaaaaaaagataaggggcattaacagatttggattaatcatgttaaatgggttattactatccaaaagaaactgaggggttttttgttggtattctcacagatttacatttctgtaacatatcttcaagtagttttctaatctagctatttccttccaaagccattcatagaaatagaactctcttaccttcaggcaaaccttacataaagccagtcttgaattttctctggagcttgtaggcaatgaagagttttgctaagtgtctttatcagaacagctttctgtgttccagaagacatttggtgaagacagttaatttgttttcctttccagaggagaatgttccattaatcattctaagaagccaagctgattgctctgttacgttaaggtcacagtattcttgttaacatgacccacacaatacttctgtgtcttagaacaggggtttttttttttcttatggcagacttaacggcatggaagcagtaagtgacagactcaaacacagtacacatgtacaagtacgcgtgtgcacacacacacacacacacaaacacacagagtagccaaagcacattttgtggaagaaatattatcacattgcattgcaggagacgagctgtgttaaatcctcaaatacttctcatttattaaacaagtaactatttctctccctgctgggctccagataggctatcaaaagatttcacgatcaatacctagatacatagttactgctctaattattttaatgagtgaatttaaatcttgcataggttctttttattcaaaatgtgatccacaggccctcagcatcagcatcatctggaagtttgtaagagatatatagtctcagccctaaccccagaccaaatgaatcagaatctgcattttaacaagagtctctttgattcaagtgcacataaaagtttggcacatagtgggcaagatcaattacttcaaacttatttgccccaactcacaatgagaaagaaattttacattgcaacccagtgtgcgtgtacacacacacgaaacaaaagtttataaaacaatatttatgtgatgcagtctgatagttcctgatattaccactgaatttcaaaaatttcagtggtaacaggtaaaatgattctactacacacaaataagtttacaatcctcagtttcaaaaatacttctaaagcaaagtttctcgtctttggcaccactgacattttgagtcagataattctttgttgtagagtgctagtctgtgtattaaaggatgttgagcagcatccctggtttctactctagacaccagtagcagccactgtccttctcaaaatgaagaaaatgtctccagatatggccaaatttcccctggggggcaaaatcatccccatttgagaaccactgatctgcacgaactagaaaagaggttaccactaaaagtatacaggtagcccttcctctctggatgtaatacagccccctgccactgccatcatcacacaaaaacgcgatgagtatgatgtagcaacaacaaagtcgagcttaggaattgttaaaatgattactcaagaagtccatgtgtccatctgggagttagcttgggagcctttgccagtctctgaaggagattatgtttggaggactccatgcaatgatgggaaaagcttgttagacatccaggaccctcttctcccctgactgtatccagagtagtcccacttagagccaaaagaaggaactggaacagcacgttagatcagcaatacagcttcccactttggcctcccttgattacttctctttcctttcctttttatagttccacccggacctcaatttaaaaaaaaaaaaaaaaaaaaaaaaaaaaaaaaagtcttgcttccaccaggtggctgcaagttatttttgtgtgtccaaaaacctgaaaagaaggctcaacttaaatacttcattcattccaaattcccagttcagaagagaacagttaacagcctcctgttcttctgttaaactcctgctgagttgactaaaaatccagttaatagagtctagtgatttgcctccagtgtgaatattcctgtatcaaaaggcttacaatgatagtgtcacttgccatattgggctgccttgactgcctttggcagaattttccattctgaccatccctggactaaagccagttataccaacaaagctccaggtcttgcccaggatgggagtattattaattaacagatctgtatgccaaccaaggtataaagcccctctcattatttgtgtagaaaaaaagattttttttttagaaaagaacaaataatatgtaaagtaagcaaagttaaatgcatgagttgctttctagtgaaatttctttaaaatcatcttttaaggaagagaaatatcactcccttttgttcagaaaattcattctttgccctaggaaatcatcctgttaaagagaaaagactcagttattaggtgcttcattagtttggggaactctgagttagtgcttctaccggggggtgatttttgtcccacagaggacttttaaccatgtctggagacattcctggttgctacaactcgggggttgggggcatgttactggcatctagcaagcagaggccagtgctgaacctcctgtagtgcacaggacagcccctacagtaaaggatgatccagctcaaaatagcaatagtgtagagagattgaaaaaccatgctctagatgatacttccactgacacaaatcatttgtctttagtgaatggattatttgagtttaaatcatgagcatgatctgtgggactccagtgactgtctctaaaggatattctacctggtagatatctcgggaactcgtctcagaaatccttttgacaagcttcatccaaaaacatgtttttaggagctaaaaaataaaaagcaattattaacacctaattttgccaacttgaacttaacactcacccatctatagttcccatggagcattaatgcttcaacaaaaactcagatcttgtcagttcaatgagtcactacagcctccttctactgaaaggtgccctgtcaacttttcttttttttttttttttgatacggagtctcgctctgtcacccaggctggagtgtagtggcgcaatctctgctcaccacaagctctgcctcctgtgttcacgccattctcctgcctcagcctccctagtagctgggactataggcgcctgccaccatgcccagctaattttttttttttttgtatttttagtagagacagggtttcatcgtgttagccagtatggtctcgatctcctgacctcatgatctgcccccctcggcctcccaaagtgctgggattacaggagtgagccaccatgcctgaccgccctgtcaacttttcaagggacttgtttctttatatcgagcagatgttaggagcataggctttgcagtcagacatttctaagtttaattcctgggtctgccacttactagctgtgtgacatcgggtaagctactttaccctctccaagactcaattttcttttctgtaaaaaaagtggataaaaacagtaggtagctttttgaattaggaggactaaatgaggcgatgcctctaaagcacaaaccacagtgcatggcacatagaaatgactccatgaatatctcttcttattgttgtcgtcatcagtagtggtagtggtgtaaaaaaccaacacacggccgggcgcggtggctcacgcctgtaatcccagcactttgggaggccaaggcgggtggatcacgagatcaggagattgagaccatcctggccaacatggtgaaacctcatctctactaaaaatacaaaaattagctgagcatggcagcgcatgcctgtaatcccagctactccagaggctgaagcaggagaattgcttgaacctgggaggtggaggttgcagtaagccgagatcgtgccactgtactccagcctggcgacaaagctagactctatctaaaaaaataaataaataaaaaacaacacacaccccacaccctttcctaatactaaggtaggctttgcagcggagagaaaagtagcgatacattccacaccaacagggatctttaccagtgatgaaatgatcagaaaacatgatagcaagtagcagagagctcagttgtgccacagtatcgctaaaggaaatctttcttagactaaagtaatatcccagtgagatggaagcctcaaagaaggtgccccaggaggcaggactgggcttaatctacagatgtccaggatttggggaggcgaaagaggcaggagtctatgcttaggcactaagcaaggaaacattattgcttcctttgggagtgtccctgacttaccaacactgtatcttcattagccttaacagagcttctccttggaaatattctttcagaaattacactattcacttttaaacaaaggatggcttcaacccagttatgatgactccaatctaggcatgtaggtacctgctttgtaggcattcgctgctcgagaaacttgagggctaaattctttttatatgcgtgtaattttgtcttttaatgtttgcttcttaaccaggggtatgcatcagaactacatatgtacttttttattttaaaaatgtactcattccagttgtacattaaatattctgattcagtagatctaaggtagggattagacatctgtttttaaaataagttccgagagtttaatctggtcaagaaccactaatttagagcagtggttctccattgtgggtgattttgtcccctacagcacatttggaaatgtctggagacatttttgattggtggcgggagggtgctactggcatctaatggataggcggtgaacatactaccatgaacaagacagcccccccataacaaataattatctgcaaaaatgtcaatagtgctgaggtggctgaaccctgactctaaggataaaagatactgaaatacatgtttatttctgttaatacccttcctactttgtatcttacaagacttcataactttatttattctgtagcaacactgtggagagatgggaagagatagtattattttcattttaagacaggaaacctgaggtccaaaatgaacttgcccagatcctcagggccctttcttctgaaactatggtattttcatccccacctctgagagcactgttattgtctacctaattcaccactagtgtccggcatatgtaagccttcaataaccatttgttaaataggtattgatgacttcctagccctgatagtatcttgtgtagtttgtcaggtatattttcggtttccaattctaactcaaaaacatgaattaagtccttaaagaatctcactgtggatttttgcaattgtcagttgattttttgtaagccttgaaaatatagtattctggttcatgtaatgggtaatgaatcgctttggcccatttgattttttggtgaatttgaagattcattggaaaaccttttctgtttcgacaacttttgaaacaattttgtaaatgttttagttctgttttccaccttattgagcatctgaagccaagtctaatgctctgggtcaagacactttagaactcttgcttcacactacttaaccccaggtgtcactatccagtctcaaagatgttaaaagagtgaattatcaggccaggcgcggtggctcatgcctgtagtaccagcactttgggaggccgaggcaggcaaatcacgaggtcaggagatcgagaccatcctggctaacacggtaaaaccccatctctactaaaaatacaaaaagttagctgggagtgatggcacacacctgtagccccacctactcgggaggctgaggcaggagaatcacttgaacccaggaggcggaggttgcagtgagctgagatcgtgccactgcactccaacctgggtgacagagtgagactccgtctcaaaaaaaaaaagtgaattatccagaattgcactgcgagtaagttccccaactctggatacagtgctctttctgccatactctgtgcctctagaagatggggctacagtgtttgtcagcccaaagcacattctgaaagctgctcttttgatacaaatcccaaagagggcttttagggagagaaaaaaaggcagcattctcctaagaggaaaacacgaggaaagattccaattaattgaagtttctaataaatggctgtttaataataacaattataacatttatttagagttttctaaatgtatattttcctgactgtacattagagatagcagcaccatcttgttaaatgtgttatttcttttaaatcctcttagcagccctaggatataggaaccttcgtgatctccatgttacaggtattgaggccaatgagagccaatattcactgggcactatgtaccaggtactgttctaggcacttaagtgtaataatgcatgtaattttcatgatctccttgtgaggtaggtttttatagatgaagaaattggtttactgagtggcaaactgacttcggcaaattcagaagcctggaaaatagtcctagatccaacctctttctttctgaccacaagaatagccatgtaactataatatcttaggcaaaaactttacactattcaaatatgtgcttcctacccctaaaagcccccactatactgagtgctatgtgtcccaaattcatccactggggttcttactgtaatcactatttccctcatggatcaccgcaggatataagacagaaattgtgattctatgaccctctagctagaacgtggcttattagtcacagcttgtccactaacaatgatgggtgttgcatagctaatcagagagaccccttaatgaaaattcaaccccattagggcaggtcttttcgtgaatgtggggacattgtcactggactcaagctctatgaataccagcagaccctggtcctaaaatgatcccagaaagcacttctgtaacccacttcagggtgataccccatcctcagctgaaagagactacagcgcagtagggaatcttgcataccatatatgcttcaaaatccacttctacctaggcctaactaaggggtaggtctcagctttcagtctatctctccctctgtgttctaagatcttttatcccataagaataaagttttgtggtttatttggggggtaaaatgttggtaacacaatagcattacatcccagacagttaataaatggtttagggtagcagcttaagttccttaagcaaagcttgacacagtggtattattaaataacaatgctcaagattttccaatgaggtactgttgactcttttaacctacctacatagctaagttttcaatggcactatgaggtttcacagattagcaatactttatggaaaggggaggtgagtaatcgacagttatagaataacatggttatacaatctgtgcataatacaaatggagttgcaactaaatcattacgtggtcattatccaataatgcctaagatgtcagcaatgtgaaaatttgagatcaggtatcaccaaagtcctttcttgatttatttctaaccaaagcttacactaaacaatgtgacaaggtgatgaaagagaaaaaaagtaaggaaggaaaagaaaagaggaaagaaagaaaagaaagagaaaggaaggaagaaaggagaaaagaaaaaaagggagttgttttttctcttgaaactttaaagagctttcccgatagatcgtcagctgttagccaactcttgaaagtggcaaatcccttggccattggaaagtggcctatatgcattgtttctaaagagtttgtttattcaaaatatgtctggttttggcattcaggttgggggctcaggggcagtggctgaggtcagcactgcgtaccgtttaatgaagctcactcttgcctgtggtttctgaacaccatcaaatagtggtaactgaggcagaagggtaagtggatgtggacgtgagggaattcttgtaaaggctccccacttggcttacacagaattagagaaatggaggcctgcttgcatttgttggtgcacattagaaataaatttgggcattcaacttaaagaactcgctaacgacaagatgcacaaagaaatgctattatgtatttagcacagtctttgtaagcttagccaggcaaggaggcttatcaaaagaaatatgtaaataacacaacctgctttacaaaggaaaaaagaataaaattaatccaagacattcgtggcgtaatactattttctgccctcggcttttctttttataacttgagacatgcagcctaacagtccagcacaaacaatagcacactccaaaaaaacccagacccggggcatccctccatccctaggaaagaactccaaatgcgtctccagcctcacacacaatattattatgaaatctgacattgtcatagccaaatccttggcttgggcaaagtccccccttccccctcctttggggggaaaagggggaagcgtcaggaggggtgggggaacgaagccaatcaaagttaaaataaagtctctttctagcaagactactgtctataacatgttgttccttatagaaagtgggatatggtggcatttgcttgattaacttgctcgacaaaagtgacagctgctgtgggtgcatgcggataagctgcacggcgcagttccgcctttgtacatctgtcagcaaaaagggaagaataaagagtgaaaagagacaaattggtcccaaaagacactccattcaacttaggaggtttgccccattcaggcgctcgctgtgcgcctcaagtactgagagcttattcaatttcattcactctttcgaatgaacccacaagtgtttaatttcttattctgtcacctcaaaagggtggggggtgtggggaggaagggggagggagccttgtggacgagaagcattgacggcaaggcagagtgatccgggcctcacgtattaactcatggctaatttatgatttaactctctgtgctcaggccctagacccatctgaacacttcaatgggggacctgacgcagacttcttacctcctggctggtggatcccaaaccatctgtagctgtcgagggcacccagcatgttgaatgtgtatcttgtataaggacaatggtctgaggtttgtgccttttacagaaatgagatggctggctccccagggtaaggtttgggtaagtgatctggcaagtgtgtgtgtgtgtgcctgtgtgtgtgtgtgtgtgtgtgtgtgtgtgtgtgtgtgtgttcgttctccctcccataaagagaaaaaaaatagagtcatatgcagtgagaagtagaaagaggagaatacggtttcctgagagtaaaaataaagcaagaggaaagggcgccattggaggcagaacccagctgtacatggtgaaaacacatgttaacttttaaaaagcagcactttgtctttattttcctcattcctgggccccaggcatcagaacctgttttctagactcccttaattgggcagttgctatggacacccaaatattccctcctaggagatcaagatgccctctccatccacctgtgctgcctgccatgctctccccaatctgctgccatcttccctcctccagccttcatgccactctgccttctcttctgaaacccaacacccctcccagctcctggaccaccatctgaatattgtccctgcacccagtccttgtatgttgactgctttttggaaaccactcaatgccatatccagctcctaaaaagatcatgttcttcccttatgagaaatcattccccaaagagctcatgttcattgaattgaaatagatctagtttcaaaactgtctagaggactttggaaagtgttcttaacccagttagagttgttgggtcttattgtcttcaaattctaggattccagacagtaccttttagatggtatatttgtgtcctttcactatctgcttggaaaccagctgtgtggtttaatgtaaagcattccatttacctattcacctgaatttttttccatgtaatagcctggaaattatgtacatacatagaccatgcttttgtatgttgagagtaatgatgaaaaccacctcagcccgggaaagcaactccctaaagtcaatttgaattttcctaagtaagaacttcaactttggctcacaaaactctaatgattcatgactctagaaagtttaatgtgtgcaaattatgaaattagccctaatatgattagccaaccctgttttaagacggcagagttggcactccactttatctttccgttctgtacatgagttactatccttattttagagtatgatttctataatcatttctatatggtatgcaaatttcttattcagttgcttacgtcaatctgcttgcgaattaatgcagttcactctaaatgcagttcccatacctaagaagcgatcaggggagtgggcagatgctgttcgtgaacaatctgaattcagttcatacgctgaatccttctcctacatcttaagttcttgtatgcatatcagagaatagttttcagataaattattcgcactgctcacaaggataatgggtggtaggatgtgccaccaaaactggaattttctttttgacataatcaagctttaaaagattgagacgacttgaaagtgcaaattcagattgtaactatacattttctcaaaacagtaagttcctttgagaggatggaggctaaaggcatgggggtccattttctcagtgcacagggaggcctatgaataaatcccccaacatatccagagaaaaataggccctaggaaaaaggtattgttaacagtggtcagtttgttaatgcccaaactgcacacctgccctgggagacacaggtggcagacaaggcctggttagaagctgattggggcttaatcacattgggctcattatttatgtatcttgaagaaagaaatggtcggaactgagaaattcaggtacataagagagccattccttttctcttacatatcacagtttcccggtttgcttgcagaaagtaaggtgtcagcttctgatgtttgctacaaaaattttctatgtaagtgtcacaaaatcgagttttcctgattttgctgtgatatgtcctgctgttgagccaggggtattagagcagctggtgtctggcccatgttccatttttcattcagggtttgaccattggttacatttttatttaatttcttagacattccgcagtttcagaagttctgttgtgcacaggcaagcacagatctaattttgacatctaagttagattctttctttcaaggcaggagggccttggaggctaatcaaaagagatagaggggggaaggtatattttgatatttgggcaccttgagttcaaaggtgggagggttttgaaggtttttgccttgctcttcatttaagttgatattaatagggcattcatgtagttatagaaaacattatttatcagccgggcttggtggctcacacctataatgccagcactttgggaggctgaggctggtggatcacttgagctcagaagtttgagaccagactgggcaatatggcgaaatcccatctctacaaaaaaataccaaaaaaaaaaaaaaaaaaaaaaatagggcatggtgttgcatacctgtagtcccaactacttggggtgctgaggcaggaggatcacttaagcctgggaggttgaggctgctttaagctgagattgccactgcactccagcctgggtgacaaagtaagaccctgtctcaaaaaaaaaaaaaaaaaaaagagagaaaaaagaaaagaaaaagaaaacatgtaacccatgggcttcccaatctctgaaggctcagaaacaggaaaaatacaataaaaattaaaagccaatttattacatatgaaattacatttccttttcttcctttttcatagagaacaaattcatataaatattatatactatagaaatgtaaaataggatttaacaagtcattacttcttaaggttgttaggagaagtaaatgagtttaagtcatatacactgcttagaatagtgcccgatatataataagtgctcactaaatattttcttttcttttcttttctttttttaagatactaggatctcacttgttgcccaggctggccttaaattcctgggttctagtgatcctcccgcctcaaactcccaagtagctgagactataggcacatgtcattgttctctgcctacttttattattattattgctaggtttttttttgtttgtttgtttgttttagagacagtttcacttcgtcacccaggctggagtgcagtggtgcaatcatagctcacctcagccttggaactcctgacctatagtgatcctcctgcctcagcctcccaaagtgctgggattacagctgtgagtcattgcaatattattaatgtcactatagaacttttttccaaatcagattcaatgagacataaacatcctgagagaatttaatgggtggctcatgaagaatagttcttctgttctggccaggtgcagtggctcacgcctttaatcccaacactttgggaggccgaggcaggtggatcacttgagaccaggagttcaagaccagcctggccaacatagcaaaaccccatctctactaaaaatacaaaaattagccaggtggggtggcacacacctgtaatcccagcaactcaggaggctgaagcctgagaatcgcttgaacctgggaggcagaggctgcagtgagccgagattgcaccactgcactccaccctgggcgtcagagcaagacagtctcaaaaaaaaaaaaaaaaaaaaaaaaaaaagagtaaaagaaaaatagttattgtgttaagtacatttggaaaaacacaaagttaaacggacttctctactacagaacttctcagagcgtttaatatgctaatgtggcacaacaaatcagaatcaccaatagtgttcagacagagtacagcatagagtatgcacacatgtattcacatatacattcacaggccagtgaaaaatgcgaagctagaaaaatgtatgcttagctgggcacggtggtgcacgcctgtagtcccagctacttgggaggctgaggtgggaggatcacctgagcccagggaggttgaggctgcagtgagccgtgatcgcgccactccactccagcctgggtaacagcagcctgggtgatgacagagtaagaccctgtctcagaaaaaaaaaaaaagtatattaatgtcacctttaattcctttttaaaacttagagttaaatccctctgagtagtcattttgtcctgtctgtgtttagcccactgaaatgataaaatagcaatggtcccccaggaagaacctccagttttcctcctaccaatctttgagagaccatagctggagacctgagtgggaaacataacttttcctgcagctgggaggctgctggtctctgatgtacacatgttcttttctttttattgggcattgttcggtgtcttcatgtttttgaaggcgtttcacagcctcaaatccataaacttcagaaccacctcagattcaaaaggtgaaaaggcccttactcaaaatttcaaaacaagttcttattctagacaaagagaggagtcgactctatttggagctttccagtccaagtatatgtcaccgtttaaataaataaaaagacacaaactgtctggattggtttagctgggctgggagccctgtgataagaggtcactggtgtgagttactatggtaattgagtagtatcagcaatagttttgctctcatgagcattaaagcacataataataggcaaacaacagtggttaaagcaagcaggtaggattactatgttcttttgtcagaagtatataatgtcttgtagtcagttttaaagacttctcaacccccaaatccaccccaccgtcacctgctgagtaattttgtgtgcttaatctcctgccctcaactccaagctctctgctaatttgaggcaaatgggtatttctgacattaaatagggcagcaaggaagctctgacctagaaaacccgcattctgaagcactgagaaaaatattctttcaaacaattttgttaagactcttttgaatgacgagggaaaaagaaaaatagctttcactgaaacaggaggttgcagcctcccaaggaagggtattttgcagaacaagaaaaaaggaaagaaaaaagaaagaaagagaaacttgcagagcatccccactcccaacttcccccataaaacttgtcacttcgcattgccatccgctaccccaacaataatcactccgtgcctattgctaattgcaagcacagctgaggcccagcggggaacccttgcacagtctcaggcctttatacgaggctcaatctgttgtatggcacttgttcacacacaaaaaaactaccagcaaaggcagaaagaggcagagtcacaggtttcttgtaatccctctgcctccccgctgacagcccagccctagaagcattcctggttttgtcctcctctttacaaaatctgaagtgaccttaagctacgagcatgtcagcttttgaatgtcgagttgccggcttcttcaggtgcattaaggagttgggggggtgggggctacatctggcttctgcgtgtctgtttgcagcacccctggggcgagctgtggcttcctgtaacatgtaaaatatgagtgtgaactcagggttcatggcaaggaacaggaggtcatgcctccattcagttctaagtaaagaaactgggagtttgcagatgtttttctgtatgtgtaatgacaccaaccccctccccagccaccgagcaaccgagcgccgttttttgataaaatgtgccacaatcagtgtgctacttgcagatttattcatatcaatttttgcaatttatatattcagagacaagattgctatttcggcaactttatgttggatgtcgtacgtgtgcgtgtagagaaagagggaaagaagtatggggcggggagggtgggcagagaaagaaaagaaattaagcctgtgcctcgggccaccagctggggtgttgtcaaggagacaaagcatcagacgggagggtctgtgtcccgcttttgcccagcggtcacttcctgcccagacttggagctgggatatctattgcttctggcccagaggaaggcccatgaatggctactttgaggggagagtgggtttgggggggttgggaacaatcccccagtagacaaggcccaggccacttgaagaaaggccttcccgtcctccctggaggtcaagaacaggtaggcccgagaagagttttgatgtggcctctatttgggcctagtggggggctcccagcccttccttcccaccttgccaccctctgagatgagaagggaattaagcctcctgcaaaattcccacttgcagaaatttctattcccagaccccaaagcctcacactgtattttcaccaacagaagacattggttgggcgaacagggagattaatcctcccaagcctggagaataaatgctcctcagtggggcagtgttaattgctgagcttggtgcaaagatcattttgaggcatttaagaaatacatgatttttattagtataactgttccacgtaggagttatttttcagcaaagggcaaaagctttgcctgccttgcattattagcctaattctacttaattgtttcctaaaataagggcttcctgaacacacattccaaaccttaataagtctgttgtggtgggagtgattctggatggagagctgttgcccttttgggcaactggggtctcagggctgagtattgcttgagcagatctggcttgaaaaattggagcgggggctggtggataagggacaggggagtctctgtgaaaacatatgaggtgatgtggttcacggtgtaaaaaaatgcatccttttcttgttgtttggatccagtcctctatgaggattctcagttctcatctctgggcttcatttaattctatttcacagatttagaaatgttggccccgtggcatgttttaaataaaccaaataaatgactgagcaaatgctaccagatttgttctttgttcttcataatctcaaaattctgtggagccttgagagcttgagaaattgcctcagtcctgggattaaatgaaatgactacactcatcttacaaagatttttttttttttttttaaagtatgtttgggtgtgccagattagaatatgtacattgctacatatctgttctttcttaggcaaagtttcgttttaagtatgggaagtgatttttatttcccatctttcttttaattgtcataaaatcacataacaaaaaatgtactgtcttaaccatctctaagtgtacagttcaatagtattatatagattcacagtgttatgcaaccgatctgtagacgtcgtttcatcttgcaaaactgaaactctcacccattaaacaactcccatttacccctccccttagcccctggtaacactgttctactttctgactgttctagatacctcatataagtggaatcatacagtttttatcttttcgtgactgacttatttcatttagcataatatcttcaagggttatctatattgtagcatgtgacaggatttccttcctttttaaggctgaataatattccattgtatgtatataccccattttgtttacccactcatcctctgatggacacttgggttgcttctaccttccagctattgtgaataaagctgctatgaacatcaatgtgggcgtatctcttctagatcctactttcaatgtttttgcatctatactcaaaagttccacttttgagtaagtataatggtacttactcaggttgtggaaaccggaaaagtggtatttgcttttgggttggaggtagtattcctaactgaaaattcacatcagtgcctctgctttcccatcttgtgccttcgtgtctttaagttggtatcaatgagttgaactttggcttagttttctcctttgaagatggtacaccatttccagcaatatcttatgattattaggaaagatagcctttctgagaccatcacacctcctcactgatgaccacccgccatattgaaaagtgggattgggtaggataaagggggattttgtgacttgttgggttttagacaatcagattgattcagaagcaacatacttacttgtattctggctttggctagctaaaaattccccactagatgtgtcttccagagagagacccctagatagttcatataagctaagctttggattaaactcccctgcttgatttgcttttagaaaggatccttctggactcttgcctccccttgaaatttcccccatgcaacaggactgacttgggttagaaggctgaaatgcattaagtcgggagtctacttgtggattcatccctttaatcattcgttagaaattttgatgctaaagaattacttattacacattttacagagttggaatttggtcattaatagataactgcttatcttaataaaaaatcaagatatttgggaccttcctaagggagttgaaataatgctcccaaatgttaaatcccttataccttcccacagaagcagcaaatattttaagcagtaataatttaaatatatcttttaaattattatgtcttttgcattatctcttcctaatgagaaaaggctaaaggcaaaagaggagctgaattctctcagcagcaggttatagaaagccatagtctctgaaactggttgtagcacgttgtctcagactcctccgtcagtgagtcctcagggagctgccgtccaaactttaggacccggccatcctgaaaagccacagcactgatagctttgtaaagacttcagtggcatgggttttcaggtatccaaagaattacggacgttaaaaaaaaaaaaaaaaaatcctaccctcaactaaaaatgacacttagggcagctgagaaggtcattctgattatctgtaccctctgattttggtgtctgtttagagcttcggtgtctgattatagctttggtgtctgattatagctttgtgctgttagctgcgcgtcctgaagctgtgactgggaaatacccatttctaagagcagttgttttgaagggtgaatcctgaattatagcaacactcaagtaaggcagaagattgtatctttcaacggcatactggttcttgaacgcatttggaggatatgcccttttagaaagtatttgttcagcccttgggaagctttgacaaatctggaaacttgctatgaactgcgtgccgtcctttagtgctttgcccacttggcatagacggcttgaacgtgccagggtttctttgtcagaccctctgtgaatctttgattagaacaccaaatacaaccagatccccggtaatcgttagacctgagagacccagggggctgtggaattttggcttaggctaatgaagctacagggactttggtggaagtgtaaagaaaccctgaatgatgcttttcccatgttcttaaattacccaaattgtaaggaagaaatacgcattgaaagcttcaaacataaaatatttcattacagtatttcaatatagcaattgaaataggttgtaggggttttttcccttaaataatagttcacttttgtcaccaaaaacaaaatgaagaacttagtcacatgggcgtggtcaaagtattatcttcctctttgactccttgccaacaaacaaaatgttatttcattagcccctctaggcaagatgctgtgccagtttctctgaggtgtggctgtgttgggttagagaaagggaactttccagagaaaatataaaaatcctccagcattcagttcaaaaacaccgattggttaccaaacagttaccaaattgcctgcttgctcaggcatttttagaaaaacagaagctgctcaaaaaggtggggtttgtttgtttgtttgtttgttttttcagagacaggggtttgctctgttccccaggctggagtacagtggcacaatcatagcactggaaccccaaacccctgggctcaagcaaccctcccacctcagcctcctgagtagctaggactacaggcacacaccaccatacttggctaatttttaaattttttgtagagacggtgtctcactgtgttgctcaggctggtctcaaactcctggcttcaggtgatcctcccactttagcctcccaaagtgctgggattacaggcactgtgagccactgtgcttggcctgctgctcagaaagttttgtacaaccctgagtagttcacactcaaggagttgtgatttcttatttgggaagcaggttaggacaacatggctcagataataatacccagtacttaggatgtgcctggcactgttataagcactcagcacctaaataactcatttaatcctaagtaggttttattattatctccacttaccagatgaaaaaactgaggcacagcggtgttaggaatttgtcaggatccaaacacaagtggtctgagtcacgtgcattttcttagccacaggttgcactgcctctcagaattttaagtcgatgttccatctcttgctagctgctagaccactttacttctgagtctcagtttcctcatctgtgaagtgaaactatggatgatgataaagattcagccacagcactgtttagaatttagacatgaactgcccaggcatttaatgctttgctttcctaatatagatggcttgaacatgccagtttcaaaggaatacatgtttagaaaagaactaacaatagaactcagttcctagtggatttcaactatcactcaggatggagatatattggactgagtcacaagttttcaatcaaagaaggtgtgtgaaggtgtgtgtttctgcatggtatggttatttgttcttaggccattatttttttaaagagctcatttttatgatattgggtgaaatatttccctcacttacaggcatggggtaacatatcttgttgggagtatgtgtgtgtgtatatatgtatgtgtgtgtgttgctaaaagtgatttactacagtatgtgtgttatacttcaataaaattttcctgtgaagaaaaaagcaacacaggaagaaccgagtttggattagactattttcactggatttgtgactttgcctaaaattcttctcttctagtgcttcctgatgacatctttaatttcacatgagacagttttttcccctgacatgaaaaggctctaccattttgctctccttattcactaaaaattgtaaagcctatgatatgtaatttttcagaaattttgatcaacgttatagcttttgtatctctaaaactctgttaggaatattcaatcattgtgatgaaggaaacttttctagtttcttccactagcaattgatgagttaccaacctaaaatagaagaggaggtaggatgataggggacaagaaaaattatgtcaatgctagtcaagaaatggtagccttcggactcattcacctttttcttatcatttcccttaagagtcagcaatgattgtctctcatccatcagttcttaaggctgttgagtggttttccatggggatgcccccgagtccccacactctgcttagcaactttctatcttcataaaatgtagaatctttccgacaccaagccaagctcaggctctaagagaaacagtttcaacagcgttgtcctacccacacacttctttgagaacttcaaagctgaatgaatttgctttagggacacctaggactagagctgtttctgtgtaaccaatccattacttctataaagtaccaagttgaatgcaaacaacttttatacagatttagtggtaaataaccaacttgaaacttgtcccaccacttactagttgtgtgaccataggctgcttatgtaacctatctatgcccttttctctcatctacaaagcaagactgttaatagtatcaacatcttgagttcaagtcaatgattaaactatataatgcttgtagtatatttcgtgtagtgcctgaacattataagggctccatgttcaatgagtaggcaactattcttatgaattgtacatgcacgtgagtgcatatgggtgtatattaggaatcctgtacaaaatagtactttgctgaaaacagtagactctaaagtcctacggagttgtctggtctgacaggggtttgtgtaagttaaagggataaattactcttgtgacaattgagtatgaaaatacagtcagtggttctatctcctctcagccactactccttgtttccactgccactcatctgtgatatatggcttgttctgaaaacaaatgtaccattaacagtaatgtctttgtaggatatcaaattaacatcaagatgttgggggtcaggaattaagactcatgtaaatgagagtggctatcatgacagaagacataaccgcagtagcaatcattgtagcaacactctatatagctgattagatagtatccagagttaaatgaaagcccattttctgtgaatcctataatgtccagtaaggtgttaattacccatcttctgtctcaagcctaatcccttccagggggtaaagtttccaggggaacagtgaacccaagagcagggctaggaagaggtaagtgagcaacttttctatcacaaaatttaagggagaaccaaaaaatatagtaaccaagataaataacattttaatacaacatttttataaaatcaaaattagtgcaaaaaatccatgatgactgaaatatcaaaattttcattaaagacaagatctgatcctgcacttgtacaaccctgccctactccctcaccctaatcctggccttggtgaacccgaatgttagagaataaatattttatgtttaaggatttctctacatgaagtcagtatgtttgcagggcagaatgggtgacccaagtgtatctgcatattaatgatctaagcttcttactagaaagggaggatcaaaaaaatgtctttctgtcacatattgaaagtatgtccatgggccaggggcagtggctcacacctgtaatcccagcactttgggaagccaagatgggcagatcacctgaggtcaggggttcaagaccagcctggccaacatggcaaaaccccatctctagtaaaagtacaaaaaattagccggacatggtggcttgtacctgtagtcccagctactcaggaggctgaggcaggagaatcacttgaacctgggagacagaggttgcagtgagccaagatcatgccactgcactccagcctgaacacagagcaagactctgtctcaaaaaaagaaaaacaaacaaaaagaaagtatatccatgatgtttctgagaggaataacaacagtgggtaaattttattgagtccttactatgtgacactcactctgctaggccctccacatacatgatttcttttaatgctcacagtaatcccatgaagagagtactggtattaaccccaaaaggagactgaggatcagagaattaagtaatttccttgaggttacccagctaataagtagccagtgtaaggtgaagctgtaactcaccccacagggtttgagaaatcactcattctgtgtctgaatctttttaattcaagacgtaaatctaggtcaatatagtttaaaatgtgctttatgaacccaaagtttgggtgatgatctaccagaaaaaactttacaacacaattgcatggttaaggggctacttgtgtgtcctataaggcatgcatacaattccagaaatattccaatgggaataattttcttcaccaccacatgactttccctggtaacgtgttccactttctcccttgtttttgggaatcttttaggttgagagagggagagaaaaaagagaagaaagatgatgatgatgatgatgatgatgatgatgttgattgcagtggtggaggtggtggtagctaacatttattgaggccttatcatgtgccaaatgctgttgtgagtgctttatgagcatgatttcatttacccatcagaaaaagcctataaaaggctagttagtccccattttcatcaggaaaccgagtctctgagaacataagtaacttgcccaagatcacaaacccaggtggatgttagagcctgtgctcttaaccactacactgtagaaagaagaattaagtggcaaatttttagataagccttccagcttcttttaaatagagccttcagatccagttcagctgctgaagaagttcccacctttccaagggccctgttgtctatgatgggcatccttttgggtgacaagttcaaaaccttcacagaattttccccagagggcatattttaaaggtgcccaggctgttgggggctttatttctttagtgctgtgttttaggattaaagtagctttatttagcaagtttcaaattaatatatttgaattaaagggaggcagtaaaggagtagaaattatacttaaatacttagtacatgtcgtcagcccacaattcttatttctacagacttagagtatattttaccgaaaagttagtgcccaggtgttagggtagctctggaaaaggcatatctgaaccaaggactaaacaaaatagggagcacttaaaatattttattaatttcctcctttgaagatcataacaaatctgctgcattcccatccatctcaaataaagcaaacccgattaataagcactgtgagccccgtgaggaagagcagaacaacccagacaccaaggattgtgctgataaatgtttaatgactggctttctgggagggagaaagccctggtttgtggcatttgccaattcccatgatgaaaaaatcccccacgaaggcctatttctagctatcaatgtgatatccctgaacgcggattcgggaagagatgtgcaagatcggctgtcatgaccggcaaacacactgctccatcccttagggaggaggaacggaagacagtccgctctttcaatgctgtggctatcttggagagctgctgcttccggaggcactcactgtgtgacattggcaagtcacttcacctctctgggcctttgtttcctcctctacaacagataacgtggaagatcccctgtacctctaacattttaaagttctagaaggcattgcctcctgttttttccgacatccaaatgccttgaagcgcctttctggaaaaccaagttagcactgtgctgcatccaaaagtgcctccaatttcatctcctgagcataaggtttggaaaggagtgacttactcccttttgcctctttaaatgtgtagccaatggggcatcatacattttttacacttcttttgctagatgtgagatccaggaaggaaagcatggatgttccagggctttcttgttctcctggggtgggaggctgcgtgtgatgcactgattcattgctgtatgcaatttctacctccctatcctttcggcagccgagcaagattgttgatagtctcctacctttttatttttatttttattttttactactagaagccatttacaagagtgggaactgcttacataaaatggaggggcggcagggggttgcgttattttattttttttttttttttcctgaaaggtggcacgtctctcagcaaagagaaaaaggcatgttgcacaaggcttgctggcagtgatataagccagcgccggtttgcctgttgtcacagccaaagcaaaatgccacctctgcctagaagccagagtgccacactcctcttttgtgtccctgagatgtacccctcatgaggccctggaattgtaggtttggccaggagtttgccaggattgctcgaaggtcatcttccaatcccaggaggctgggggtaaggggaggttcatcatagttctcaaaatagatctgttgagccccccccccccccagattacatgtcagctacaaccagtaaatgtggaatttgaggcctggggttagcacaagagagccctccagttgccaggagtaaggtagggctgccagaataccagtgacccagtgatcaccctgtccctgggccccttcttaacaagcccagatgcagtgacagcaaaagctccagaatcccaaggcaggaggtgccaaaaacaccccccaacaaccattaacaaaaaaaattttcagtaaaatgttctcacccctagaggggaaaacctgtccatgcctgaagcagcttgaccccagcaaacaccctgcctccatggagtgaactgcaaatctccaaaaaaaaaaaaaaaaaaaaaaaatctacttcctacccctcctgctccctggggagggacagaaggttcctaaaactgacagtttcgcctccatgatctttaaaagagcagaagctggctgtgaggctgcagtgctgcctcgattggggtagtgtggtctctgttgcggctgggctccaaggagagccacaattggctctgatgaggaaggagcctagaaatgaaagattgcaaagagggcttctgtacgccatggctgagactgtgtcgtttcttgcaaggtgaaacttggcagttctaccttgcaagtaaaaacctaaattaatttttttaaaagaaattaagtcagaaacaaggcttcggaaaaactgtgagtgttaggcataaactgattttggatgatctttaggtgagaaagggtggagttaccatcagaaacatgtttttatttatgcttttcgaatccccactggtgtgcgatgtgtgtgtgcgcgcgcgtgcatgtgcgtgtgtattggttagcgtgagagtatgcatcatctcaattctctaaccatttctttcttttttgcatcttttctgtgcacagttcatatagatcccctataaataaatatataggtccatccacaccttttcattttatttgtaaattgtttggtataagcggcagagcgtaatgaaacctggtgaagtttaaaagattagatttttttttatactgacacttcataacactgttcatatgtctccgagtgagatttatgaatatatgagcagtactgcaaaattatactgcaccagagacttcctgcaccacaggggtggcagtctaaagtgacacagcttcaagcatttttcacagacaagaagcaaaatttaacccccttaaggggaagtatgatttcaacagcttgaaatgagctcatttgtagatggtttttttttctctcatcttccataattttttggtgttaagattaaaacagattgcacagccaatataagggcacataagctgcccagagtacagtttggcccttaaagagaaattttcattcattgtctttatcagcactcctcaatcaggtaaatgaagataaacttgcccctaaattcctaaggctctcagcccaatttccagtattgtacttagcagacagggtgtggaattttcaaacggtaagtggcaaggaacatcaattaatccagtggagaagccctcatctctctggcaccaaagacagtgacattaggaaataattaatgtattgaatataaatggtgtaaaattaaccaataaaaaagagaatcagaagagcaaaagatggtctgtatgaattgaaacataggaaatgtctgtcgtggaagagttcaattagattcgaagtcctaactgtcttagattgtctgtcttggattggtccagtacccagtaccttgcaattttgtataaactaactaacgttcattaaactctatgctctcaaattctctttaaccattttgtttcctcctggaacagagtggggtactcaaacattgcctgctctctctctgccctataaatgctccatgatgtgttggctggagaacttttgtctcttttttcagcaatggtacaacagctccatgaacgtgatctgcacctggttgacggaccggatggacttacagcttcatatttatcagttgaaaacactaattaggatggtaaaggtaaaagaaaagattattattcttctttgcaaatagcttactgaaatatatttcactggcaagctgcaaagcttgcttaacacaaagaatattagtttacatataaaatagtatctcatacaagaaaaacctatgcaattgttttgtgatgcatgataaatgtgttactcagacagcaaagggaaatttaatacaaatgaatttgatatctttttccagagaggaaaaatacttggttttgccatacaaaaatacggcagaggccatcgtgtcctttgcattagactttcaaaaactggcttttggtgtcattatgttaatcacatccattaccaatttcatttatagtttaattaaataaaatgttgccgctattaatttaatagaaatatttacccccagctatttctaaatatgtcctgtgatcattatcagaatgcaaatcaatattgttctcatagttaattgaagtagttcgtcttacaatgcgtgtatacaatcaaatgtaaaggatcacaaaggtgagataacataccctgaaagtagctttttcccttgttcttgtgtgtgcaccttggactaatgataattatttcagcgtgaaatctcagtggtttacatgaaataataagatcacagaagggggtaaatacatttttgatcatttcagtttctatttgatgcttcaccatagagggttttaaaacatttgtatgcaaaaatctcattcaaagcacaaagtcctttaaaatattttaacaataaatgtagctgaatgtctatttcttaacagtttgccaaaagtccctgcaacacccactcctgggcaccccccccccccgcccccaccccgtttcttagtctcttttggatcagcaccatttcactttaccccagtgctgacttacaaccaactgctgttccgttgtgtgtaattaaggagaattattattatctgcatttgatctcacaaagcatccacccgggaaaggttatagacagcagtgtattacagctcttaaaaaacgaatgtatacacttagactatggacccagcctcattttcacatttttttacttcagttccttaggaccagctcaatcgtcaagtggtcgcctgaccacttgaattccattttctgtgcataaatgcactttggggaaattgtctgtttgacccttattgggtagacatgaaaagaagatataattgtcatacttaaaaattatcttcccattatttctatttccagattggtgttggaaattaacaatattttatgaaggaaaaatataagtcagaggggaggtttaatcttagccttttgccaaaacaaaaaaaaaaaaatgtggtatgagccacagagaagggatatagaaaagtcactgccaaaggaaccccttcactttagcaaaaagtgggttcagcttaactaatgccacaactcagagctatgaagcagaattcacaaactttaaaccaagaacatcacccagaggcctcctcctccagggcaaatttccaaggataattggctttctttcttgcatcaacagccacttcatttattcacccattcatttattattcagcaagcatttatttattcattcaacattggataaatattaggtgggcctctacttgtatattaccagatggaggattcagaaatgactagatgtggtctctgcacttaggcattgagagtctagttggtatacacgttgctatggaatttgaataaaagggagaatgctcaaatgctttttacctttattttcccccatcatattctggcaacaattatgttattctaagtggcaacagaacaaatgattgaaaagtacaaaaatttaagttaattgtgtagatatctggcccacaccatgcctaacatttattcagtctcttacccgtccccatcaaagtgaaaacacagttcaggtagctgtctagcttcctcctctcagcaagacttgcaggttgatgcatgattgaggataaccttataatttaatgtcaaaccagattacttttttgttattggacttcagtaagctgaactgggttcactcattaactctgtagtcattacaacatgtgaccttcaagaggggttgacattgtgattgttgctatcatgaccgcattagatggactattaaaaatagaaataatgggccgggcacgatggctcacgcccgtaatctcagcactttgggaggccaaggcgggtggatcacaaggtcaggagatcaagaccatcctggccaacatggtgaaaccctgtctctactaaaaatacaaaaattagttgggcatggtggcgggcacctataatcccagctactcaggaggctgaggcaggagaatcgtttgaacccagggggtggaggttgcagtgagccgagatcgatctgctgcactccagcctgggtgacagagcaagatgccatcttgaaaaaaaaaaaaaaagaaaaaaaaaaagaaagaatgatgggagtggtgttgacgtatgttagcattccttgtcttgcccctttagcaagtttcctatatcaataggagaaacaaacagcagaatcagtagctgaaatgatatgcagtgtgatgaggagagttgtagttagagaccttttaaaaaaacaaaaaaaaaattacaaagtagacaacagccagatgcttctggtcatattcaattaacactgaaggatttctagaaaaacagtccttgagatacctaaggaaatctgagagaaactgcctgaaggaacaaagaaagaacttgtggtgcagtaataccaagccattgttcttgaaaaagagccaaatttcttccctgagaccataaagttgtgaacagaatagatacagttctttcccaaggagagaagaaatgagtcacatgtctgcaacatattgatgaggcattagcgctccatctttctcataattgccactgcctgtaataggtttcatataccaacatacatatgtctgtcttatgaatgagacagagggatatcagtacagcttatgcagttacaagactcaaaaatactaaaacaagactgcaacagaaatcacaaaataccataatcactcaatccattatttatatattatagccccttcctgtgtctatcatattacattacactaacctaagagaaagaaccagtccacaaaaaggaaccaaaacaattatggaacatttccctttatggaactgaataaacacaagcttatgttctttgctttgtctcatctaatatagtttatcctgtcactatttctcattttctgtcattcaaaggatctcagttttcaatacaagtgaaatctaagcacagtggctttttatttgacaatgcataaagtgtgatatttagctgaaggtcagtgctctcccacccacacctgcttttaccttctccctccccatcatggagatgagatctctcttatcactgtatcttttccttccttagaaaacctacagagatttccgattgcaaggggtcctggactccaccttaaacagcaagacctatgaaacgatccggaaccgtctcactgtggaggaagccacagcatcagtgagtgaaggtgggggactgcagggcatcagcatgaaggacagcgatgaggaagacgaagaagacgattagaccatttggtcctagagtctgctgggacagagtcctgtaatcagtgcatgtccttagtctgttagttaaacccattaggaattttctgtcaactaccatgcccatgagatgtttatcaatacaactgccattttagctatgtggtaccaagattagcaaatgaccttcatatccactgatttcctgatgtccatgtctatatgtttacaagcaatatggagcaccattctttaaatactgttcatggagaatacatagtctaaccactaggcgtgtccctgttatcagcaaagatcaatgatgcttcattcatgtactatgtatgcattggtggtaaatggatgtgagggcaagtacatcaagtacattcactctgtttcacgtatgtggatgccagttaattaaatgagtacgtaaataaattaattaaaacacatagatctgctttgtgtttttatttttattttttgaaaaacaaaaggcaagtctccaacaattaacttttgatgctttctgttcccctaaaaccaaaaaatgaaccccttgtgtcgttgttaacccatcctttcatttactcatataattagccaaaaaaaaaaggatggctacataccaatggattgattctcttaattgccacggcaagggggcgatcctatcatgacttaacatcaagcgcgcagttcaaaactactgtcttctgtcaaagttttctcctcttaaatgttattttgcttttacgtctcaactgtgtatgtaaaaaaaatgaatatttaaattacaaccctagactaaaaatgtgtttataataagatgtggatatttccttcagtagattgtaaccataatttaaattattttgttccacactgttttttatatctgtcatgtacattgcattttgatctgtaactgcacaaccctggggtttgctgcagagctatttctttccatgtaaagtagtggatccatcttgcttttgccttatataaagcctacagttatggaagtgtggaaaactgtggcttctcaataaatattcagatgtcctaagaatat

SEQ ID NO: 351 - DNA, 5756 bp, Homo sapiens
agtgcggttccttctaaaaaggagaggcgggagagtcagggtggagaaggcggctccaaccagattttgcgtccacaaagccaaaagcttctaggcctggcatgtacggcgggtttgtgcccgaggagcacagctggtctacacgggcccgccccgtagacaccctactcctcggtgagctgcggtttaacttccttatagcaggttgagagtgcaggccccaacgtttggaggggaaggcggcgccccaactggtgtttttccaggaagtgctccaagaatggagaggagaggggaaaggggaaaggggaaggccaggcgatgggcgtttcattcattgcttctttctccccgtcccctccttcgctccccccagactttccccttttcccagtccgagtttgacgtcggtctcctggataccaggcagccaatcgcctcgttgcgaagggaccagcgcagccaatcaggcgtcgttgctacctgtgagtaatatttttagctgagagggacgctcgattccactcccgatgtaatttcgtgtatttctctggggcaggttgtgaaaaaggcacttacccgccccccaccacgagtccctctcttaccccactccctaggtacccgcacatatttcagccaagaatgatcttaaacgcgctttacaagcaggcaccgcgtttattctgtgcacctgcgatccagcaagccctagaaatgcacgcatgcgtgtgtgtgtagacatggacacagatacatacgcagtttggcctcgtgtcgccacactctgggcacggcgtgggctgggacatttggaataaacggatccgagtcgcagccggggtcgcaccgggaggcctgaggctgcggaagcagttaaactgccggcggggcgggagctgtggcggcctcccttccccacccccagcccggctccacgtctttgggttctgcagctgccactctctgggtggcggttggcctaggccttggggtgattaatattcaattaatcgggtgcacaagtcccggtcacagtttgccctttctctaccccgcccctggggtgggctggaggccgatttggtagctattccacgagcaggatcctccttggccgcagacccccgcggagagggcactttctgggtactcttgccgctcctccagccccggttctcctgagccgcttcgccaccagcttcgtccccctccccctctgcccggcgctctccgcctaaaccgggcgtcagccgccctaccccacccctttctctctcattggcacgtctgcccccacagtccctttccagacgttctcttcattccgtccccagtgctccgatcgtcggttcattggccctcctggagcccggagggtgcggcttccccacccctgcgtccgccgcgcgtccggacaggggcaggcgggacttggccaatggcgtcggggggcagggcaggggcggagccggccggcgggggaccggggtgccgggcggggagcgcggggaatggctgcgccgccggagctgtgtgacgcggagcgggcgcgcgcaccccgacggaggggatgggggcggggaggaggccataaaacgagaggcggggcgcgcgccgcggcagaaggagcgaagctctggcccggcgtgtagcgggcgcactacggggacgctgggccgggcaccgggctgtgtggagaagtgagcgcgctcgtctgacccccgtgcccgccaccccgagccactaacggcgatctcccaaggcctgcccgaggcctctgtcctctgtcctcagccccgcagcggcaacgtcttgcactcggcgagctcgccgctcccgaccctcccgcgcccccgccctgccgcgctgctccccgcccagccgcgggtctgtggtccaagccgccccgaagcagcccgtaagtatctcggggcgccgggcggggtcggcgaggagacgggagccccgggcccaggcggcggaggaggggctgcagcggcgtcgagccctgggccctcgggagctcggggacggcggggtcgcggccctgggcgccgagggggcagcgccaggacccgaggggagcggctccgaggggccgccggcgcgtcgggctcgtcctgggcagttggccggggacgggcggcccggggcgagctgacgggaattggggggttggggtgcccggaggagcgacgagctcgcggtggaacgctggggttcgaggggccggtggccgcgaggctgaaaatggtgccgaggaaccggtgctcccccaggctctggccggctcccaggagcccggggcgggggccacggggcggggagcagcgggtcgggttacggcgggggaggggagcggctgacccggcgccccgacctgctcggtgctgggtgcccagccgggagaggttgctcttccatttcccgggccttcctcctccttctccgaggaggctcgtactctcttcctcctccacctccacctcctcttgctgttgctgctgctgtagcgcttgggctccgagggctgtgagcagaaatctaatgagatctaactggctgtttatgtaattcttcacactcctgcctgtcttaaggcgttgctttgtaactaccttccaccgagcctgaatttcgctcggctgcaccttcaagcaattgggcttaatcagctgcctctgccggcactcaggcttttgacttggaaagtgtttgtagtttgggggcagccagagattctttttccctttgtcaccacgaatatggaaaatagaacagacgaattaagaccaacttgatttttaaacgtacttttaaatcaacttcagtgtgcaaatagatccctttcgcaaatatcttctgtttgcccttgatcttttcttatccccacccagtgctgatccagcaaacgtttaaaggtcgaccttaccatacttgcctctccggctgttaccgtgagagggagggagggagagagggacagacggaggttttttaaaatcagactaaaactcagaaaccctggccttaaacagaataatcaatagttttaatttgtgtctttgcttttgttatacttgctgccgaataggtattttcagatttagaaaaatacacattgaaaacaaaaggcccagagaagctggattttattatattgtatgctcttagtatacttaaggccgaaactatatagaataatttggttcataattatttactaggatgaagttcatttagtactcagtgtctttaattttagcatcatgtactatggaaattaaaatgatcttcctaacgtaaccaaatttttaaatgtcagtgacagagcagatttaaacagtatatatccaaagtaaactaaaacatggattcacttctaagttggtgaataacaataaaaattactacctaaaagtggcatctatatatatgggggtggggggaggatgctgagtacaataaatattcttgtgagaactgaggagagaagaatgcatgttctagagatttttcttcttagaactctattcagaaacaggtttttaaaagcattatttcatttgtaaatctacattttcctgtgtcattttaaactttaataaacgattttctattttatgtttattttgtgctagtaacagttttcaggctttctgtcctagtagacattttctttttctttttatccttagcagactaacacaggatcttagacattttgaaaggtgaaattactttggaggggggaaggtcatgggacttatattacatttatcttatttggatatgtttgcttttgttttaaggaacaagatcactcaaggtgaaggataatctactaataccagcactttgaatgaaaatttgtttctctgccacaaactgaacatcttttttttttttttttttttttggtgggggagttgaaacctaattttgtggcgtagcagctatgcagcttgaaatccaagtagcactaaattttattatttcgtatttgtacaataagcttcccaggagacgtgtcaacatttttggtgaagaacttgaaagacttcttaagaagaaatatgaagggcactggtatcctgaaaagccatacaaaggatcggggtttagatgtatacacataggggagaaagtggacccagtgattgaacaagcatccaaagagagtggtttggacattgatgatgttcgtggcaatctgccacaggatcttagtgtttggatcgacccatttgaggtttcttaccaaattggtgaaaagggaccagtgaaggtgctttacgtggatgataataatgaaaatggatgtgagttggataaggagatcaaaaacagctttaacccagaggcccaggtttttatgcccataagtgacccagcctcatcagtgtccagctctccatcgcctccttttggtcactctgctgctgtaagccctaccttcatgccccggtccactcagcctttaacctttaccactgccacttttgctgccaccaagttcggctctaccaaaatgaagaatagtggccgtagcaacaaggttgcacgtacttctcccatcaacctcggcttgaatgtgaatgacctcttgaagcagaaagccatctcttcctcaatgcactctctgtatgggcttggcttgggtagccagcagcagccacagcaacagcagcagccagcccagccgccaccgccaccaccaccaccacagcagcaacaacagcagaaaacctctgctctttctcctaatgccaaggaatttatttttcctaatatgcagggtcaaggtagtagtaccaatggaatgttcccaggtgacagcccccttaacctcagtcctctccagtacagtaatgcctttgatgtgtttgcagcctatggaggcctcaatgagaaatcttttgtagatggcttgaattttagcttaaataacatgcagtattctaaccagcaattccagcctgttatggctaactaaaaaaaagaaaatgtatcgtacaagttaaaatgcacgggcccaagggggattttttttttcacctccttgagaatttttttttttaagcttatagtaaggatacattcaagcttggttaaaaaaataataataaaacatgcatcatttttcatttgccaaccaagcacaaagttattttatactgactgtatattttaaagtatactctcagatatggcctcttacagtatttaagatatagcaaggacatggctgatttttttttataaaaattggcactaataagtgggtttattggtcttttctaattgtataatttaatttagtacaaagtttgtaaaatatcagaggatatatatatattgtttctacgacatggtattgcatttatatctttttactacagtgatctgtgacagcagcagcttcatgttgtattttttttactgaaattgtaaaatatccatcttaaagacatcaactattctaaaaattgtgtacaggatattcctttagtggtggaattaaaatgtacgaatacttgctttttcaaaaaaatgtattttctgttaaaagtttaaagatttttgctatatattatggaagaaaaatgtaatcgtaaatattaattttgtacctatattgtgcaatacttgaaaaaaacggtataaaagtattttgagtcagtgtcttacatgttaagagggactgaaatagtttatattaagtttgtattaaaattctttaaaattaaaaa

SEQ ID NO: 352 - DNA, 46435 bp, Homo sapiens
gcacatggcctgggcctttgggctccccactgtgaggcctctcacggtgggacccaggctttgggtagctggctccatgctctagcaaagcctcacttagcagtggggaggtcccaagaagagaagcgagatacccatataaagcaagcctgcttagccttccagggtccttcaaatcttaccaaatgaaagccagcttgctccacctactgtcaagccagcatctcattctccccattcttgtctctgtaagtcccccagacaccactacaaaggcctttgtacacctctaccatccacctcagcctcatccctcctggccttggccatatcttggggcttctcctcagcctctgccctcaaaggagccacggtgcccacaccaggatttttggtgtcatgactatccaaaagataaaaagacaaggctggatgttgtagcccatgcctctaatcccaggagtactttgggaggccaaggtgggaggatcacttgaggcaggagatggagaccagcctggggaacatagcaagacacccatctctacaaaaaattggaaaattagccgggcatgacagtgtgcacctgtagttccagctactcaggttgttcaggtgggaggattgcctgagtccaggagtttgaggctgcagtgagccatggttgcaccactgcactccagcatgggcaacagagcgagaccctgtctcaaaaaaataaataaataaataaataaaaagataaaatacagaattctgtttcttctctcttaattctagtaaacaactactcaaaaaaggagagccatgaaagtcaccagcctagaaaattacagtcgacttcatgagcttcatttggatttctcatcatgcaatagcaaagtcacagttattcctactgagatcacaatgatgctgccagagcctcccctgagcttgagagccctcctcttctaagcagcatttggaggtgagtggcgcagcctccctgtcaagcctggggacaaaggattcacctggtgggccacattcttggagaatatgttggcttctttgcgtgtttgttttcccatatgttgactgctgatgtttgtttccttgcttatttgtttccctgggtcacccaactccagcatcctccattgtatagtgggaaagtggatatctggctttccttccttcctgaggaaattatgaacaagaagaacaaactccaagctaaatacaagtcacgacttttccagaatccaaaagtaaagtaactgtgaagtcaaattctttacaaaggggtcccctctagagctcagccatccccatacttggagtctccagggctctgtttcatacttctctcaccaagacattccttttctaaccttcctctgcaaatatccacccacctttcaagaaatgccacccctacacacaggaggcaaagttccagatgcatcctttctcctgccaataatccatggccctacatctgagttactgactaaaatgaaaccctggtggggtgggaggctcagctgtgatggtcattagtgtcccaagctggcaagctgcaaactctccaggagggaagggctttggtgtggtctcagagggaggtctaggaaggatgcgacccttcacgctgggtcttctgccgctgtgagttgcagccatgccatttgatctcctgattcttccagctggataaccacttaacccacacacatgcacacccctccaagggaccgatgtcaatgctgagtccaaacccagaatgaggaaggggaatattttcctaatactgtattgactcagccttttcaagaggccttgctctcctcaaccagcaaatcacaagactagagagaagtactgggtttctttcattcttcccctaaccctccttctaattgtgctgtttcaaactcccaggaataagggatagcctaatgtaggtagcatcatacacctcttattgtcctcttccaggaagagtgtgaggtcaaaacctccaatgctccactcactctctgttggaggggttagaatatagaaaggagaaactggagagtaccattgggcctgcatcgattacaaagcaaaatctctatgttgttcaacaagtgcaaaaacaagcagctactttactgggttactctcctatgttctccagaccctctaatataagccaaggctatgtaagaagcacagatattaacaacacttttattaatgggcagatacctctcccacccacatagatctctctgccaaagaaaacccaatacaggggctacttgaagtttttgaccaagagttattatttttccttttatccatgtgacttagaactgtttctcacatagagtgtgcagagtcaccaggaggacttgttaaaaatcactgcctcttggactactctatccagaggtctggaatggaaacttcatccaccaggtgatcctgaagctggtgatcagttcgcccatagttagtaccaggtgcccccagcagacattatgagctgatagaactgtaaaaaattatgctaattccaaaaaggctagtctgccctcctggggtgccatgctttcaacagaaaaaaataaactaaatctattctaaggagtaaccacataattagaaggttattaccacgttgtggaaagaaataaatacagtgataaagaacaatggaatttgtgggttaattagtaatacagtgctgggcttcatgcagttacagaccaataaaacaaggacatcagactggttcacaaaatacttcctgatttctgaagctgaagaaaattcattgggcttaaggaggtcaaatctgagagctcaattatcttagtctcctaacttattgttaggagcataaccattcagcaggttgcatatgatgtgactgttctggcattttttctttgcaatctgtttataattctcagcaacattttttttaaattaataaactttaaacattatatcagtccatatgttaagtatttatttattaagtaaaattctattgaagactaagaacgaagacacaaagatggctgagacacagcccttgcgatcaggttgcctacagtgtagcggaggagatgaaagaaaaatcaatcaaggttaggtgtcaaatgaaaacaggtgaagtactcaagaggcattcaccttgggaagatcagaggacatcctgcctgaactggatctccaaggctcaacagtttgtcaggtgaagaaaggagaaagagagacaaaagaactaacagatatatggaggtgtgaattcacacggcaggtaatttggactggtgaggatatgggatattaggggacacaggctggagactaatctggaaaggaaggcagcagccagttcatgcttaaagtttggaccttatcctgaaggcattatgaattcacttaaggatctttagcagacatattgtaatacaattggcttaaaaagaaaagtctgaggagctatggaggatggattggaggggacacagagagaggatccatctaggagtctgttgctctgtggttgatcaggaagatgatggggactggagtaagacaggcaatgaggcaaggaagggaggtgttcagaaatgaataaggacaggatagataatgccaggagaccagctggatgacacgggaaaggcagatgaatgaatctagggtaacgcccagattcatcatgtaagtgactgagaagatacgggtacccgctaaccaagctagtaaatacaagcagaagagcaattgcaggtcatcctgtttcttctcatcctcctcctccagattctcatcctttgcaccgccccattgtaggtgttctgtggtctcttcttcctgagagctgtcatcctctctgatgattgccgctgtcaaaggggtgttagctggtatgttctcacatggccatgcgaggtgttcatttctggaatcctttctggttgatcaggcagttgttctgataggtcagcgtcttccctttatccatactatttgtgtgtgtgtgtgtgtatatatatatatttattatttttgagatggagtctgactctgttgctcaggctgaagtgcagtggcgcaatctctgctcactacaacgtctgcctcccagattcaagcgcttctcttgcctcagcctcccaagtagctgggactacaggcacacaccactatgcctggctaattgttttgtatttttagtagagactaaaaatctctgtgaaagatttttgaaagattaatgtcatgacagactcaggaacagaaagcttcagatggatggaagtggcagtacagactgttgaaaagacatcttgtccacctttgtaaggctagactatttgtggtgtggatgtcaaggggtacctgggcaagttcaagggcactgctcagggcataccagcaacaatggattctcaaagcacaggaggaggatgaaggggacactccagcacaagctaggattccatggtggaagcagctaagtaaatgtattcttccaggagtgaccttccatagagatagtgtctctgaccacgctgaagctgaactggagctgggcaaggcagagaggttcaaatgaagggtgactcccactatcacaccaagccccactgggcagctgacctgcctgcccatcctcctcctccttagacagaaaacagcgaattccattcgcctttctgctctcaatgaaaggctctctttgggttctttactaatctacaatctgtaaaagtactttccctgtgacttttctccatttcagtactgtcttctctaaatgagaattaaaagcaagttccccacaccgacctcaagtggtttctaagatagcaagagtgcattttgcaggttgtctgagaatttaaaagagatgggggaggggaggaaatagagtcagagtgaatgcagaaatgctggagaagaaaacgggatataatactgcggaatattttaatagtggggacacaaatgtcataattaataaagcaggtggaaagttcgcgctgtggtgcaattgtaaagaatgcttattaaatacttaaaaacaaagaaaatttacgtttctcaaaaggacagctgaaaaattccttgagctaaaatgtgttgctattcaagatgccataaaactaatgttaaaatatgatatctcatttcaatctttttgggggaaaaaatcaggctttgactcactcatacgacagatcccacgcacccacccaccaacatggcccttggcatgggcgacctgcccacgtgtcgatgcaatcgtgcctctctagagccctgcttccatccgtttcccgagcttcgatgtcgtgacgagagaccgcggctacatcaaccttgggcaaccagatgcagccgcgtgcggcagcctggcactgcccggagcatgctcagtcgggtcctgacccacttctgcaggtccgacctcggggcgtggggtcagaggcactactttgccagtttgccaggaacagagaggagcagagagactgagagttgctaaagctcctctcttggcacagcaatgcctgacccggcggcggaacatgcccagtctggctgccggagccgccgggagcgtcaatgtggaaagtccacctttccgggttttcgcagcaacccaccgggaagagggcggtacgggagtaaaaaggccggagtggggtgtggccaagagggcgggcactaaaaagccgggggaaggagcctggtcccgccccagaaattgagagtctctgttctcttttaaaattaaaaaaaaaaaaaaaaaaagggagataaggaggagaagaagccactaacattgcaggatcgtgtagcgaaacttctgtaggtacttaataattttagagtactctactttttaattaaaaaatcaacttatggttcattagaaaaaacgtggaaattacaaataatatttttaaagaaaatgaaaaaaaaattcctggaaccccaccactcagaaagtcaccagggaacggcccgctgggtttttttccagactcttccatctgtggactttgctttaagagacgtttaagacttacagcgcagtcgcccgggaaggcctgagaagctttcggaagcaaggtggtttgctcgtgattgcatttgattgcaaggagacagggtaggcttgggggtgggttgactggttcccatttagcgccccaggatgggaccctaagaagccttttcctgggtgtccttgaacacgcgtgcgatgcgacgcccacagaagttgcggtggaagccccgggcgggagagagagcggagtgagagtcccgcgctgccgcggaggccctgggcctgcgggtgtggggctctgggggccgccgaggcccggcccagaggctgagcggactgaatgcgggactccccggcaactacagcctccggtggctcctccgcggggccgctccgcagcaccgactggctcgcgccgcaccgcccgccccgctgcccccgcccgcggctgccgcgaaaacccggcggctacacccgcgcctccgcgccgcccggcgagccgcactgggcatgctcggccccggccggcccaggctcctgtaggtgggaagctccgcgctcccggcagccggcggcgcagctcgcaacgctgtgaggcgccggcggaggcggctcgcccgcagtaggcgctaccgggcgtccggcgcagagtgcggcgcagcggccgctgtcgggctggccatggcgaggggtgcacggcggccacctgagtggcgcggcggtgtcaggttagcgggggcccccggcgggccggggcggaggggcacgggtgggagccagccccgcaccgggtcggcggccgagtcggcgccggggccgccgaactttcgggtgtttgggctggctgagactgcggcggaggctgcgctgcgagacgccgcagggtccgggcagcgggctccagggggtcgcaggatgcttcgagatccgtgcggggcgggggctggccgtttggggactgccgcatcctgggctcgaaccgtaaccttccgagggcgaggagcgcggaatccactgccagctgccggcgagcctcctaggtgtcgtgggggaaggggacgccgaacagccgtgggggctttcgctgggctctggatctctctcatcgctgtgcctcagtttacccggacagggaggagcgtgcgctggccagggctccggagaacgtgaatgcgggttccgcgtcgggagggcgccgtgtcctgatgccgcaggagtgcgggcggctgtgggtgctgcgagccgccgcctcgctactgaagctctcggagtttgtcgcatttgactccataacaagttgacatcgaattgcttcatggcgtggaatggggaaacgtgcttcatcggattaaaatacagagtgattgcagaaccgatttattttaagcttgatcattaagctgtcttctccagccctgaaaaaaaaacttgcaagctttataaagcaaggtagcaaaaaaaggtttgtaggtgtattatctgctcacattgtagaaaacagttaagatacgatcgaactgtcattatttttaaggatacttagcagaaaagtttggttactgtggcaatctttattttgcgttatcttcgatttaatgttaaaaacttggaaaccgagcattgcagaagctcagtgttttttgtagttttctcacttttgtttctagatgaaacacatttttttcagttgctactatgctgaacatagtaaaatccttcaagatgaaatacaagatggaaaaaaatgtcgtttcatgagaccgtaagttataacagtgtagttcttctgacattttacttacacagaaagtgcaatttgtaggtcccagtgtggtttctacagttgtttattcctaaaacatttagtaccattaacactattaggattattgtatctaataggggcaagataaacaatcctgttctagtgggaactagttctgctaactaaagctaaattctcaagcctcttttctataagtaccacttagtgggttcagttgttttattcattaagcttattacaaaacaattgtttacattctttatagaccttaatagactttagaaatgcattgacttttcattgagttgtgggtaggctttaaggttggtgcttgcttgcaagcctgagatggctccagctctaattctggatactctctggggtgatttcccccagtatagagttggctctgtcctgtgatgctgcataaccgaggtttaataataggaaaggcttgaaacatccagacaacagcagtagcaacaacatgattaccatttttatgaattagaacctgcagtcccccattttagccaaatagtctggttggtgatgttcactcatcctaaatttatttctaaatacatttatagaaaaataagtttgaaaactccaacacaaatattgaataattgtgcttctcttttctataaaaatgcatcaagtttaaaatctttcatgaagtactgcctgcatgtacaccttatcctgaacagcaggtctcatatcctcaggtgacattccccagtagaagtagctagagtctccccttagccttgggttcttcctgacctggaggaagcagcaaggcctcagtttactttttgtgaatgtgaggtttaatacagatcaataggcccccttctcgatccacaaatcctaagtacaaatcctaagtattttctcagtgttaagagacacgatgaaatttaatcaaagacttacttacatactgcccttggcttcaaaaagtccacatttccctaacctaaaactcaaaaaaacaacaggagttaggttgaaaaggggttttattactgctcatgaagaaaaaaatagactttgtaggcatgttacaaaaaaaggtgatcatttcttctcttttgtagttaactattgggttcttgcagctcacttgctaggcacgtgatttttaggtttatttccatgtgtttagatttctagactgtatgatgttgttggtgacattagacatttacagcaaattactccctttaaaaatagatctatcccccaatccctgtgaccttaatttatccaattcctatttggcttgcaatttaaatactcgaggcattttaaattgtgcttaatttggactttttattctactttttaatgcaagaacttttagatactggaatacaaataaatattgtagccaagttgcttttaacctcaacacagcctagccagatttgttaaacaagtgttagtttttggaatttagaaatcatgcagatactatcactcccctaagttggcatctaacccagcacttagggtgtgacttgtctttcctagccaaggccaggaggacacttaaaactttgacaatgttttcaatctatggcatatcacattgcggttagaaatggccttaaaatgccagtggttaattttaagtttggtataatacctccctggcatggttgaaagatggttacaaagggtttggttgattatgtcatggtgtaaccacttaagagctatcagaagtagtttataagttatgctccaaacagaagtcctgtgaatgtattggtcttgcctctgcttccacctgaggtctttactcattaaaatatcacattttttttttccacaaacttttatagttagactcctgaggccacaaaaatgagtaagagtaagtcacagtcgagtcagggagatatgcttgaggacaaataaaacacagtacaggatgagtgctccagagagggatgcacatgggactgaggaggcggggaaatgaaccccgtagattggaggaggagaggacctcatgcttggagtgacatttccatgggaaaagtcatgatatttcattaaggaatgcccaaagaattagaagtcttctaagcagagtagacactccaggaagaaggaacatcattgggataggcagaataatgccccccaccaaaggtgtccactttggaacttggcagatgtgattgagttaagggtcttgccatggggaggttattcaggattatacaggtgggcccaatgcacttctgtggtgtgggagttcaacgtgggtcttagtgggcaaaagtcagagactctgcagggccttgttcctttgggaagccctaggggagaatctgtttctttgcctttgccaccttctagaggccacccccattccttgttttgtagccccatccgtcttcaaagctcagagcggccagtccaatctttctcttggggcatcactctgacgctgacttctgcttccctctttcacgtgaaagaacctttgtgattacattgggcccacctgaatgatggctcgttaagacctgtttgaacttccgtgccccagaactgcaaaataaatttatgttaaatccctcagtctgtggaaatctgttacaggaaccatggaaagcaaatacagccatatccactgaaaggtttggtgcaatggactaataggcaagggcaggaggaggggaacaaagtggtccttttactgtgatgagctcagtgtcatgtgaaggagtttggattctgtcctattatagagaaaatatgggaaaccagaacatgaaatggaacagaccgatgccagatttacttcctaaaaacacaatggataactaaaccccaggtttcacagggcagcttgataaaggaagtccaacaagaggtggtcagtggccagtagaggtctggaaccagcatgctgtaattcaggtctctggattcatctgaaatggcagcatttgtatgcatgtatgaaattaatagcttaaaacttttactcacaataagaaggacatcataaagcagaagaggcaagtcacatttcactttgtttctgctcattgtcctctaacagtaatcagctgttctgctgtctgcgtaccatgcacacgtgagcaaggagctgtgaaagctaaaatttaacataattaacttgagaatgatgagatttcacatgggccaactctgaccagttggtaatagctgcttgcaatgtcatgggcttgtactggttcagctgggaaagtgccacaatcaatcaccaatgtttgcgatgggctccatatttgacgttggtgttgggggatgtgggagttgacagctataatactacataaactaacttttgggtttgaatattagaaatctagtaattcttttcaaacatattcatttagtctctcttatgtacaaggcctcaatatctaccttgcaaaaatgtgttgtctcttggttaaattgacatctctgtgtccagaaaacctaaactgaaggattcttctatcttagtgttgtaagagtggctttgaattgaaactgaactgcatgtaagaaaaacaaatttttcagacaatgtggtaaaagaaggcctgggttagcagtatctgacactggaaacaacagtaagacttgactaaaatttatcctaataaaacaaaactttatattgtatagctagcatccatttgtatgacttgataagatttttacccaaatgttctcatagaatgatgcaaaaaaaattgttttctattgtaaagtactaggtcagtgtaaaccattccctcgctcttaaatcttaatagggaaaaaccaggttgtggtagccagatatttaggagtgagaaccaccaggactcagtggtagagttgtactctatctgtgggcagggaaggaaagatggcattttaaacaactcccatgtaattaattggattatctgtgtcaggctctacagaagtgcagagggcccacctgctgtggcctttggaatactgtgcccttagctattcccaatattttttttattgctctttctccgagagcttgtactctgctttccctgggttctaacccgggtctcttgtcttgcttgtggccctctgtgttctttccgggtgacttatttttcctcatgactgcatcagtcacccatgcaccagtgtccagcctttctcaagcccatattccatccattcattaattcattcaacaggtagtgacaacctgagattttaatctaatgaagggtcaaatgtgcaaaaagataattatagcgaaaataggaagttatgagtaaagggtggtgagaaaaggagtgtctggggctaccttgggagtcttggagggcttttgaaccaagacctcaaagctaggggtttgccagatgtgcaaggtaaggaagggaacgtggctggaggtggtgccgtggggaactactgggagttgaggaaagagaacttgctggggttggggagatgggaggaggaggctccagagatgcagtcagggaggggaatgggaggagggaggggggagggggaggctccagagatgcagtcagggaggtggatgggagtcagactgtgaagaatcacctaggtcctgcgtaggacttgagtttcacactgttgacacaacgaagacatggaatatgttttagatctttcagagtcagctgactctagtaatgacatggtatgtggattggaggcaggcaagactagaggcaggtcggcaaggaaggagtccagtagagatgatgagcacataacccaggggaaacccaggatgtggcagcccaatattgaggagtgagaatcattagaactcagtgattgatatgtttctcagggcagggaaggaaaggggacattttaaacaatgtctttatagtgaaccagattctgtctcaggtacagcagaaatgtggaaggcccacctgtctcgaggatagtggggtctgagcatctctcaggggtcttcctaccaaaggcaagactttgcagcaccagagagactaacttccactgcctgtgcttaaccaaaagggacttcaggccagggaggagctgcaaagccccacacacagcaccacatgcgagggaagaagtcggaaccttatcacagggcacagactttgtaagagatacataaaagaagaaattaactccctgatggaccctcagcttttggactgaagcattggggacttgctaatgagactgaaagaaagttgttgtgggttgggctttcctaattctggattgagactgtaacttacttagaggctgtgctgaaattgactctagtcaacaggaaagaggaaaacttgctgaacagatactgaagtataatcccaaccccttccttccactgaggatttgagtttgctgatggtgtgaggaagatcgtaagggaagggtttgctccttgaggaaataaatgggttagaataaagtgctccagaattgtccacttctgggacccacccagttcaggtgcaggctgagactaattcaaatcattctcatcggtttacgaaagcagtacctcttaacaagataggatccatctgttctcgagtctctacctttcatatgtgtgtgtatatagatgaggtctcgctctgttgcccaggctggagtacagtggcatgatcatggctcactgtagcctcaaactcctgggctcaggtgatcctcctacctcaacctctggagtagctgggattacaggtgcatgccaccatgctcagctaattaatttttttgtagacatgaagtcttgctatgttgcccaggctggtctcaaactcctggcctcaagctatctccagactctgcctcccaaagtgctgggattacagacatgagccattgcaccaggctgtatctgtacctttctgttccttcttgaaattagcaagggctctatatttgtggcagtaatgaccaccctgaggagaccatccaactcctttcttctccaaaggccagacgcccctgcaagaaagtaggtagataaacagcgactgtgcttaaagattcaaaacccgttttccctggtcctaggcaaggaaaggtatttgagtgaagactaagttagtgtttggctcccagcacctcctgttaggtctttactgcccaggatggctgtggatagcataaactcttgagtaaccagtgagcgttcttgcttctcagctgctgttatgaagttcatcttgaaaattgctgcttaccgctaaagctaggcactgggcttcactgccccacccccggccaggcctgcagttctgtctaatgactccctgccatttctgctggcagccctacgttggcgggaaggtgtttttttgttgttgttgtcgttttgtttttcttcaaggtttggacaatcctagattacttggtctttgagtccagctctggttagaacttctcaaaggtaacctgtttttctccatttcaaaacatttttgaggaccttgaaattcatttccagaaaacatctgagtattaaccatcctttgccttaatggaggctggtcatttctcattgtgcctctgtacccaggacgtgcagtggacttctgatgtcttcttgcctttggaaggcatctcatcactacctccaagttatggccgcctctcctcctttcactgggttgttagttcttgtgcctaagtagtggatcaaatgttccaaagtcctctttatcatttctcctaagatgccccagaggccctcatctggaatagaatttctgaaggagttccctgctgtcccagagctctccagacagccttgcacagcagatccactgcatgatgcttgcaaaaaccaatgccacctaggtttttattacttgcgtgccgtgtttctttctacccttatttgtctagactaaaccattactcctgctaggagaactgtctggtctccttttattcatccttcaggtcttggccaaccccagggaacattctgttaccttcccagcttggcctcctctgaatttctgtggcatttacctagtttagcccataattgcatattgctttgtatgcaggtgtcaccaagattctaagcacctttggggtaaaggcctggtcttaaactgtttttaatccccatagtaattggtactaagtggataatagtggcctcataagtactttcagtttatttaattgatatgactggctcctaattgtgtttatcacttagataaaggtgactacccagcggagagatgggagagatcacctggaaagtgtgctcagcctaacagggcccctttccatcaaagctgagagaaaagcaaagtggaaaccactgaatccctattttcagctttcttctggtgattttgtttaattgcaacaatttgccgtgttgtgacactgaaaaacacttaggtggaagactgatcttaaccactaaagtcaggaagattattaagatggaataaaattctgaaaaatattgcttttatgaacaaaattttaaaataattagctacaatgttatgagggttgctgaagctttggtgggcactcagtgaccaccgtgtgcaggtaacaggagccctggactgagagaagatgtgagctctgcaagggacttttcctgcagtgttggtggcttggccccagattcttacgctgttgtgtgggcagaatcacaggcctgtcccagccttagagtggtgctgaggctctgatgagataacatctgtgggggtgttttgtaaaccataaatgctaggtgaattgtaaggggagttagttatcatagcactcttaagaattaaatccagtagggtttgaattacaggatctcttctgatctgtttttcaccgagatccagttcttagtgaaagagcctataatgacactttatgtgggagattcagggaagtgttcacgatgcaattccagtttgtgataatgggctggtaaagaggaaggaggaaatgctatttaactaccctctccagttattgagtgcatcttttcaaacagatgaaattttatcctgatgaaagaggaaaccctaggtgatctagttcctacgctgtgaatttgaatggtcttaatcaaacaaccacagacacaggaatgagggactgtgcgacattttgaaatataaattaagtaggtgattgcttttcacttcaacaataacaagagcatacatttctggcatctccgcctcgtcttctgtgttaccctgagcctctgttcacaggcctgtctttatcaccagcctctcaaattccactgtaagcaaatgatgcatttctgaggactgacttaaagaaattttgggttatacttagttctgtggttaaagaacagacattttccagaactgtctaagaaatgaatttgtaccaaaggcgagcagtaagttagtaataggtctatcttagagggcatataagtagaataaattcactccgcagatattcaagtgtttgctttgagcaaagtgtgtttctgaacagtggggatacatcagtaaacagcggcaacgacaggagcccagccctctaggagctcccatcctaatgggagcgcagtatgtaaacacgtagtagttaatgctgtaaagacaaaggcagggtcgaggtaggtagagcatgatggggtgggcacggtttcacataggtgaccaggaagggcctcgctggttgaaggcctgagggttccaaaggaaatgttccaggtatcccagaactcatttcagatggtgggaatagtaagttcaaggatgccggggtttacccatttcaggattagcagagcccagggaggctgatggggattgagcgagcgtagtgaggttggatatggaggctgtgaatctgtcagaggcctactgtcaggccatagcaaggctgcctctggcttttacactgaatgacgaactgctggaaaaatgtacattataataatttaagaatcttagcgttttatattcattatattttgagacattctccatgcacagattgttactaatcattaaataataataaaagtaatgaatgcatggtgctaagcacaatcaacaatatttgaataccaactcttttttttaatgggacaattatgttaatgataaaaattacattcccaaattgccatagtagactcaaggcctctctgaattatcaagtgaaatgaaggtttcaaggcccaaagacacgggccttggtcagaccccctgtggaacagctcggatttacacaaccagcagttcttggtctgaagaggaaaggttgggtccgtggcatggctacaggcactaagttcaccacccactcttagtccaggtaacagggtaaaagtagtgaggctcaggcttcactccagcctgctctggtggtgaagttggagggagaaacctgcagctgtgcccaagaggaccggcccgtcttccatataggaagtcctggaggaatctgggctgattcacatctgcagtgagatgagggcatctggagagggtatgaatggggggcgtcctaatactttcagagcttgaatccatttactccctcattttattgtccagaatgtaagggacacacaagaagttgtcttgcctatggagaacaagttctcacaggctgcgtggcgcacaagctgtgtctgtggccatctgccaagtcacaaatggcttggccatcacagtgctttgccccagttgtatttactgcaatggaatttttagcagtgcaccaagaactctcttgttctttcccttttctctttacccctcaccgtttcttcccttttccaaccccagtcttactcctggttgtcatgatcatactatgatagatttggaaaggacctaagagatgggtctgaagctcggagagatcaactgactcccaggcgtcatctcctagtaaataaaaaatggaggaaaggagtaagtatcctcactcccagcttgtgggtcttaatcctaaaattctaaactcatctgctcttcacacatcaccccagaatttctgttcttgaccttaacctcagagcccaacccatctcttatcccaggcacctgatcctatccatttgctgtattaaaatctcagctccacggctgcaggagacctgcagtgaattcttcacactggctgttgctaagaacactcgatgtgtttctgttagaagttattctgtgtctcagttgggtactattaatactatccttcaggctcatcgtgagttgagtagctttattatgagctgtcccaccacaaaataattaaccaccctttgtaagattgtatgtgaaattaccctcccagttccagaaaagggagttttgtttggccagttgggaagctgtgtgtgcacaatcaaatgtgagggagaggtaggaattgagaagggctctttcattatcaaggccttgcgggtttgcaaacgatccagaattagcaagaaaatgtaaactcacaattatttcaggtcctgagtcatattaggaaagcatattaagaagattgccctctgatttatagacaatgtgctctgtgggctgcagagagggcagggtttgcttcctccatccaggcagagcgcgcacagcctggacttgtgggcaggcagccagggatcagcacctccataaagcacctccctgatacatggcatcttctagccatttttctagccaaaaaagagttctgactcactgatgtgtccaggcttccagacatccatcagctcctgcctggtttcactctgaatgtaggagcttcacactaaatacatcaggaacttcttggaaaatgggcttgagatcaaataaaaacaattgaaagctggcagaagtagtgccatctacagattagcaggtgacataaattcactggactagaatgaaaattcgaatctctacatgcatactccaaatgagtaggaagaatgttttgaaaggacataattttttaaaggggggagatgttggaacaatattctaatgaaaagaaagacagcagctagagatgcttctgtaccagcttaggttgaatatagactctaataaggacggtgtcaaagatcaaagaaaaatgtgaatacagcattgtaaccctctgatgtgcattgtgatccgttttagggattggcctggcagcataaaggcccctgcatcagtgtgtctgtcccatttctattcagtttccagatttggctaattccttggatcatcagatttctggagaaatgtctctctgatcaattaagaatgacccaattaatacgatgagccatggtggtgccactgcactccagcctgggtaacagtgagatgctatcttaatatatgaatgaatgaataagaataagaatttgacattatgtgctcaaacatcaataaactcttctaaatgatatacctgtgattagaatagcctgcactgcatgtttcaagtgctagaacaatttaataattggctttatggaaccaagaaaacaatcccaggtctgatctgaggttattattagcagtcatggtctttttattttttttctaagccactaaattaattgcatgaccgtatgcaataccataccttctctaggcctccattttttagagtaaagaaaaacctttatgaaaatacatccaagtttttccaagtctaatgttctagttctgagaagagatgtgtagacctgtttttatcttgcttgataattatatatctatagagaacaacctttaatgtaattttttccctcctcctttataagggtttgtggttctttttctctttaaaagactgtagtaaaggtcccttgagtatctcccttctgatgatcaggcttaaccaacatttatgtttagtaggatatcaacagtatctcatctccatattagagtgattttttaaaataatgatttgatgaccctgggcaatttaaacagtatatttctgagagctttattttgtattatttttacttttaatcagaaaaacataccatgtgaacaaagtgtggagattcaagaatagtttcttaatattatgccccattaaaaataaagttttatgaagatggcatctctgggcctatagtttgtttttaagtttgaaaaacagtgatttaacccagatcagtttttgaaaaagtacgtgccttctgtgtatcaaaaaaaaaataacagcataaaataaaattctgtagaggccgaacattagtgtagttggagtaataatgtggtacccctctcagttgttccatgggcttaaacagctcatctggtggctgttcacagcaatccagcaagtctgggtgtatatttagttctacccattaagtagctggaaattatcctaacactacacaattaataagtgcgtattgtaccaagaatgccatgaggtctctcctgagtctcactttcctcctaagggccaactactttaaaaagacaggctctaattcttctcatggtgtgctgctgtatagctcttaatttgtgagtttttatatgtaaatgtcatgactgtggtttgtcatcacaacaccctccatcagccaggggtacagagagagaagatggtgaagctaggaggagcagtgaggaaccaggcaggagcgaccgtgtactctgccaggtcactgctagcagacaggccctcatccaagagtggcagcagagtgcagagtgctgcccaagggagtggtttgttgaatttcttaatttgtgtattctactgacagtgccagccattggtttttagtaaatgagacacttgcttcctaagagctgtctttataatcataggtgccactggtcaggaggtcttgtactacttcaacctgctatcagatagtcattctgtacattctaattcctgtacctctttgcatctgccaacttctttccttccccactgcttttggttcaggcccccgttcatttccttcctggatattgtataatactagtctcctagccaggtctacatcgcagccatatgaggatcaagctgatctttgtaaacacagaactagccctgtcacttctccttttcaaaacctgtgagtgcccccatccttggcgttgcatactatccggtcattttctgggccagcctgcctttccaacctacttccccctcctctgttcttgcacacaccacctggccatcagtgcctaattacagacatttccccaggttctctgtaatcgtttctttcaatattctattcctcttttgggtcagcttctctcccctggtccacttgggtacttctttaaagaatcacttccagaaaattcttcctggctcatccaaactattaatacttccatctcttgtctggtgccccagtggatctttgacaccctgtgatgggcagctgtcacactgtcctgtaactgtcgatatatgttcctgtgtcccctgccggattctgacaagaggggagagtcctgtgtccccttccggattctgacaagagggggaaggcctcaacccctggcagtgcacccagcgcaggtcatttctcaggtaatgcatatcaatttggattgaactgatcccctttagatgcttctaaaactaacctaaaagcaatgccctttcatactttcctgtgattatcacatttgccatctgaattaggtattacctttgtgtgattagaggcatcaagaatctctgtacagaaatagactctagaacatggacaagaaagggcaagaaagggcagtatgaatctctgtaataggactttgggcattgagataggacttaactgatttatcacttaaatgatttgactctggactgcagtaattgctaaaggaacattttttttccacagatttcttggcccttgactttagattcccatatgcgtctgtttgttttcatgctgctaataaagacatacctgagactgggtaatttataaagcaaagaagtctaattgattcacagttccacatggctggggaggcctcagaatcatggtggaaggcaaaggagaagcaaaggcatgtcttacacggcagcaggcaagaaaagagcttgtgcaggagaactcccatttataaaaccgttagatctcgtgagacttactaccacaagaacaatatggtggaaaccacccccatgattcaattatctccacttggccccacccttgacacatggggtttattacaattcaaggtgagatttgggtgggaacacagccaaaccatatcaccatagtttatattcagagatcaccctaattatctaaaattcagtatagttgatgcttgaacaacatgggttaggggcacccacccccccgcaatgcagtgggaaatctgtgtataatttttgactccccagaacttaactactaatagccggttgttgaccagaagcctttctgatgacatgaacagctcattaacacatattttgtatgctatgtgtattatataccattttcctacaataaagtaagctagagaaaagactgttattaagaaaatcttaagaaggagaaaatatatttgccgttcactaaggggaagtggatcatcgtaaatgtcttcagcctcgccatcttcaagttgagtagactgaggaggagggggaggggctggtcttgctgtctcataggtggtggatgtggaagagggggaaggagaggcaggcacactcagtgtaacttctgttaaaaaagaaaaaacctgcatgtaagtggactgagtggttcagacccatgctgttcaagagactctatgctgatcctgaaaggtgttaggtgggatagaatgagccagtgagaattttgttctcattttttttaatcgcaaaagaaaatatttttaatttttgtttaaaaaagacgtggatattttgaattcattatgatatatgggaaaggaagtggcagaaacatattcataactgaaatggcttgagttgactaccagttttgaaaagttagtattcatgtcttaatgagtattttagtgccactttccaattcatatgaaatggggcttccctctccatgcttcatgagtataaccctgtgaagaatgtgttttcatccagaaggtagcttatgtgcctgtggcatcattcccacgcaaattaaaataggggtaactctcagtaggtgttgcaacaaaatccagttgtatcactctacaaattattcatcagagtagttggggcaatacccaaattgactctgccaagaaaaaacaataatattcatttagtacaaaacaccccttacacaagaggtccttttccttctagctccagaaatacatgggcaacagtcttattgattataggtggaaaaagaagaaataggactgaacaaagcattttattaaacatttttagataaaatccaatggctgggaggtagggaaggggtcaaaataaagaacatttgatatttgctaaatatttctcttttgttctatttatagaaaataaagtagtctatcaaagttttcccaaagattatgaggtttaacaacttgtccattgtagcttttgttaagccctggttttgaaagctgtggtctttgttcttgtattttgaaggactgcattttaagctgctggattatagtacttagggtttactctttgctggctcaaatccctttcacaatgttagattgttattttactctttgctggctcaaatgtctttcacaatgttagattgttatcaactaaacttttttttttttttttttttgagacagcgtcttgctctgtcgcccaggctggagtgcagtgatgccatctcggctcactgtaacctccgcctcctgggttcaagtgattctcctgccccagcctcctgagtagctgggactacaggagcacaccaccacgcccggctaatttttgtatttttagtagagatggggtttcaccatattggccaggctggtctcgaactcctgacctcgtgatccgcctgcgtcagcctcccaaagtgctaggattacaggcgtgagccaccatgtccagctcaactaaacttttcatggtgctgtctgtaagatcctaatccaacaagctgaaaaggtacatttgcagaatattttgccagcgtccagagtcacgtgatatcttatgttcttcaggcaacacattgtaatttgttcttaaataattgccgttggattccatataagcatggcttcatacagcaagtgtgtaaacgtgattatgggtgcctagcaataaggaaatcctactgaactatatgtgcaagtttttgctatccaggagctgtccttgtaatcgagaaggaatttactcaaaacagaaaagtgcaagatcatacaccagggagcagtgtcaagtttggtaggtgcacatgcgatggggtgatgagaaggactagaagtttctaccctgtgagccatgggactcacagaaagggaaaggcagaagagggcctggatgctggatgggcagtcaacaaacatcatctctaggtggcacccaagctgttcggtgcccctccttcctacccaactccaagcccatagcacctagagaacatattgaagttatctgtatgtctttccactactagactgtgagtggacatggtctgtggtttattgagctttgtggcacttcccatcccctaaatcctggcagtgtgcccggcacataataaataccttttgaaaaatctgaagtgaaagagtaaattgaaagtaaattcttactaaaactattaattcattagtgttaattcagtgcttactttgaatcagttttcacagaattttagagcaaaacgctgtgatacaaacaacctgtaaatgatgcgttatgtcttctgtaccttagtgacttttccagatgggagaggatgggaataaaaatgaggaagagggaaaacattttgctaactgaaatccctgcataaaacgaaagtctctgcttctgtatctcgtaaggtctctaacggaactagattccatttcagaacagttggctgtgtttctagcccaaagcacctactgacattattaaaatataatagcacagcagtatccccttctctttactctgctagcacaatgtgtttgaacgtagaaagccaaatgtggagagcctctgtttgaaaacagctcttgagatacacactttaaaattcagtttgattttccatttgtggcattttctttaactggggggaaaagttatatttaccacccatatttattagaacccatctcccaacctgccttgtctctgattctcccctgtggtatttagccaggcatctgctatggctcgggcaccagggagtcaataatgagtgacccagcccctgccctcaacatgctcaccacagaatacacctaagggggcagctcatgcattctcagacttgagcccctgcaaaggacccagtgctgaaagtcatttataattatttataatttataataacgttttaagcaaaactcaagatctggcttttagaagacataaaaatagattggagaagcatcatttcaataaaggatgctttatacattgtgctaataattcttgtttatcaaggcagcagtacataggtgtttggtatacatttgattgtgaatccttataattgtcttgtacttgcccaagacacacagccagcgaaggtggttatgtccagaatcctggcctggtctctctcaaacctgaggccatgctcttcacagctattctgtatcgaataggtcagctttccaaccacaaaggaaaccacaagtttagccaagtaaagaaagacatttgcaaagtcatggcagggtgtctatcatgccattgcagtctgtgctatctcccttcgccacagggtttcagctggtggcgtaatgtgttggcttcctagggcaggaaagcactccagtttagtggggtttatggaaatctatggcaaaacaaaactcttttctttcctactgaaaaaaaatatgatctgaagctaatttatcatcaccaggtaccccttcagtgttgttgtaggcagaattgaaataataacttctgcctttgaagaaggcatggctatagaattagaatgaaatggaggatagaggactaggtgaaggttagatctttggacatagaagtgccgccaaccgtaatgtctggtgatgttccccagcctgtgggaggcagatgagattgaaaccagggtgtacatgagtgacctggagcccgtaagtaacagtaacacagagcagagagcgctagatgaggtggagctcagaggagcatgggaagttgaatgagacagtaaggagcattctggaagctataatgggtagttaggagaatgccagagtgattctgatgcagtccttccaaatgccggcagagcccaagctgtgaccagtgacgcagactggaagtcccgtttactgggagagaagaggttaaggaacacccaggtgaacaattaggtcctccacaatgaagacaggtaatgtggaggaaagagagcttgtcatggtaagtgaaagcagcctgaatccatttttgcgctctatgaagcaatatataaatttaatataagaaatatttgttcctataaaatctatatgttttgatagcaaaaaacaaaattatgatttctgtgaaaaatataattcacatccggaacatcttatggttgtgttttgtttaaaaagtatgtaggtttggccgggtgcggtggctcacgcctgtaatcccagcactttgagaggccgaggtgggtggatcacctgaggtcaggagttcgagaccagcctggccaacacggtgaaacctcatctctactaaaaatacaaaaattagccagacatgttggtgggtgcctgtaatcccagctacttggtaggctgaggcaggagaatcacttaaacctaggaggtgaaggttgcagtgagccaagatcgccccactgcactctagcctgggcaacagagcaagactccctctcaaaaaaaaaaaaaaagtatgttgatgtttgtattttagctgcattgctaaccgtttatagtgttttgaatggatgaatgctaatgtttatgtgtatatatttttgttttcttaaaaacaggttcttgctcaagtaccaactctatggacccaggacaggtttgtcccatgacctgctgtgaacagtgtgttgtctgatagaagattcggttggcaaaccatctctctattgccttacagagcaagcaaagaagatggatcgattgaagagccatctgactgtgtgctttctaccttctgtgccctttttaatcctagtatccactctagccaccgctaagagtgtgactaacagcactttaaatggcactaacgtggtcttgggctctgtgcccgtaatcattgccagaactgaccatatcatagtcaaggaagggaacagtgccttgattaactgtagtgtttatggcatccctgacccacagttcaagtggtataattccattggcaagctgctgaaagaagaagaggatgagaaggagagaggaggaggtaggctttaaagttgtatcaaatgtcataataaaatataaacaggagctttggagccagcacccgtgatgttagttcttctcatgcaaatgatttaaagatctcatcttgtcttgtttttctaaggcaggagagaatatatatccttaaggattcaaagaagcaattaattcatttttttccctcattgacacagaagacaaaggacaaacacagaagtctttttaaaggcttcttggaattttgtaatataatacatccaatacattatagagacaaatgtaaaatggattttcctaaataatatattcaatttttaagggagttttgttttctttcatggagatggctggaataaacaatatagccattgtttatcattaaatgtccatttaattcattggccgtggatttaaagaccacacttctgaaagaaacctcagtgcaagtctcagccactggctgggattcctggagacctggctgcagtttctaggctgaggcagggagggagggaggatgcaataacaaggaaggatgtgggacaacaggagactgcttggtttttaataaatgcatttctgaccaaaaagtgtgagtcacctcactccgggaaagactagccagagagaggattgggtcttcgggaatcggtgcatttcttgttttagatgcgagaagtaattgtctgaaaacccaatcctggtcagattgaccagaaggagttaatctgctttcctaggcatttactgtgtgaagtagaggggttggggtgggggagtgaaaagaacattgttctaaagtagcagcttattagtttcttccattcacattgccctcctgttccacaattctttaaccaatgagcaatccccaaaagagtttctgctccaggaaaacctacattttaaatctctttccctcattttatcttaattgccctgaaaaaagaatagaggctaatgctgtatatctccttaggagctaagtgaatggagttttcttgcagttgcctacttctggttcacagctgtgttccgaatggttgaggctgctagccgtctaattggccaggatgtggggtttgctgtagtgctgtcacttacattgcttttggttagccagtcaaggttgtagagcattataaagcttcttcctttaagtcaaaatattacatattatgaatcgcgtttaacctaggagagtcgaacttttacccaccaagaggaattgtgggaccatagcaaagttaaattagaactcacattgaagacattatagttcaaatacccatttactgaaatttgcccaaagtcctgctattattaagtggctatgactaggcctgtaatcccagcactttgggaggccaaggcaggcagatcacctgagatccagagtttgagaccagcctggccaacatggtaaaaccccatctctactaaaaatacaaaaattagccggacatggtggcacgtgcctgtaattccagctactcaggaggccgaggcagaataatctcttgaacccaggaggcaggcgttgcagtgagcagagatcacgccactgcactacagcctgggcgacagagtgagactctgtctcaattttaaaaagtggctataacaagaaccttcactactgacagtggaaaggtgagggaacacaacccctagcccacactggttttggttcctacagccacttcctccaggacaagtcagaaggcagtgatgtcacacttgtgaatggagggcaatagccatggtaacaaagacactgcaggccaggtaccttagcaggtctttctgcagggctgagctatcgctagggaacccacggtgactgaatcaaagggaagaaagacccaagacctggatctcccttttacatggaccctaaagcaaaggttatccctgggtattaaaaagctgggttggggcactgaactcctcagtcctagagaggaagagaactgtgggaatagcatagcactggggcctgaatttcagttccaacatttcgaggattatcccaaagtgtagtatcttactgcgtctgagatacatatgtggtatcttagcgaaaaggtccttgtaactgctgactcagcgttggcaagctgactctgcaccgtccctccttcatctgtgtattgagggcattgaactagttggtagttatatttggctccattttcttttgtttgtgggtgctaagatggactatagtagtagcctgtcagtagaccccaagctagtggccgccagtcaaaagcctttgccacagagaactgctccatcagaattcagcactctggtttgtagccagcagccttgctgataaatcagttagctattttaaatctctttaaaactttcaagttttaaaaagaactcgtgatactagtacttgatgttccagctcagcttttgtaattacaatgcatgatggtaatttcagagcataagcaacatgggataatatacaaagcagtgtacctaacaaccaagcaatacacagaaaacaacagaaacgagagattcttgctcaaaaaatatcagaatctgagagctggaatggcctattggtaaacccacagtctttaacttttcatttttgaagggggaaatgtccatattataatatggacatagatttccattttcaaaccaataggctagaagtttatatggagcggtgttttttgtgttttgttttttgtttttttttttaaataaagaggtgattgaatatagtatgaaaaatactaggccaagcgcgtggctcatgcctgtaatcccagcactttgggaggccgaggtgggtggatcatgaggtcaggagattgagaccatcctggccaacatggtgaaaccctgtctctgctaaaaatacaaaaattagctgggcgtggcggtgcatatctgtaatcccagctactcaggaggctgaggcaggagaatcgcttgaacctgggaggcagaggttgcagtgagctgagatcgcgccactgcactcgagcctggtgacagaacgagactctgtctgaaaaaaacaaaaaaaagaaaaatgatactaatatcctagaaccttacctaggtacactaagactactgttagaaccaaactaacaaaattataattttcattaacaactgctgccatttactaagtcgctgcaccaagtgacatatattatttctaatccttataataagccctacagtgaagtgttattaatcctcatgtatacagatgagaaaccaggtgaaaccagagggtatgacacaaccagagtgtggccagcgggtattcattctccctctgtgccccaccacatcatcctttaggtcctgtaggtgaaaaatgttgaagagcctctcactcagactgagtgaatatgagaagaactagatggaaaaggcatcctcactaccgatagcaaggtcagacagtgttaggatttgtgccggaacatgtgtgtgtacatggcatgcacatgcacaaaaaggcgttcaaaaatcatcggtgagtcactcaaggagcacactgccattcactttgtgattagcctggaaaggagcaatttcatgtctcgtttctgctgaaaaggtgagagagctgttattcatgccagcccctccaggcccagagagaatggggctatttcctgtcattggcaggagcagcagctggtttgctttgcttgcctggtgctgtcacttcaattccacaggatcaggagaggctaatgtgtgatctctatctggaagacttttgtttttgtagttcagcaaagaacctgtttgaggtagtccacacaccataaagcagacaacatgaataaccacaaatggccacgaaatatactgttttcagttttccttttgctagaagtgagtagaaatgtatagtagccaggaattaagtcctaactatttcaggcactaattatccaatgtgttttcactgttgcttcttactgtgactttaaaccatttacattaacattagcacctctctgagataagtaacgaggatttcaagaaagtcagctggtttcagcccttgtaaacatgtctaggtttgttagagattaagtttgaaattcttccattaagttaggttttttacttttcctgtggatttgttttctgtgctcttgtagtgtctggttgccaaaaacaattaagcactgagtctacaattgtcacaactgctactatagtgctatggaattcattattataaattttgcctctagtttactttgctttattgtttttatccctctacttttgcaggtttctttgaatagattgtaatatgccttttaactagttctgcaagggaccatgacaagctgtgtcagccagtgataagactgtagttatcacctccctacttaatatttatatatcaataggtcggtgtccacagcattagatgtaaattatcctttacctctaagatcagtgtgaagtggtgtattaacctgttatactgaattcttgtttagtatattaaatacttgagatttaaaacactcatcaaggccatgtgcagtggctcatggctataatcccagcactttgggaggccaagatgggagggtcacttgagcccaggaattcaagatcagcctgggcaacatagtgagaccctgtctctatggaaaaaaaaaaagttagcagggcttggtggcacatacctgtagtccctgctactggggaggctgaggtgggacgattgcatgagcctgggagtttgaggctgcagtgagccttgatcacaatactgctttccagcctgggcaatagcaagatcctatctcaacagcaaacagaacatcaaatggtagcaaacacaatttatgatttgtgaacatatgtacatattattggaaaatatgtaattatgaatatatgattggaaattgagaagaataaccctatatagtctttaaggaagttctttgacttttctcaaccacagtcttcttgtctgtgaaatagagataatccttttttactacaagtgggattgtgagtcttaaatgcttagcagaggtacctggaatatagcaagctctcagtaagtggcactgctattattattgttaatattatactatatcctcacaataataggtttcaattgctaaaaatccctgtttcttaatatagtgtgttttgtaaagaaagagttttctgggtaatttaatatcctctctctcaatttctcaacctttccaaaactcagcaaatgcaaaagaaattcctatcccttaaatgttatttgaaatttcaaaataatgttctgactgctatgacagtgagtttgggattctcttctcatcagaggcctcctttcctggtgcatcacttctgcatacaaagggtcctttgatatctaatgtgcttctaccttggaagaaagcagtgtatgtggaaattacaaagtattatgcaccagatgaattttgcatttgcctaaccccgtggttctcagctgggaactgttttctccacagaggacacgtggccaagtctggagacatttttggttgtcataaccagtagggtcaggctggttgtgctcctggcttcaagtgggtagaggccagagatgctgctaaacagcctacattgcacaggacagacccctacaataaataattatcgagccccaaatgtcagtagtacccgagttgagaaaccctgctgtaacccaaaggagcaaccccttggctaactaaagaatcgttccaaagtagatcccatagaagcagtttaatttactaaggttaattttctgaattgagccatatcaaatgccaacctggtaaccgccatttgtgtgtttcttcagtgagttgtgctccacttgggatgtgagcccagatagctttagtcttagcagtgaaaagacccttccagatccatttcagatatggatgacagctaagattcccaaaatggaagtgattaatgtgaactaagtgtagggtgctgttattttggaggaccacctgtagctactctctagaaaagactattatgagcccatgtattatgattccatgttctatggaattacatgcttggcactcctttaaaaattaagattaccagaccaaattagctagaggaacagatgtttccttttccaggaaataaaaagacagtaggttattttcagatattagtaccttgaagtagaacagaactacagattctgaacagcaaaatccttccatccccaccttcctgagttgaaagcttggctaagcccatattatcccaggccaccttcgctctacatgatgtaagaattagcttgttagagctgccctagtcctctctgaagaggtctcttgggagggttgtgagtggggttggggaggcacaagagcacttgcagcttctgggattcataacctgatgctgcagtggcttcaaggagctctcatcttctgcagatgccttgtaacaggtgcagccatgcagtgctaaatttgctttcaattatgtttggtaaaaaggcatgaatcctatctcttcagtagcctgtatttcacaaaatatgtgccacatttatagatacaaacacatatgcacgcattttgtgcttcttcaaagggtgccgattctacgcaatcctcgtttgaataaatgttgtatttcatttattgtttgcataaacatttactggaactctcactatctgaatatttttaaattagtttcaagaaactaacatactcgttttggcagatttaattcttctcctggaaaagcatgggtgtgtgaggcttaagagccaaagtgtctaaacaggatcgttaatacagttttaatctgtttataccactcattgggaatgtagacaaaccatacgtccatcactgtttacacacacgcattcataaaaagattggaaattttaaaagcttagcatttgggtataatttttttttttcagtcagctttctcaagttgaaaatgttaatttttaacgctcagtgatcctaaggtaaacctggaaagatttaaggtttcagtagaagtggtgtttggagaaaagctgtgattacagtacctgtggaggttgtgctctcactttccctgtgattcttcagttcagaatgcgttgctcattgctgctccttgctgtacagcagtaatttgctcagaagttgtttgtgtgagcgttagttctgatgttgtcatctgttggtttcacactaagtcacagtcacccctgtaccatagaatctcttgtatttacaggtttaattgtaaccataggatgctattgatctgttctctcattgccagatgggctacctggcactgtcctattgaggagacattgggccataccacgtgggcatgccaccatggcgagcaccgtggtcccaggtcagctgccttcccggtgtggaacccaccacagttatggcttctcccagagaaagtgagctggagaggaaagctctgaactatgtccctgggaagaaacactgttcttaaaaagattttttttattattattacgttgtttggtttacatcattgctgtttttccagtcaacctaggcttgcctgatttgaagaatttcaagaagtctaagagtggatcataggctaccttcattttaagttgtgatcaaatcatccttccaacagtgttaccagcctgacaactacctgcagtgcatgggagtgtcccttaccctacattctcagcaatattaaaaaaaaaaaaaaaagaattaatgaaaggaggccgagctgggcaggagtcggccatccaggctgcggtgagttgtgtgtgatagaagggccgtgagctaccgggcctgccccttatacctacccagccaggcagccgtcactttccactgccaacaatgtcactagcgactcccctttattctggcaacctgagagttgaaaaagttgttttaaaaatgactgtgatctctataatcataatttacatattagtgattttctacacatagacaccattcacatttcttgtttttgccaatgatctgttcatagccttttcccattttttcttttgggtttgtcttgacttgcttgatttagagctgttcattatgttttagagtcattaagtatttgtcaaacattctagaattttctcctggcccgtcatttgcttttaactttaatatggtgtattttatattgaaaaaaattaatttaggggaaatctgatccactggtgttttcctttacagcttctgaggtgtttgaaatgcttaaaaaggacttcctatttccaggttataaaaatattttatatcctccattaattttatacttctaattttatgtttagatcttcggagtagttggaatttatttttatgtatcacataaagtaggaatttgcctttattttcttgcaaatgaacagtcatctatcccaatagtcttccctgcccctccccccacaatttgaaatgctgtggtcttcatctttaaacttctcacgcttggctgcatctggttctggactttcaggtttcctccactgatttaatcagagttcacacaaggctttattgggaaatggagcaagacttgaggatggggtcttaactgggctaaatgtgtgaggctgggacttggggtggggaggaagaagtccttgcaggcagagagggagcatgagggaaggtcctgtggcccctctaagaaatacagtaaggcaaacctgtcaggggaaaagtcatgtaaatgaggtcgtgaagcaggcggggctccaggtctcctgcaggatagatataaagctcttgcatatttgggggtcctcctgtaatccagccctgccttcctccatctgagcccttctcggttttctagtggtcagctccagcggctcacagtgttctctcttgtgctcatgtgctccctgtgacctcaaaagttctttctcttttactcgcattcctctccctacctgtgccagcggatctggcttagcagtggcctcctctaggaagcccttgctctctgtccccttcagtccctcccagatgccattatacttaaccacatgatgctgtggttgtgtctcggagtctgtttttctcttggaactggatgttttattgcagtcaggggtcgtgtctaactcatctttgtattcccatcatctagcttggagcctggtacacagtttgctcaatgatatttgttgactgaattagtgagcaagataaaaaaagatcactgcccttctacaaatgtcagctttgttgtgtggcataacccatgccctgcagtacagctcagaaacaacatctgggagattttcacatttaactcgtgtgcctggagtttcttggggaagactgtgacaggtccctggcaatttctggtctccaggagatgtgagatgcagcagcctttgtcctgcagcgtgtgtgagcattttagcctaaagcctcaggtgtgcatcactttccagaacaggagctgagagagaggggatggaggaagggtatttcagggtggggggtggggggtggcggggctacagtctgctcaagggacaggaagtgtgtaactgagcccaagtgcaggaagaacgtgagagtcttttctattcagaaggttatggcgagatggctgcctatgttgtttcttccaaaatcattgcatgtagaactgacctggcatctgctactgacattttgggttttatttgtgctgaagcaatgcagcttcatgaacattcagtgcataagcttgacatacccactcagttacagtttaaaatacatggggactgcactgtgtatccccacttcgcgtgtaaagccccgaagatctgtgatagtcaccgtgggtgtttgtataactttctggaagctgaagtcgggacccttctagaatgagatgcagggccaggtatttatagaccgatgcgaatggtaatgtgcagcagcaagaacgttttcgagatgttcctgtctggacaagtgccgtgtggatggagattcttcttgagcatgagcccaaagctgatgcgggaggagcctccaaacagaatttgcaccatctttagttttcagagctgtacgtggcagtagaatgtgcagaaatctttatttttcactaatggaagggcaggctgaggctgagaggaaatatttggagtcttggttcccagaacgaattaatatactggcctttacaaaaaagggggtgggggaatacagacgtacacaaccttggaggctacgggaccttagttctcttctatgatagtcttagaactgtgttggcttccaaagacttggactcgctttgtggtctggtaatagtatgttttaatccaggtcacatactcattttatcatatctcacccagaattctaagtgacattaacattaccttaacccataaaataaagatgatgattgtttccagaggaatctagtaatggactgaaaacgaaagagacgttttggtatccttgtcttccattggaaacaggaaattgctggcagagagagctgtgatgatctcatttaactagatggttacagctcatgctataggtaataacccacctgctttaggattataatatatgcactcacatttgtcatagtttatagttaatatagtcacttcacagatatatgactgggcttaaaactttcagaacaaataaaattaaatattggataaagtatatgaaaaccattagtctgtggacccaatgtgctgggctaagaatctgaatatactcctaagtaataatttatctgttagacatctcacagatttccccaaaatgaaccacacatatcacctaattagactgcatttgattccaagctatgccccttttaacaatgtcacaagaaatgtttgaagtgcctgtaagtagttgtctaaattgaactgcttggttgtagattagagaaatacatatcaatacacaattaaaatcatatctgaaaactcaaagttcacgttcagaaacatttttaaatattcaatagaggaaagcattgggatgttgtaactagtattttcacattttatttttctataacaattagaacataatgatcactaaagttgtaacttaggtttggggaaaaagctgttggtattaccatcagatgcctgtcttgttagtgttctcctcttctgtacccaggttcagactactttatccttatatttacagataactgttccaaaaagtggtacggatggggaggaggtaaacaaactgatcctaaccattcttcacacaaataacctcaccttctcaccctcctccactctattttctgctatattttccaacaaaaggaaggtaaatatgagaaactacaagcatagcctgtaagtctctagaacccaatgtcttctctatggaataagctttcaatcagttagacttttgttctgtttttgtccatgcctgctgtagtctacttttataagacatgcaaattataagaaaataaattgacaaggtaactttcctggcctcaggtcattgtatatttgaaaaaatctgcagctgaaatatcaaaatttatgttcatgggatgaaagtattagaagccttgcccatgtcccatctgaattagcgagaatttcacagaccgagtaggttggtttgttcatacacattcacaagaagctgaaaattcactagattttccaagccagtgttttctactcttggaggaaatacactggctgaattgttagaaaagggttactcagggacaccagaaactgctcttcacagatgttctttcagaaggcacagtcatgtgacagcatccaccgagaggctcccgccagattccccctggccagtgggcaggaggaactgtagaaccccgggaggtacctcattgacacgtcccgcttccttaagaaagttccttggagcagaggacactgcgggaaaacaggccctgtgttgccttattccgtagtccattggaaccctgtattaacaacaaaaaacaacaaaaaagagttgcttttgggaaataccaggctttctattagaattaaaactcactaccataaggagagcaaacaaataatatacagtgcaataatagatacttgaaactgcgttcagttgccccagctctcaggagaggtttctctagtcggctcggggaactagaatgtttttatggagaaatatttgcctgttccttagaactccccaaaagcctaactgggatcttcatttgctctatgggacagtccagggaggtagtagggtttcagaagggctcagacctaacaccctgaagccacgtctagtatcatgtttcacaggggtctttgacctgcaggtagatgggcaggctaaattcaaaccaaagtgtttcactgaattcaaaatatcattcctgaggcgatgctagatcctttccagagagggtggtgggggtaagaaaactcgcatttattatcagtatgtgttctccttcgtgtcaagcttattttcaacttgatgggtctgtaatttatttgcaaggctaaaacaaattgatattaattcatatccagcctctgaatactcacattgttagcttgtaactttaaatagtatagataattcactgtggagtctcaaaatgaatgatacaaattatgttttaattaactgagatcatacaaggattacttcaatcttaaatttgagaaactcaggtaaacaatttaattgcattaacctccccagtgaacatatattcaatggaggcatgctcactggcaggttagagaaccagttgcttttaaagttaaggaactcttcaataagagcacagtgttttccagattgtttctctcatttttcactaggatgtggagttagacaatatggtttggtagttaagagtgcagcctctggaactcaagttcatcttcagttctacggcttccaagccggtgcccttgggagtgttgtctaacctgactgtgcctcagtttcctcatcctgtaaaacggaggcagtgtcaggggccaccttgcagagttattgtgaggattaaatgagctgatgcatgtcactgcctgccgcatagtaagcatgtgaagtcgacgttcatagacttcatagatgttcttcatagatgttcatagatgttcttagaaacgtatcagtttgtagtcatgggagctctgtgtccttggttgaattctcttctctcccttccgacaggaaaatggcaaatgcacgacagcggcctcctgaacatcaccaaggtatccttctcagaccgaggtaaatacacgtgtgtggcttctaacatctacggcaccgtgaacaacacggtgaccttgcgcgtcatcttcacttctggagacatgggtgtctactacatggtcgtgtgcctggtggccttcaccatcgtcatggtcctcaatatcacccgcctgtgcatgatgagcagccatctaaagaagactgagaaggccatcaatgagttctttaggaccgaaggtgcagagaagctgcagaaggcatttgagatcgccaagcgcatccccatcatcacctccgccaaaactctagagcttgccaaagtcacccagttcaaaaccatggagttcgcccgctacatcgaagagcttgccaggagcgtgcctctgccgcctctcattatgaactgcaggactatcatggaggagattatggaggtggttgggctggaggagcaggggcagaattttgtgaggcatactccagagggccaggaggccgcagacagggatgaggtctacacaatccccaactctctgaagcggagcgactcccctgccgctgactcggacgcctcatcgctgcacgagcaacctcagcaaattgccatcaaggtgtcagttcacccgcagtccaaaaaagagcatgcagatgaccaagagggtggacagtttgaagtcaaagatgtagaggagacagaactgtcggcggaacattcccccgaaactgcagaaccttctaccgatgtcacgtccaccgagctaacatctgaagagccaacacctgttgaggtaccagataaggtactgccgccagcttacctggaagccacagagccagcagtgacacatgacaaaaacacctgcattatttacgaaagccatgtctaataccaaccccgaaaagctatgcatatcaagaaaatcaggggctgctccttgtaatacagatgtagtacgcacttgccgctaagccttaccaggagactctcatcccttaggtaggagtgatgccactttaaaaggagaaacacctgcctgcagtgaatgggactggaatttccccagtagagaagggtgcgagaaacatcagggtgcagaattgataccagacagaaggtgtctatgtgataatgagtttcagaggctgatctctgccaaataccttaattggtgatgccttcttggcaaagagtacaccactgtaagatattctgagttcaagaaccctgtccagtgccccctgcattgcttttccttttaaaaagtataggtctgctacaatagcaaatgcacgtacgtgggttttttgcagtttcttctcagttttaattttgcttttcctttataatggggtcattgttattaatactaattgttctttctggtttagtcctcattgccacttttgtccttatgtttccctagaacacgtacctcagagactttggtatcagtcaccagtaccagggctgatatctacaagtcacattacatttgtcatgttccaaagtagttacgaggcttgttatttttttttcattccccaggcctatttccatagatagctttttttgtttgtttccaacgaagctgctgttaaacgaaactgagaaaaactttgccccggaatagcactttaatagtcaaaaatgtgtttacctgtctgattgagtgagccttttggtgagctcagctgagatgtagagggagattgtaaaaggttaaatatacccacaccacccatgaaagtcactgtttaagttacatcatcctccaaataaagactgattctttacctggaaaatatattgcttccaaagacatcagattcagtggattcctgtaggttatagaatattggcttccaaacaggcttgcagggaccatatgctgttggatgacatataaccaggtccacttttatgaactgcatagctgacttggttgtccttaaagaggaaagcgaaaggttagggtaatagcaaagggaactgtgccatcagattttatgccaaaactgttgaataattatgcagtcctgcaagaaagtggttatatgtgaggtgcgtgatgttatggaaagaagacaaaattagtcatccaaaggcttaatacccactgtgccaataaccagctgcctggctttggacaagtctggacctcaggtcccttatctgtagaaggggcagatgacatgagctctgagcactgttgaaatggtatcactgtcacacagaaccaaaccaatattcacatccttgctccttttcacaatgactttaaagatttttgctttcatctcttggtccacctaacattttcatgcttcattacttaaataagaatgttggttttgagaaatagcattttaaacaaattgtggatcttctccttccaaaaaaaccattaggaccacatctgcaattaagatttaatattggtgagaatgagtggttttatttaattttcccttaaaagcaaaggagacagtaatcttaataaattcataggggccgtggccacatcaggtaatggggttatgatgtccaagattgcatggatcacattggtgatgagagcagacccagatgtttagtcctcactctgtcaccatctgaggaggtgaccttggacaactcccttcctctctctgggatttaatctttttcatctgtaaaatatgcaggtagtactcgagggtctacaggatcccttctagttgaaacatttatagttcacagaaagtttgcagtcttccaggataaccaacccccgttgcatgagacaagcaaaaaatgggtccatgaaattggatacttttgccatccaaactttacaacaaacattatctggctctgtaattgagagcagtgggcttggttttaaacctagccttgattagtttgtttatagataactgttgtggaaggtgatagaactagtcatggagtttgatgagacatctcttgaaaaggactgaactgttgacttctggttagaagtgctttgggcagtcacataaagaaatgagcagtgagaaatcaggagaaattatgactcctgttgggctttctggactagcattgtatgtttttgggttgcagaaaagttttaacaccacctcttagaatataaaaattttccagttgtcatggaggtccacagattcattaccatgggtttatatgcccaaagcaacaacagaggacttaagttcattttgtgatactgtatggatgttaccccatcctattcagttgtcattccacccaaacccatgtgtaggtttccacatggaaaggagaaggcatccattccacctagacattgaatagtgataataagctaaaagtgggcagattttcagtggagcaagagcagaaatatgcggccaaagaatgtttcctgattggttttgctgctttagactgcagtggggagagcttatgtagattttcaaaactttctccctctttaaggcatcataatgctctcggttttgataacaactgacataaagggaggttgacttaaaatgggaatttctccttccaaaaatgctacactcttcctatccatcctacagcttctttatgaaatgagaggccctcctgctagaatatgaaatgcagaagacctcatgactttcagctgatttttcaaagataaagtgaactgttcagcttcatagaaattcatgcgagtgtgactgaacgtgtgtgcatacacactcgtgcacattggactcatttgggcagttttaaaagcttcacactaaatccaaagcctcgtcctttgggtcgtatgtagtcgtttgtaaaatcaatttctggcttctgagtcatcctggtcatatctctagcaatgtttttcttgaaattctgaaaatgattcacatatgtgtgtacatttaattcacttagatgatctgtaaacttggatggtatttattctaaatggggaaaacaattttatatggaaaaatctatgtaatttataatggttttgttttatatattatattttcatatctctagggcacatctatcctcatctttttgtataccatacttagcaaaaagaaatactaatacttgactaaaatctctaggaaccaaacgtgatacatgtgatatatagcttctagaaatcgctctaaaaatctctgaatgtctcatccatcccaagcattattgtgctgtgtcattatgtccagaatgatttgtcttggatgcttatgagcatttgtttttcacaactaaggttgaaagacctgacatctcacacaatggggttctggaattcccctttcctcctttatctgtttttattgtttgtttcatttttaattgcaccagtctatgttgtcgaaactttgttttgaagggcaaatgtgagataacaagaaagcaatgtgatggaaagactggatgaatttacctatggctatgtaaattattttaatggactgataagatgtttcaagtctcatgcttggatctttatttattggtgatctaggatctgctcagctctttagcacatgaagaaaatcaggtacaaaggacatttgcatgtttggaacagcatgctctaagccccgtgcagccaacacaaattaacttgactgtagaaacaccaattccagctgctggaagaaatggtttagaaaggcaaaccagataccttttattctgccctaggaaatacagtgttgatcagtgctaaaactcttcagtggcagtcactgtggttcttttaactggggatttcctttcagtgtttcatttggtaccaaaacagaacatttaccttacatttcagatactctgttttctcagcattgttcagatactttcctttaccgctcttcacgtacccttttggcattgagtaattctataaatgtttctatccttggtttttaaaccaagttattcatactcttaaaatatctaccaaatctcattgtattttcacatattttgagcatcaagatactggtcattttaaaaaatccttcagtaaatagcacagtttattttcctaatgacatttttagggtttcttcattgatcaaccaggtttgggttacacaaatcaattgtgggggaaaaatcaaataaaacaattgcttattatattttccaaaggactgagcatttatcttttattcacgaagatatcatatgaggatgataatgatctttaacagattttttagagatagaatttataaagaggctgatactaagaatactacaatcaaaattgaagctagagaatgtaaaaatagaaagtaaatagttctaagaatattctggcataaattatttttatttagccaataaaatagcctccaaatgtatatctcagacaccatagagctgctaacaatgagaatcaaggaagatgcttgcacttagatttcgtttgttgtatttcagtagttctggatgtcctttgttaaaattggaaaatggaaaaatgtctcgacagaaatgtcaatctggtgattctgtgaactgtaaaatgttcacttttaaaaataaagttgtaaacaagttactcatataagttggtattacagtagcaaaaacagaaaaccatgtgatccatcctgtattttgattgatgctttaataaagggtttgcacagctgtgtggaa

SEQ ID NO: 353 - DNA, 110205 bp, Homo sapiens
cgggcttggcagtgcgcctgtgcggccggcgcatcccgatggagcgcggcggcggcggctccgggacgggatcccggcctgaggggactgcgcggggaacctctctcccagggaagatcgcagaaccgggcgcggtgcggacctctcagcccaactaccggcctcaaggtattatccccagagtgtggcgggcgcccgagggcttcgggttcctgtgggggggcgggcccggcggcccagggcaaaggtcctcgagcgtggggggaaggggcacggcgcagagctgagataaacgccctttccctggcccaggatcgtccggacgtgcatccaagggccgcacccctctctgtgcgagtggcggggttctttcttggggcgacctgggtgagtgggtacacatggggggtggcttagggtgggcggcaggtgtgtttgggatggaggtgcctgagggggtgctgcgggtccagtccccgtcctcgaggagcagccggcatgggggtcgttaggataaaccgagcggggttctggggttgccccggcctccgcgcgcgctctctctgcgttctgggaaacgcgcgcgagcgccgctgcagcccgcggcgaaggtggcccagcttcgcgcctcttggcgtttccagggggcaaaatcggcgtgtcacccattggcagaggcagattcgcccgggcggccaggcgtctgccccggaccgggtgctcctcccgcccggatgcgctccctgtcttgggaacgctgctcaggtggccgggccgcggccctcaatcgaggcagcggggcaaacaaggctctcagccctcgaggctgccgatgctgggagccatggagggctggtccctggctgcccagaagccagcgaggcagcggaggagactgtgaggacatttggcaggattttagataagcaggtctgatgctaacgttctgtaaagtggttgcaggtagtgcgggggtgtaagcagcatggaaaccgatttcatgctgtttttcctgacaacaacttttttatttttagttaataaggcaggctatttttaaaacattttttattgcagtctaatatgcatttaaaaaaccacacaaaactataattcgatgaattatcacatagtgaagatgggagtattttatatacgatgggccaagaaaaggaaagaaatcaagagaaatcttcttaaaacacgctttttcactggggttgagggggcgaggtagtattttctgactgggccttcagttgcatcattcttaggaggaggagatagcttaaatcatttccagtttgtatttttcattatgctattttaaaggcagaattcattaactgtcacaggataacgttataactacctttgaaatgtgtgcttttgtttttatcctttttgcttgaaacactcaagctgcatctgctagggaagaacctggaaactacccaccagaacgaccctccgtggcagaggcgaccttgtataataaaacactgaaaaggagaggttgtttcagtttgcatttttatttggttgagagcttaaataatagtttgtttcgatgttctgttgtactcatgagaggtggggaggggcggtatgattgggttttcagtgtatcttggattttatttgaaggaacttaaggggtttttttttttttttttttaatggaaacaaaattggggaaggggaggaggtacttttgcgggggagattcttaataagttctgtttggaaactattgtagaatcatttaatgcactcttctgatattaagattagcttaaggatatcttccttcatttgaaattggaaatatagaaaaatatgtgtgaaggtttaaaatgtgaaataagcacctatgtgcattaaggttggtatggtaaaattggaatgtttaatttaggtgccaggtgataccaccatttgttgtttgggggagttagcaaggccaggtacttaagtaaagtctccttagaaaaattatgattttgaggttttataattatctgtcctggatactgatcattcttggttacccaggcccttagcatttgggacccattcctaatgagacttaacctgcttttctagagagtcaaccattgttcctaagcttgggctgggtgctgtcaaggctgcaaaatacagaaagacctgagatgtttaggctgtccaacaattttgtgttgcacacttaggggatatgagttggcaagtggttttcctgggagctgtgtaaaagacggaaaggaaataccgctggtggtttcctctagcaacaggttcttccgatattgaaatcctgtgcatgttcccattaccccctagtgatgccttctttctttccttttaattacctctgaatagaaattaccagatctactgtccattttagtgcttgtctgatacacatagtataacaaatgagcaagtgcttgtttcaatctgcttaacaacctttaaccagcagatagaatcaccagatctcaaccatatttcctttctttctttttagatgaagtctcactctgttgtccatgctggagtgcagtggcacaatcttagctcactgcaacttctgcgccaccatgcccaggatcccagcactttgggaggccgaggcaggtggatcacttgaggtcaggagtttgagaccagtctggctaacatggtgaaaccctatctctactaaaaatacgaacattagccgggcctggtggcgcatgcttgtaatcgtagctacttgggaggctgaggcataggatcgcttgaacccaggaagcggaggttgcagtgagctgacctcgcgccactgtactccagcctgggtgacagagcgagactccgtctcgaaagaaaaacaaaatagggtggggcctggagatagagagtaggtggttattggagactgcgaagggtactggggggtgggaaggaggtaggaatggttaatgggtataaaaaaatagaatgaattaataaggcctggtatttgatagcacaacagggtaattatagtcaataataatttaattgttcatttaaaaataactactagtatgactggattgtttgtaacacaaaggataaatgcttgagggggatggctaacctgttttgcatgatatgattatttcatattgcatgcctgtaccaaaacatctcatgtaccccagaaatatatgcacctactacctactatgtagccacaaaaattaaaaattgtaaaataaaaaaaaaagtagagtgggcccgagtagcaaaggcattgggtccccaagaaatcggagttcttcatcctttttcaaagttgtgtttaaaaccattcttgaacgctttaatcctaaaactgttcagatcgctgggcgtggtggctcacgcctgtaatcccagcactttgggaggccgaggcgggcggatcacgaggtcaggagttcaagaccaggccggccaagatggtgaaaccctgtctctactaaaaatacaaaaattagccaggtatggtggcaggcacctgtaatcccagctactcgggaggctgaggcagggaattgcttgaacccgggaggcggaggttgcagtgagcagagattgagccactgcactccaccccgggcgacagagtgagactccgatcttaaaaaaaaaagtgttcagatcaagaagaacaagagaacaagttgagtttgtgcctctagagtctctttggtagtaggaaggaccacaaacttcctacaaagttgtatttggtttgtggctcctggctttttttactgatggcagcataggacttagacttagcaggaccttcaggacaaactgctgaaagtctttgtgatttctcttctcatatcctagccatggtgacatagctgctcaaagtctgtcatttctaacctgcttcctctccaacatgaaaggatgttttcctctcaggtgccccatcttctgcagtggctagtgttttaaaagaacactttgtcttcttgtaattacattgattgccttacaaaacagaaggattcacaaggttgatttgggcaggcgagagatggagatttctgggggctgttggtaaatatcctggtgggtcttgttgagaggatttgatgagatatattggctggtgatacaatgatactgcctggttttagggggctgttcatgtgctaagttggctcaggcggcagttccaagatttgaaaacttcccatggccctgccctccggtcccttttgaaaggaatttcaccagaagaaggaagagggggtagtagagggcagccgcccttagggagggagtgtccactgtccacctcacatctgagtcggccgcatttaaatatggagtttaccgtcttggcatctgaggctctgggtctgactaggccttgggatcccgcctcgtctgcctctgaggtcagtctgaatgcaagcccccatctgcttttctgttgggaagcatttgttttcctcttgcctaggaactttttctgtttttaaaagccttgtgactagcagagtttgggttgtcatttaagcgaaaggaaaacaggtatgagtgagccgcatgcatgcaaagcatttgaggcaacagcagtgatgccaaatgcctgagatccttggaatgacagggtctgtccccagggctcctagcttctgaccagtgctgggttcgttcaccacctaaaaagacttggcttttcctctcagtgccaaataggttggtgccttgtagcccccaggcaaccctttggaatgttccttgctcctttgtcatctcacccgcttcatccgtcccaccctctgtgtttctgtaataacagctttatggctggtcgtggtggttcacacctgtaatcctagcacttcaggaggctgaggcccacagatcgcttgcactcaggagttcaagaccagcctgggcaacatggcaaaaccctgtctccacaaaaaatacgaaaaattagctgggcgtgatggcacgtacctgtagtcccagctactttaggggctgaggcgggaagattgcttaagcccatgaggtcgaggctgcagtgaactgagattgtgccactgcactccagcctgggtgacaaagtgagagcctgactcaaaaataaaaataaacagctttatcatctgtataaaattcatatgccatatagtccacccatttaaaatgcacaattcgatggtttttagtatattcacagagttgtgcagccatcaccacaatcaattttagaacatgttcaccaccccacaaagaatccccatactcactgacattcttcattcccccggcctcacaactacccatctgtctatatagagaccacgagacttctgccgggacagtcttcagcctttggtgcagacacgcgttgcaattgcctagaagtctgtgggtgggtcttcatgcattagaggtttagaaaccaatattctgcatactctgtccttcaggtctaagacgcgcttttaccctgaagccttgccttttcacctcctgtacattcccactccacagggcctgcaaagcgctcagaacctgaatgtaatgtacacagcggtctgcagttatatactgcacatgttcattttagcttcccagacagtaatggccgctaattgttgagcacttatgtgccaaccctcatagttctgggggttgcctgggcttattggagaagttctgctgctccatttggggtcacctggagtccctcatgctggtacagtctgctggtctgctgggagctcagttgggctcgaaatgtccaagatggtctctcattgtccaggtacctaatcacagagagtctgtcctggactttctaacagcgtggctgctgtgctttgaataaggaagcagaagttgccagttctcttaaggcctgcacatagaagtcccagaatgtcatttttgctgtgttcagtggtcaaagcaagtcccaaggccagcctagattcaaggggagaggaaatagactccacctgttgatgtgagggcagcatgcacctactgggaaatgagaaattgttagtggcccttttggagaatatctactgtaataggcaagtacagtcgttccttggtatccatgggggatttgttccagcacctctcaagaacaccaaaaatcaaggatgcccaagtccctgatataaaatggtatagtatttgcgtgtaacctatgcacatcctcccttatactttttttttttttttttttttgagacagagtctcactttgtcacccaggctggagtacagtggcacgatctcagctcactgcagccttgacctcccaggttcaagcaatcctcccacctcaacccctccaaggagctgggactataggcatatacctctatgtctggctcatttttgtttttgttttggtttttttgagacagagtcttgctctgtcacccaggctggagtgcagtggtgcgatctctgctctctgcaacctcgcttcctgggttcaagtgattctcctgcctcatcctcccaagtagctgggactacaggcatgcactagcacgctcggctaattttttgtatttttagtagagatcgggtttcaccacgttggccaggctggtcttgaactcctgacctcaagtgatctgcccacctcagcctcccaaagtgctgggattacaggcgtgaaccaccgtgcccctccctcccttacactttaaatcatctctgggttactgataataaatgtaaatgctatgcaaatagttgctatactgtgtcgttgttttgggaataatgaccaaaaaaaaaaaaaaagtctgtgcaaccatccactttattttatctgaatatctgaatcttttctttttttttaagatggagtctcaccctcttgcccaggctggagtgcagtggtgcaatctcggctcactgcaaccactgcctcctgggttcaagtgattctcctgccttagcctcccaagtagctgagattacaggcctctgccaccacaaccggctaatttttgtatttttagtagagtcggggtttcaccatgttggccaggctggtctcgaactcctgacctcaggtgatccgcctcccaaagtgctgggattacaggcatgagccaccacgcccagccttaatctgaatatttttagtctgtggttggttgaatccttggatatgcaacccttgaatacagtgggctgattatatgttttaattaagaaaggttatgtattcagcgagaggtgagagattaaaaaaagaagaaaggttaagttatttgcccaagggcacacagtaagtggcaaaccaggcttcacacccaagtgtgtttgacttcggagctgagaaacttttttttttttttttttttttttgagacggagtcttgctctgttgcccaggctggagtgcagtggcatgatcttggctcactgcaacctccgcctcctgggttcaagcgattctcctgcctcagcctcccgagtagctgggactacaggcgtgcaccaccatgcccggctaatttttgtacttttagtaaagatggggttttaccatgttgtccgggctggtctcgaactcctgaccttatgatccacctgccttggcctcccaaagtgctgggattataggcgtgagccaccatgactgacccagagctgagaatttttaaccccccgtgccactgtgcctccacggatggataataaactcctttcgcgcatgagctgtgtctcccacatctgctatacccctctgaggatctagctcagtactatctagccacatcttacaaagatcttgtatgccttttacttagtacacagttgtttttctccccaaaggcgatggggatctcatttcttagaattacagcaaaaatgttattaaaatgcttagaggaagataagttccatttaatggaatttcctagtttaccaggaatgaaccccccatcctctctgtgcccacaattattgttaaggatctgaagatacccttaatcggcttcctgccttaggacactgtgttgggtatgattgaggttcttgctgttaactgtggtcattgctctagaaggaccctggaagattctctgatactctaggctagtgtgtctcaaactaactctggtaaaggagcagtttttagtttttttgtttttttttttttgtaaatttccaatctgctgttgaccagtatcttggtaaaacacagtaaagaaaaatatatgaaagacatggaaaatacaagtcccaatttttaaatatcaggttagattaatattagatttaaagagctcattaagtaacagaatactctgtccagttgctgtaaatgttctaaatgcatgccctcggtggggtgcagtggctcacacctgtaatcccagcactttgggaggctaaggcaggcagatgacttgaggtcaggagttcaagaccagcctgggcaatatggcgaaaccccgcctctactaaaaatacaaaaattagccagatgtggtggcgcatacctgtagtcccagttactcgggaagcggcggcacgagaatcgcttgaaccagggaggtggaggttgcagtgagctgaaatggcgccactgcactccagcctaggtgacagagtgagactctgtctcaaaaaaaaaaaaataaaataaaaaagaagcatgctctcaatttatgcctttattctttattgcagattgataatgaataataaagagattgtgctccctccccacagcccatcagggttaggctgctcagggtttcctgaagaaaaaaacaaacaaacaaaaaaaacgtaaaaaagagagactggcacctgtccacaggacacactttgaatagctctgccctgggccagtatttcccaaagggtatggtacataagagggttttagattgcatgtggacagacttatctttttaactttagattaatagttctgttgattcttcaatttattttaaaactacaactagtacatcatgctacagtttctgaatattttcagaatgagtaaaaagtgaaaaaactacaaaaactaagcgaaaataagtcaatttaaagaaaaagactatccactgggcctggcgtctaggaaaaaaattttaaaaataaaaagaccaaataatagaagtcagtgctggctaatacaaacagaatgctagccacatatgtaatcttaatttttctagtagacacattaagaaaaagaaacggtgaaattaatataatacaacttacttagtcaagtatgttccaaaatattatctttcagcatgtaattaattaattaattttggggggggcgggaaacagagtctctctctatcccccaggctggagtgcggtggcgtgatcttggctcactgcaacctctacctccccggttcaaacggttcttatgccttagcctcccaagtagctgggattataggcacatgccaccacgcctagctaatttttgtatttttagtagagacagggtttcaccatgttgtctaggctggtcttgaactcctgacctcaagtgatctgcctgccttggcctcccaaagtgctgggattacaggtttgagccaccgcgcccagccccttcatcctcttatgtaccaagttctctcccttaaccacactttccttccctaaagtaggtaaaatttggcaaaacaaccaaccaatcctggcttcccctgtgtgaaaccaggtccctcacaatcctctccaaggatgagcattccttctgtctctgctgaaagaaccagacagcacattagatttcatcattttccccaccgccctctgctgtgggctaccccgagcctaccgcccttgccgtcattactaaacctccaaagttcatcagctctgtgtgtagtcctttttttttttttctttgtagaggcagggtttcgcgctgttgcccaggttggagtgcagtgctgccatcacagctcactgcagccccaacctctcaggctcaagcgatcctcccacctcagctcccaagtagccaggaccacaggtgagtgccaccatgcctggatcatttttgaattttttttttaaatagagacaggtctcatgctgggattacaggcatgagccacctcacctagcctcagcatgtaattaatattaaacgttattaatgagatatctgacattcttttctttgcagcaagtctttgaaattccatgtctattttacacttctagtgtgtctccatttggactgtttgcgtttcacgtgctcaatagccaactgcggctagtggctactgtattgtacggcactgacctagagcatttccatcacgcagggagttttgtggtctacattgagtctcatggtgactaagtattcagtgtgatgactgtgctgtcaagtatggcgtgaagcacagtatgtgtgctgtggtagtgagtccagcttggatctcttcttcatgaatgtagaggaaatggaaacacactttgatggaatgggctcccccatatcaggcaaagcaggcccggattccccaggcttttgaagggatatcctgattttgctttccccagcctgggtgaagggagtgcaccaaggctgtgactagtgggtcctcacacagattattgtcttggggacctgatagactgtggaaaggggatggacttggctttgtgggaattattaagctgtcatcgaggaaaagtgctaaggtttgaatgtccattccaaaactcatgtcaaaattgccattgtgatggcattaagagatgggacctttaagaagtgagtaggccatggggctctgccctcatgagtggattattgttgatagtggattcggtttggcccccatttgctctctctgtatcatgggcttgcttgcccttttgccatgttttgatgcaagaagaaggccctcaccagatgccaagcagatgctgacaccaccagcatccagaattgtgagccaagtaaatttgtttgttataagttacccagtctgtggtattctgttatagccactgaaaacagactaagacagaaagcatggtattgaaaaaacatggaaccataactgtgggaggagagagctgtattagccagcttaggatctcctgggtttggtgttggggtcggggtcaggaatccctgctgctgggtagggtctgctgagtcgggattcaatgggctctgtgagattcgatctggtcatcttccccagctggtgtcatgtcttcctagtgccttgtccacagaagccacttgctgattctgaccaataggtactgattgactgttaggacagatgccctaactctgggaactacaccattaaacagggaagttccagtgtatctgggctggttctgcctccatctttctaggtttgatgtgaaagagctgccattagttacagatggccttagtggactgattacccagcacctgcttcagggcctgcaggatgaaccccttcccagaccagcttgtctccttcctgagcagttggtctgtcttcaccgttggtcactgattccttcagagttgactcttggtttagcaactcaaccagtgtggtactctggttgctgtggtagatgtatgggattaacgtccttttcagctccattttttatccctacccttgtttttctctttctctcctactttctgtatttatttctactgtattttatataagcaatcttaatcttttctggaaggagggagggagggcaggaaatgacctcgcagctggagtctcaccaggcacctgcagccctttattaagcagtgctctatgtccctgtttcagaacaacaccttaatatgtgctattaacttgaagtaaccgtctgaatcgtaaactgggcaaaaccgaattctgctgatgtgcttattcttaaaaacagccccccatgggattcctgtatgttctcttccttcaatacctagcgcgttttcagcactacatttaccagagggaaagtgtattgttcatggggatagcatcacctcttagcaggtgttgctcttttctaccctattaattgtatttgtttagttttcttgatcaccagtcaggggtgacagtgggtggtgaaatactgtgacagccttcagtggaagctttccttgtacctgggtaatttttcccctggtggagatacgtgttatgaataaaatttagcattgatcattttcattagctagataatcaatatttttaagcagttgtagttatgtctacagaccaaaagctcttttaaaaaaatcactaattctaggccaggcgtggtggctcatgcctgtaatcccagcactttgggaggccgagaggggtggatcacctgaggtcaggagttcgagaccagcctggccaacatggcgaaaccccctctctactaaaaatacaaaaattagccgggtgtggtggcgcacgcctgtaaccccatctactcgggaggctgaggcaggagaattgcttgaacctgggaggcagaggttgcagtgagctgagattgtgccactgtactccagcctgggctacatagcgagactctgtctcaaaaacatcataaactaaacattaaaaattatgcattttaattgccattttcttactgcaaaacatgttcctgctctccctttttcctctcctcacccacctaaatttccacttcacttgattttacttttgccagtcacaaatttttttctgaagaataattgcttcttattaatagtccattgagctccacatatccctaatcttctgggatgagattaaccctttttatagaagaacaattaagtgaggaaaatggactgtttcactataccctgttcaactttaatttctcttagttgtgttttagtttctctgtttcaaccaagaggcccaagggttctcagtgcctttctactggggagtgttgaatgtcctttgtggtacatagttttatctttactgcttaaaaatcaaaaggattatttacactttggcatgtaaagattatatcagagcaaatggctcttaattcaagcagagataagacatgcaaggtacaacactgtccagtagaactttctgtgatgttggaaatgttctaggtctgaactgttccatatgatggccactagccacatgtggctgttgagcattgaagacctgagtttttaattgtttctaaatttaaaaaaattgaatttatatcagcacatatagtagtagcttctgtattggactgtacaattaactagctgttgactaacctcgacagattaggatcaggaatgaggaaggagtttcagatctcaaacaaagttacttcaaacccacctactcttggtttctcctgtacaggctttgatatttggcacttgtcattcaaccactctcagatgctggtaggccaccaagaacagaaccagcagttagctccttgacactgtatcaggtctgtaggacagtgatcgaactggtagacaagacttgttcctggctccgtggtggccctggagtgcccacagtcagccaatcctctctgtcctgtctcagcttttcaacttggcacaactgaagagtaaaaactggagccagggtctttagtttcacaacttggttggagaaaccagattgacttacaagccattaccaaaccattagataaaaccagtagctagctatgcaggatttgggtgagctgtgggcagagcttttccagcaaaaggttggcagggacctcaaccacaccctaggccagagaaccccgtggcaggaagtgaggttggtgggggcattggatgcctttgctgagttaatcgtgttccctgttctctagcaagtactcagtaaaatggataagtctcagctctttcattctagcttgctccttacaaactgcggcctcagacattggcccctagaactcagttgcttgtctgtacaatgagattgtacacaaggtgatcttactggtgcgttccaactctgtgatgctgtgatcctccacagctggcctaggaagcagagggaagcatatggctgctatctacccttctcattagtgggatcaccagccacatagcttagaacgactcccccccaccccgcccattacagccaaacccgagggttctgccttctttatctctcatgaccgcatccccatggccagtgctttgggtcagactctgtcatctagagcctcaccagtatcagaagaaccttagggatctctgtccgtccgtccaggtcaccgtccctgtcatggatccttcatgtcattctcttgctttaatctcctctgacacttgcctagcacttcttaaagagtatattctaaactgctgttggagttttcaggcatgttggaatggggctccaatttacccctccacccccatctctctggcctgtaaccactcccgctcagaatgttcagcacactttgcacgtgactgcttgtgtacatgctgttctcttcacctggaattcttttcctctctgtgtctgccatcttcattcctgtctaccctgttcatctttcagtacttggctcacacctcacctcctctctgaagccttccccaaccacacacacttttgatggttttttcccttcttattcattttccattacagcattgattatgaaaatgcagataaaccatgtgcaaataaaactgggactggcacttggaaactaaagtacacaaatcttaagtgcacagtctgattatgtatacaaccatgtaacccacacccagatcaagatgttaaatactttcagtacccagaaggctccttcatgcctcctcctagtcaatacttctctcaaaggtaaccactgttctcacctcttttcactatagatttgctttgcttatttttaaattgtattaaaatagattcatttaggagatacttttttattgtgataaaatatatgtaacataaaatttactgttttagcaattttgaagtgtacagttcagtggcattaagtacattcatgttgttgtgcagccaccaccacaatccatctccagaactttttcatcaagtatatccttctttgtgtctctttttgttttcttttcacttgacattatgtctgcaagattcacctatgttgtcacaggtaccagtggttcatttctttttatttctgagtagtagtactttgtgtgactgtatcacaatttgttttatcaattctcttgctggatggacattgtttttttccagctttttattcttttgactaaaacttttatgagcgttatgcttgtgcagataccttgatgcccatacatttctgttgggtacatacctagaagtggaatgggatctgaaatgtcacttcatagattctatataaagagtgtttgtaacctcctgaatcaaaacacaagttccattctgcgagataaaatgatacatcacaaagcattttcacagttagcttgtttctagtttttatcgcttgatattcgattttttcttataggcctcaatgggctcagaaatgtcacctcgtagattctacaaaaagagtgtttccaacatggtaaatcaaaacacaggttccattctgtgataggataggcatgtcttcagcattagcggatattgccaaaccattttccaaagtggcttgtattcatttcttattgctgctataacagattatcacaaactttagtggcttaaagcaaaataaatgtattatctcaattccagacgtcagaagtcttaaaatcaaggtgtcagcagagcctttcaggatgtgctaagggagaatctgtttccttgtcctttccaacttctttttttgtttgtttgtttttttttttttttgagacggagttttactcttgttgcccaggctggagtgcagtggtgcgatctcggctcaccgcaacctccgcctcccgggatcaagcgattctcctgcctcagcctcctgagtggttggaattacaggcattcaccaccacacccagctaattttatatttttagtagagacagggtttctccatgttggtcaggctggtctcgaactcccgacctcaggtgatctgcctgtctcagcctcccaaagtgctgggattacagacttgagccaccacgcccggttgtcttttccagcttctagaggctgcctgcattccttggctcatggccccttcctccgtcttcaaggccagcatcatagcatcttccaatctctttctctcttgctccttcccctccctcccccccagctctacttccactgttacatctcttctctctaactcacctacctctgttgtgattaccttgggcctacttggaaaatcctggataatctccccatctcaagagccttaacttgatcacatctagaaaggtctttttgttatatgggatagcatattcacaggttctgggagctagaacatcgacagcttggggccaatattttgccagccacatggctgtaccattttgtattcccaccacagtgcatgagagttctagttcctctccatctttgtcagtacttggtatggtcagtcttttgaattgtagctatactggtggagatgtaggggcaagtccaaggctgccaccccaggcagtgcatcctcctttgctccagtgatagctttattgcaacttataagcattatattatgaatatgtatttacattcctctgtcttagccaaactaagcaccacttcatgagcaggctatatagtagttgatttaataaaaggtccttggatgcgaagaactgactgagggcagttttcagcagagcagggaagcagagctgaagatataaatgaaagcccatgcttccagtctcaactctgctcagcccccaggatctgagggaagtaggatttccctcaaataaaaataggagtagagcaaagaacctggcttccaccttctgcacactgttgtctttcccaagatagttaatctataagtgagtaatgccctagaaggaaatttgggccttgactcctatgggtgttggttggaaatgacttcactgtatatgtaaatgagaggaaaatacagttccagctggctactggggagtctgatcttggaccctttgcagggactcaggttttccttttccttggactctgctcatgtagcaacatactgcagcttcttacttacagaaggaaagactccaaggtaagtaatgctttcttgatctcagggaatgtctgtcatgtgtgtagacttaaacccaccttggaaacttgaggttggaatgtctgcagaaagtgaagccagagtagagatgaatttccaatgcccctggacacaggatggtgggcacagatgtcttcgtactagaaaagaatctcggaaggtgggattagtattagataaaaggcagacaggatgatggcttctttcgggagcatcctgatgcaaataagcactttctgggttctgtttcattccctagtttactttgctgggcacacacctggtttcatgagggctgtaaggtttctaggcttcattcttacctttctaggctgccgaggtgttagcagcattcctgcagcttggcattgctgtgacctgagagagagagagagagagagagagagagagagagagtataaacttgcagtgtggcagaggacttccttggccctcacaaggtcaaccaaaacctggctggttggtatttggatcaaaagggagtcggtctttgaagaaaagcattatctcaggataggaggtactgtgacaggcctgtgccagagttattggtccctgtttaaaaatgtactgacagtgtcacagctttagtaatttaataagtacatgtgtggttcacaggctgatctgaaacaagctggctgtgccagagtgggtcacacctggaccttgagtagtgtggatggcacacacaccatgagggttgggacagcctgaaccaaactgtggccgtgtgtttatggagtgctgctgacttcttagacatccacttatctctgcctgctgtgtttgagatgtggaaaatgtcaggtggcagcattcatgctgagaactgtccccctgggatttggactccctctttactcgctgccatccaggtctggaggtgatctcgagaaagaatatggggtgagctgtcctctgtaatcagatgggtgttcactttttccaggacaggcactggatctccgctcaacattctctggggctggaggggtacccttcacctcctgggtcaggaagctctttatgttgatagaaacatgtctcctcttgctacccgctcccccccccaccgtgtagagagcggacaaccccttggcatccttttcacagaacttctaagtctccataaatgtggggaccaagagcctttctgtggcctacaccacttccagttgtttaaaccctcctggtgtaactttttatttggagtttactcctgtgacattggtgtctctcttctctaactgtttgcacaaattgtccatagtgagccctttcatctcagttaagaatttcccacttaatctgatcacctactggcttggccactaactagctataggacctggccacaggttagtttcttggcctcttctttacctgtgaaatgggaacatatctgaaatacttcatggggttgacaggaggattgtgaagtgttgcatggaaagtgtttgtagtgcagtgtcttgcacagaggtagtactctgttaagtaggaggggagcttatcatccgtgtagccagtacgaggacctaggctggatgtctgtggacataaaaaagattttttgttatagtgtacacttatatcaatatagtcatattgatatatttatgtatggtctttgccttccagggaactagtaacctagtgagataggttgtctctaacttactgtaatccaagttgagcattgataagtaccataaatgaaaatagaaaaatggaccataaggctatagatgaacagttcattctggctgagagctggggtcagtttttgtgcatttatgagtcccaaaggcaagtgatttttttgggagggacagtcacttatactttggtggcccatggttagcaggacagcacttcccacctggaagtggcctctatctttggccacgttcttcagtttctgcatagaaatgacatttctttttctcccacctagtgcttaatttatgattgaaattcttgaagtatccagtgatgccctattcaggaggctgtccagccagtagcattcctttttattcgttgcctaatgcaacactgacagtagcgttcatttttctcttcctataagtatgtcaaagtctcttatcctaggtcctagttctcactgtcctaggtgagctttctcttcccactttgtgcagttagtatttttccacagacatagaagaagaaaagagcactcttgttttttggccccacccctctttggcacacactacttaggtgcttcaccccacacattggcccagagcttaagagaaggtcatctgactgtctggagctgtggaaactgcacatggcttttggcaagagaatcttgtggtgtgctataagtttttaagtttaagagtttacactctgcactggataatatggtaactaattccatgtgtggctacttaattaaaattaaataaaagtaacaattcagtttcttgattgcactaagccacatttcaagtgctccatagcccagttggatggcacagatatagaacacttctgtcattgcaaaaaattccatgggacagtgccggtctagggggttgccttatagttgtaggctactaataggaaagatagatgttcattcaggcttcagtggtttagattttcctcctgaatgacccaagttgaatgtctaagctttaaatctcatcaactaatgcaattaaaatattttaaccttcttaaatttgaatacaaaaagggtattcattttctgaagtcttttttgtgctgccgaattaccctgaagtagatagcaagtgtggattcttacaggtgaggaccttaatttgttttttattgtggtagaatatacataacataaaattcaccactttaaccattttaagtgtacaatttagtggcattaaatacattcacaatgttgtgtaaccattatcactatctgttttcagaactttctccatcatcccaaatacaacatatacccactaaataataacttccctttccacctccccccagtctactttctgtctccctgcatttgcctattctaggtacctcatataagtggaatcataaaaaatttatccaatgtactgactcatttcacttagcataatatcctcaaggttcattcgtgttgtatgtataagtagtatgtgtcagaatttcttttttttctttttttttttttttttttgagacaaggtcttgctctgtctcggagactggagtgcagtgatgtgatcatagttcactgcaacctcgaactcctgagctcaagtgatcctcccacctcagcctccccagtagctaggactattggcgtgcaccactgtgcctggctaattaaaaaaaaaaaaaaaaaaaggacagggtctccctatgttgcccaggctgatcttaactcctgaccttaagcaatcctcttgtcttagcctcccaaattgttgggattacaggtatgagccactgcacccagccagaatttcttttcttttcttttctttttttcttttttcctttttttttttttttttttttttttgaggaagagtcttgctctgttgcccaggctggagtgcagtggcacaatcttggcttacagcaacctccgtctcccggtatcaagtgattctcctgcctcggcctcccaagtagctgggattacaggtgcccaccaccatgcctggctaatttttttgtatttttagtagagatggggctttgccatgttggtcaggctggtcttggactcctgacctcaggtgatccacctgcctcagcctcccaaagtgctgagattacaggcgtgagcctctgcacccagacttcttttctttttaaggccaaataatatttctttgcatagatataccacattttgtttatccattcttttgttagtagacattggggttgcttcccccttttggctattgtgaataatgctgctgtgaacataggtgtgcatacatctatttgagtccctgcttcaattcttttggatatatacccaaaagtggaattactggatcatatagaaatgctatgtttgaccctgttttgtgccaggggagaagtggggagacagggtgggtcttgctctgttccccaggctgaagtgaactggtgcagtcgtagctcactgtagcctcacattcctgggcttaagttatcctcccacctcagcctccaaagtagctggaaaaacagtcacttgtcaccatactcagctaatttttaaattttttgtagagatgtggtctcactatgttgccaaggttggtctcgaattcctggcctcaaatgatcttcctgcctccacctcccaaagtgccgtgattacagacatgagccactgtgtgtggccttggccctgattgaaaaacaaacaaacaaacaaacaaacaaacaaaaccttaaaatcattgttgagatataactcacaataacataaatttcattcttgtaaagtgtacatacagcccagtcgttttaaatatattcacgaggtcatgcgatcatctccactagtcactgattttttttttttttagacagagtctcactctgttgcccaggctggaatgcagtggtatgatcttggctcactgcactgcctgggaaaacaggcgtgagctactgtgcccggcctagtcactgatttttatagcctcttaggactaaagggagagggagaatctagaaagtggcttgggtgcaaggaagggagctttcaggattatgtataatactcttaaaacaggatatttgttaatcctagcactttgcgaggccgaggcaagcagatcagttgaggtcaggagtttgagaccagcctggccaacatggtgaaatcccatctctactaaagatagaaaaattagctgggtgtggtggcacatgcctgtaatctcagctacttgggaggttgaggcaggagaattgcttgaacccaggaggcagaggttgcagtgagccaagatcgtgccactgcactccatcctgggcgacagagcaagactgtcaaaaaatatatatatatatacatatatatgtatatatatatatatatatatatatacatatatatatatatatatatatatacatatatatatatatatatatatatatatgtatgtattttttttattaccaattccttgaaacgtctcataatctttagcaacaatcctctgcccactgcgaggctttctgacctgaagtttagaaaggctcccctgctacctgacatattttcagctactcgtgaggccttgttttatggaacgggatgttgaagaacctcacaaatgggtcagactccccagcaatgctctggaagcctgcttctataggagcagacaggtgttcatgtgctataagctttgtcacatgcccttccctagcagggaactacttctgttccttctctggttctggtcctaaattctgaagctacttgcatttccaaacataaagcaagttgtttataataaatgccttaaatatttgattttcagattcatattgctctgctttggaacaaggaatacaactcctctgcttttgttattacaagccatttatacatataccagggtgctctggttttcacttgttctcatcctttagttgtggttttaatattttgtgctttggacatggttttattgtggttttcagatacatggccagttttcttttctttctttttttaatacgtcatacaattcacccctttaaagcgttcagttcagtggatttagcatattaagtcatgcaaccatcaccacaatcaattccagaatattttcatcaccacaaaaagaaatcccttacttgttttaccccaaccccctgccctaggccacccaactactaatctcagtctctatagatttttgaccagcgttcttgcattcttgtttaatggttattttttatttttatttttatttttttttgagatggagtctcactctgtcacccaggctggagtgcagtggcgcgatcatggctcgctacaacctctgcctcccgggttcaagcgattctcctgcctcagcctcctgagtagctccgactacaggtgcgtgccaccacgccaaactaatttttgtatttttagtagagacggggtttcaccatgttgaccaggcttgtcttggactcctgacctcaggtagtccttctgcctcagcctcccaaagtgctgggattacaggcgtgagccaccgcgcccaggctaatggtgactttcttcctctctaaattataatataagccaccacccttttttccgtctctgttccatttttgtcttttccccttccctccctcccctcttctgatattagcaggttagctctaaattctccttaattagctcccaaaccggatgaattggtggatgtggcacaactgcaggaattcatccaacaaaccagggatggacaaatagtgtgtttgagccctcgaacacccttccaagtcatctgccttcattctgtcactatgaggccagccttcttttcactggctgggaggctgtgggaactgcgagctaggccagcaagagagaactgggtggaagctggtctcagattgatcagtcacacagcctggggagcaatgaactgagatttcagtgtgtggcccatgtgagtgagtactgggacagaaatcaaatgcttgccttacaaatgtagtgtccagatgtataaattcagccactggatcctcctatcaacagaaacatttaatagtcaaattacagtttcaaaatcagtttacaaattacagtctgaaaatatcagtatttaacttgagaagcactgttactcgtacctggtacagagtcagaactcagtgaaacttcccctttgccctctgaagttttgctgaaaagtgaactcacaaaagacagattaattagagaaaaggcatacacattttattcacgtttatacagggagaaccatgagtgactacctacctccaacagggttcagaggctttatataccatcctggcaaaataagttataagacgggggaagaagaggaattctgttgagaggatcactagggagaataagtggacaagataacttgtatactatcttgtgaacgggtctttcaggtgtggttacattcctggtcttacaaggaggggaagaaaaaaataaatgttccttttggtgggtctggactttaggcacataaaggaacttcaacttcgtcctgctttgggagagacattggtagggggaggagggggaaggtcagagagaccttgaggcttcttcagttcagtacgtcaaagtgccatattttgggatatctgcttctgagccccaacactgttattaagaggccatattttattgtaagcctactgtatacaaggcacaggttaggttttgtgaaaaataagccaaagcttcttgaatggaattcaagccctatttatgttataatgtgcaggagtttagcaggttaacactggggaagcagagacttggtagcatccacattttgcttgtttctttagaaccatatattttattaaataaatttttataaaacaatgtgttaactgtagataccctcaacacaggaaaggtttggttaagcttagattcttgctgggaattgtagatattataatttcttgtggataatttaaaaaatttatcatttactattggccactggtagctttattcaaggcaaaccatcttgctcaaaacaaataaccttgaccaaaaaggtagccaggatcctatttagtctatctacagattgtttttggttaaaaagacatcagtgtttgttccatgccatatatgtatctcctgtttcattacatctccgtattgctgggaatgaaacgagtaccagcaggcccttgctgtggaattttctgagcgaggtcagagagaagcacagtgtacttttagaacaagatctgtcctgcctttttttgtattctggagtacacttggggagaaatagagtaagctgctgtttggggaagaagtttgggcttttgatttattttgaaggagtttaagaaatgctaccaccatgcctggctaatttttgtatttttagttgagaagagatttcaccatgttggccaggctggtcttgaacttatgacctcaggtgatccacccatctcggcctcccaaagtgctgggattacaggcgtgagccaccacacccagccaatactagttttttttattgctaaagagtgttctgggccgggcacggtggctcactcctacaatcccagcactttgggaggcagagacaggtggatcacctgaagtcaggagtttgagaccagcctggccaacatggtgaaaccccatctctagtaaaaatacaaaaattagctgggcatggtggtggccgcctgtaatcccagctactctggaggctgaggcaggagaatcgcttgaacctgggaggtggaggttgtagtgagctgagatcgcgccactgcactccagcctgggcaacaagagcaagactccatttccaaaaaaaaaaaaaaaagagtgttccactcacagtgaatataccacagtgtttttgctccattgctgttttatccattctttctttcttttttttttgtctaagatgaggtctcactctgtcacccagactggagtgccgtggctctacctgggctcattgtaatcttcgcctcccaggctcaagcagtcccacctcagccttctgagtagctgggaccatagtcacgtgccaccatgcctggctaagttttatccattctcttgctgatggatagttggactatttccggctttgagcaataatggataaagatgctgtgaacatgcatgtgcaaaccaccttgtggtcctgtgtttgctttatttctcttgggtaaatccctcagggcgggattgctgggtcatatgtatgttttaactgtggaaagaactgccaaatcttttcccaagtggttgtattcttttacaccctcacctgaagtgtatgaaagttctaactgctttgcacctttgccagtacttgctatagtcaatttttttgtgggatttaaattttttttgccattccagtatgtgtataatggtatgggtttctcattggttttaccttgcatttccctgatgattaaagatgttcaatattttttcatgtgttgattaccatgtgaagtgtttgttcacatttttttttttttttttttttttgagacagagtctcactctgtcgcccaggctggagtgcagacagggtttcgctatgttggccaggctggtctcgaactcctgacctcgtgatttgcttgccttggcctcccaaaagttctggaattacatgcgtgagccaccatgcccggccggattcggcaactaatttgtacatcttaaagctcctacaagtttatgacacattattatatggcagaaatagactaaaaataactttctgtgcaaaaatagttctggaagtcgtgtcacagggctcttggcccagcagggagccacttttaactagagctaaaagccagcattgtaaatagcatagaattgactgtaaagaggcaaaagggaatgttttgggatgatggaagtgttctaaaacttgattatgggggtagctgcaaggctatataaattcacagtggtcacttaaaatgggtgaactttacagtatgtaagttacacctcaagaaaactatagtaggaagaaagggagaagggggaacgagggaggagaggaaaggaaaaggaatagaaaagcaagcacaaatataggagggcattgttttgtaaaaacccatttcagctacagaaatatgtacattgtaaatatgtatttctaattgtggagttattaatgatctaaaacgttggaaagctcctgctccaagggaatgacatctagggcagtgctttgcaaacttgatgggaatcccctggggatcttcttataatgcatttcatattcaataggtctggggcagggactcagagtccacattttgaacaagtttcagctcatgctgacattgctggtctgtggacctcacttctgagtagcaaggactagggcataaattgaggctgagctattgagaatacacaaacttaatactgtcattgttggaagggtctttagaaaaatctagtacaatatttcccaaatggacatcatcatgagaaccttctaggggtacttattaaaaacacagattcctataatcaagacagtgtgatactggcataaggatagacaaacatatcaatagaagagactgcagagtccatatatgagtaattgaatatttgacaaaggtatcaagataatttaatggaaaaagaacagtcttttcagcaaatggtgctggaacaactgaatatccatatgcaaaaaatgacccgtgattgataccttgcatcatatataaaaattaactccaaaatagagctaaacctaaagccataaaacttctagaagaaaatacaggagaggccgagcacggtggctcacacctgtaaccctagcactgggagaccaaggcgggcaaatcacttgaggtcaggagttcgagaccagcctggccaacatggtgaaaccctgtctctactgaaaatacaaaaattagccagaaattgcttgaacccgagaggtggaggttgcagtgagccgagatcgtgccactgcactccagcctgggcaacagagcgagactctgcctcaaaaaaaaagaaagaaaagagaacacaggagaaaaccttcatcaccttgggataggcaaggacttcttagaacacaagaagctcaaattataaaagaaaaaaattgataaatcaaaccatcaaaaattaaatcttcttttcttcaaaagacaccattaaaattaaaaggcaaataagatgaggagaaaatattcacaataaaaatgtcagacaaagaactgtgtccaggctgggtgtggtaactcacacctgtaatcccaacactttgggaggctgaggtgggaggattgcttgagcccgggagtttgagaccagccagggcaagatggtaggaccctgtctctgcaaaaaaaaaaaaaaaaaaaaaaaaaaaaaaaaaaaaactgaaaattagctgggtgtggtggggtacacctgtagtcccagttaccagggaggctgagccagtaggatcccttgagcccaggaatttcaggtgacagtgagctatgatgatgtcatggcacactccagcctgggacacagagcgagactccgtctcaaaaaaaaaaaaaaagaaaactattgaccaaccttcttgtgaataaaatataagcaaataaaaacatcttgcagctcagcaagtaaccccaaaaatgtgcagatgtgaacagaggctgggcacagctcacacctgtaatcccagcactttgggaggccaatgcaggcagatcacttgaggtcagaagttcgaggccagcctggccaacatggtaaaaccctgtctctacaaaaaaatacaaaaaaaaaaaaaaattagccggacgtgatggtatgcacctgtaatcccaactattcaggaggctgaggcaggagaattgcgtgaacctgggaggcagaggttgcagtgacccgagatagcgccattgcactccagtccagtgacagtgtgagactccgtctcaaaaaaaaaaaaaaaaaaaaaaaaaaaaagaaaagaaattagttgctggatccataagttaaaagaattttgaccttcttaaactccccagttgacttgtgacatgtttttaagcctggacctgctatttgcttgtgtgttagaccatgatggttagcagagaggtaaaatgattttaaatattttactaagtaatagtcacatgtgtctgaaatactgtaatttctgaaaataaggctagatttgtgaagttttattgccaagacaggctctgaaaatctttccttaaatgaattagaagcccagagttgaatatgttgttttagtctgtttgtgttgctataaaataatgcccgaggctgggtaatttataaagagaagaggtttatttggctcatgattctgcagactgcaagaagcatctgcttctagtgagggcctcaggctacttccactcatggtggaaggggaaggggagttagcatgtgcacagaccacatgcagagatagaggaagagagagggaggaaaggcatgtgctgggctcttttttacatccagctctggagggactctcatgggaactaacagagcaagaactctcattaccacgagcatagcaccaaaccctcatgacccaaactcctcccacctggctttaccaccaatcttggggatgaaatgtcaacgtcagttatccagactatagcatatgtgttacaggtttctgttgtgaagtgaaatatattttcctttgtaaatcatgcctttaagacaaggccttgcctttcacctctaggcaactgtcactccccccaccaatgtgttattctggagtcagactgcctgagtttgcaatgcacctctgccacttaaccagttctgtgacctcaggaaagtgtcttaatgtctcagtttccccacctggaaaatgggtacaataatagtacttactgcatagatttgttaggataatcaaataagtgtagacatgtaaagtatttagggaggctgaggcaggagaattgcttgaacccaggaggcggaggttgcagtgagctgagatagcgccactgcactccagcctgggcaacagagcgagactgtctcagaaaaaaacaaaacaaaacaaaacaaaaaaacagcatttaggactgtgcccgacatgatcaatgttgattattatcatcatcattattattgctatcctcattatcattatttctctaaactggctgttgtcgaaatctcttattaagctattttccatgcctcccaaattctttaacaactaaacttatggcttttcccccaagtctcctgaggctgcttcctatttctgcacatttccgcatacgatgccaaccactgttctcctggcttcctgggccgaaaacttcagatctcctttgactctctcctccccacctccattcagttgcctatatgtgtagtgtctaccttttcatactagaattatcctttcctttccattcagattctaatcacctctcatctggattattcatttatcgtgtagctgaaatgggaccgtgtagctgaaatgggaccgtgtagctgaaatgggaggacagggttcccgtgggcccagccctggacccacctgtgtgggataggggacaggagcagctgggaagacaggattgggtgcgggacatggacatcagcagtgtgagggacaggataaggaaaggacagtgagaaggcggctctgagaaggaccggccacaccttagggcctgcctgtatttgaaatgcctttattagcttttgcatattcctcacagacatctctttgcatacaatgaaggtctttgggtgaattggatgaaatggcttgttaccagcttgaatgatcacttagaaaaaaactgcgcaggcctgcacggtggctcacacctgtaatcccagcactttgggaggctgaggcaggtggatcacttgaggtcaggagttcgagaccagcctggccaacatggtgaaaccccatgtctactaaaaatagaaaaattagctgggcatgttggcggatgcctgtaatcccagctacttgggaggctgaggcaggagaatcacttgaacctgggaggtggaggttgcagtgagccaagattgcaccactgcactccatcctgggcagcagagtgaggctttgtcacaaaaaaagaaaaaagaaaaaaacttgagaaaacattttaccctgttccttctctttatctttgtttcttacatttagtgaccatattggctatgtattgtgtgcatacaaccatcacgccctgtccttagcagagaactccaattttgaaacctcagaaggtggatactgtgctcgatgaaagtactcagtgccatattgatgagcggaatgttgggttaccttgggaacacagacgtccttccttgttactataaaaagggccacagtggctgtggttgtaaggcaacctacattttactgattctttatggtaaaaacgtgcctgtagggaaatgctgtatttttttaagaactttgatcagatacatcagacttccttttagtgctgatcaaatcaggtaaacccagttttcagtacttacgggtttttacaagtatcaaagctgtttccatccatccttcttctcctctttcctgtgcccacagtaagtaggcaggatatttgttgtaagactcaatatgaattgttttcaccaacagggattatgactaagagtataatttatactaatgtccttaggaggggacttatttgcctggtagggcctgtataggtcatatgaaggcagatggcgtgtgtttgacctcctcagggtggcctgttgagcagggttgcctggccaagtaagccttcccactccagattgtgaggcagctcaatgtgtttgcctcgcttgcaggttcctaccatggtttcactgtactgccatctgggaaaggaaggttggtgcagtttattccataataattaaaagccttaccactactaataaggcgtttagatacagccctactggccgggtgtggtagcttacacctgtaatcccagcactttgagaggctgaggcaggtagatagatcacttgaggtcaggagttcgagaccagcctggccaacatgtcaaaaccccatctctattaaaaattcaaaaattagctgggcgtggtggtgcgcacctgtaatcccagctactcgataggctgaggcaggagaattgcttgaaccagggaggcggaggttgcagtgagccgagattgtgccagtgcactccagcctgggcagtagagtgagactctgtctcaaaaagaaagaaagagagagagagagggagggagggagggaacaggaaggaagggagggagggtacagtcctacctaggggaacaaattatgcccattgatgctgtcaaacacctatcagaagtttactaattctctgcgattgaagaattattttattattgctaccatttttaacaaagccacccaaatgggaatcgtgtttattttctttatcgttttctgaggttttatattactaccgtatattgatgtggcatgaaccaaggtgtatacactgtgaagaaggtttttttattcgtcacatgcagtgtagcttactacagcaggcttccttacccttggcactactcacttttggggctggatgattctttttttttttttttttgtgagtcttgctctgttgaccaggcgggggtgcagcgatgcggtctcagctcactggaacctccgcctcccgggttcaagtgattctcctgcctcacactcccgagtagctgggattacaggcgcgtgtcaccacacctggctaatttttgtatttttggtagagacagagtttcaccatgttggccaggctggtctcgtacccctgacctcaagtgatccactcgtctcagcctcccaaagtgttgggattacaggcctgagccaagggctggatgattcttgtttgaggctgagggttgtcctgtgcactgtagaatgtttagcagcatccctgacctgtacccactagatgccagtagcacctccccaggagatattttggagtctcaaaatatctccagactttgccaagcactggggtacacagtctcccctggttgagaaccacagtattagaatgtaaggattgtgtagcttgctatttttaaaggcagtggtcatctgaagcactagttttcggtcagctataatagaaatgtatgtattgacctttaagtatgacagtttggctaacttaaaataatgtggtaaatccaaaacccgattgctgtgatgtgctagcatgcttaaatagcaacagcatattgctgttctttgatgatcgtttttacagatgaatggcaacacacaggatttgaaaatgcatatatcatttatttttatgttcctgaaatgaaaaggaaagaaatagtgacagccacaacagcccaggtaccatccatactcaggcatacctgtagtgcacatgggaaaagcacttttcctatgtgttattttggaatggcagtggccttttctgtggaatggccaaaagagaagcttgtacatgtccataaaccttgggaattctcccctgaaggcctcgttgttttacttttcacaaatctttcccagaaccaaatattcagttccacggtttaccttttcttttgtatcataatctgtagttttactattttcaaaatcaacttttaactactggcagcaataaattgaactttaagattcatggttcttttgttttccaaagagggttttagcagggatgcggttagaggctggaggtgggttagatagaggtaaatttaattgacaagctagagataactgcgaggctgtttaaaaggccaaccagactgccctgaacaatgttgaatgcggttacacattgtactctgcttttgtggtttaaaaataatctatctgtggccgggcgcagtggctcacgcctgtaatcccagcactttgggaggccaaggtgggcagatcacaaggtcaggagttcgagaccagtctggtcaatataatgaaaccccgtctctactaaaaatacaaaacattagccgggtgtggtggtgtgcacctgtaatcccagctacttgggaggctgaggcaggagaatggcatgaacccaggaggcggaggttgcagtgagccgagatcgcgccattgcactgcagccccgacaacagtgcgagactccgtctcaaaaaaaatacaaaaataataatctatttgtgccatgaagctgtttcctcaaggcctcaaagtgcccttgaagattgtccttgtttaagaattatgttgtggctggactgaggatgccagacgcacagatctgtaggcctaggatgggggtaactctgctgggcatgtttttcagagacaaatggaaatggaacaggggttctaactttcaaaatcatttttaacctgtctcccaattgttgtaataccaagagttttactctctaattaaaaaaatattttttgtagagacagggtcttggtatgttgcccaggctggtcttgaactcctggcctcaaacgatgctcccactttcttcctaagcactgggaatacaggcatgagccactgctcccagcccaaaagagtgattttttttcctagcccctttatttatcctttgcattttgttttaaaactaaggaatcttcttgaaacggaagccagctggtggtaggagcaggcctaagcactaccctgatgacttgcattgctcttcagtagccttgtcagtggcctctggactcagtggtgtaactgggaccatctcttctgtgggctggaattgccatgagctaagttggaatagcagggctaggagagcaagcagttcacattgggtagtttgtgctcagcagtgattaaagctcagatctgggccgggcgcggtgggttatgcctgtaatcccagtactttgggagtctgaggcgggctgatcacctaaggtcagaagtttgagaccagcctggccaacatggtgaaacttcgcctctactaaaaatacaaaaagctgagcgtggtggtgcacacctgtaatcccagctactcaggaggctgaagcacaagaatcccttgatcccaggaggcagaggttacagtgagctaggatcgtgccactgcattccagcctaggcgaccgagtgagactctgtctcaaaaaaaaaaaaaaaatcagatctgatgcccagtgagatggccaaggaagagttgtcagcctaggaagaaggggctgtcctcagggaaggggtctgaagggtcctgttaaccctgtaacagtgaggttggagggaccccaaacaaccacatacatgtaattgtgcagaaacagaaacaaggaatgaggacaatataatcagcttgagacaaagagcttgcagttggcttgctcatactcaagagtgcagcttgtcctatggtagggacctggggccttatgggcatctgggccaggagtgccatggagattggctggaaaggtctctggtgagcctttgggatccttttttctttctttttctttttagctatctccctataggaaggatgagactcttttacatcttttactttcatgttattaaacacacatacacatcaccatgaatagaaatcaaatgacattgctaatactggaaactccacaggtaatttctctttaccagtcattacctgctgggttctgtccacagtttaaaagagatatttgtacatttcttgtgctttgttgctgagaaaaagcaacaagcttctaagcaagagtcatttatccccgtgtcttggccctctttccagaagctcaaagcctttctgagtcttgtcttggattggtgagttgggagcttgtattttcacatgacacaaccctcattgagcaaccgcttctcctgatatgtaacctgaaagccagcctctgccccaccattacaggaaaatactggctgggttaggctgaggaataatgatgcctgacatttattgagcagtgcttgtgtagcgcatagtgtactgagcagttccctcttttccctcctcctgtttgcatcctttccctctcaattaatgctcctagtgatccagtgagtgggcgcgatctccatggggttagaacccaggctacctggctctggagcccctgctcccagggcactgtactcagctgccctctctgtacttgctgggggatgtgggggtgctcttcaagggtcattttgtctgcatgattggagccctttatcaggtgagactccagaagctcacgcaaaagccctgcatgtcagagcctctccatctctaaaggacctgaggccaagttcagatgcccagacctacatgccctgtccatggtagaaaactctacccttgctgccctgtccatgtttactgccttatctcattctagccccatttgcttgttggttttttgggatcaccttgtatagggtgggtagaatccacattcttgttgttgaagaacaggcatgcacaaaaaactgtgatgaacagaattacacagaaaggagagcatgaaggtggaggagagatgatcttgcaaccaccgcacagggaagaaggctgggaggacagacctcagcatagagtcacccgtattaccttagggagccctgagcttagctgtataggtttcttttaactagcaaatcatgctgtgaatagaatatgctgtgcatattggcttattttgaaattacatataattgtagaaacacaggaagctaggtaattcctgcctcccagatgaggatccagggtgggagctaagctttcatatcatggtgcccggtagataatcagttgagtttaatttttctagactatgtcttccttcgctacctttgagtttgctcatcttagcttctaagcaaactatcagcttggcagagaaagccttagaatgaaaactgtgacctcttaggaagttgtggggggtttcctggagtagttttatggggttcttgggaagactgaaatgattccaggatttggggcccagtggtcatctgccccaacttgttttgtctgtgttctcttctatcatcaggggaaaggagccaactgtgaatactcctgcatgccaagcattttcaaaaggtcttgcctctaccccataaccttgggatgtaggtagtaatgttcctattttatagaagaggaatttaaacctctgagatgttaaggaatttacccagtctcttgactaggatacagttgggcaggccacatggatggagccaagaagaagctctcagggccgagggggctgagctttatctatgaatggggagaaaatccaattgaggcagttttactgtagctgtagaaagaaccaggcctttggggcatttgtagctgggatctgatgtagactggagacagttaaaagcatgagaaagtcaggttaacagttaccctggaagataacagctgtcaaggaagagttcaggaccaacgaaccagcttcttagatttccttatcttctggtaaccagcaaggttaggcctttttgccatgctctttctcttcagccactgcctgggcctttgcaggtgacttcagttcccatgctggccctggcagaaggcatacctcctatttcccatgctgcccttggagtccaaatacaccccacttcttcacagggccacagtgaagatgtggttacctgggagttgccgggttattcttcatagctttgggcactaacaacatatggcaggtggtcagcactgaattttgccttttctgtttgttgctgtagttgttacagctttgaaaataggtataaattacatacactacaatgcacaaattttaagtctactgtttgatgagttttggcaaatatgtacactctcggggcctagcctacccaatgggtcccccactggaggcttggggcaagctgaagacattgctgatgtgaaaacaaggattaaagatcagggagggtcaggggctggttctagactgtggtagtagacatggtggtggtcaggtaatgagattaaggaatactcatgctttctggatactcaggacatatctcatttcagggccatatctaaaccagtaataatgatgataatactgttagctaatatttattaggcatttaatatgttctaagagctttgcatatattgttccttaagctccacattactctgtaacacaggtgctgtttaacagctgagaaaagtgaggctgagaagcttccccagaagtcacacttagtgtgtgctgagcagggatttaactgagctgggcagagcccactcctctttcttagcatcatccttcgtgcttcccagtaggaatagctaccattttctagatatctaggtctctctgtcagtgctccttccctttaggccctctcattattgagagtcaaccagactggcctcaaattcatgctttgctacttaatagctgtgtgactttggacagatttcttaacctctctgagtctcaatttcctcatctataaaatgggggtgcctcccacctcctaggagtattgtgagcattaaataatatttgtagagaataatgcctggccagaagtaggtgcttaggaactcatatttttagaaaaagacaatctagcccacaaatacgtgtacagtcctcaaaactaggcactgttgaattttataacttggcatgttgtcttttggttctggggagcttatttaccagattgagttactggcgcaggagttcctggggtggctgagtacatgtgtatgaatatagaataacatcatcatataccaccttcataattagtgtttgtgagatgtcatctctacgtactttttaaataagaaattacttattttgctgaagacaggatctctcatttctaccataaagggcgtgtgtctacatgtgtagacaaaaacaagcaaacaaacagtgattggtaactgatatactctttgcagaagatgagaaatgaagaggacatatacatgtttctagtataatttttgttggaaaagaatccttgccctagttttacactggcagtgttgtaatgtactctatcttatcacccccattaggaaaggtagcctgattgaggtttccaggtgtgtgtgcagaggccctccatagtggaaggtggagaacaataaataggagcatgtgcattagaatagccaacgcagaatagctggatttgttgagctcctattgtgtgctggatacagttaagcagtgcctatatctcatttaattctcactctatgataggttctactcttatctccattttatagaagaggaagcttagagcaggtcctgcggaactttcctgttttttttgttgttgtcgttgttgtttttttagacagagtcttattctgatgcccagggtggagtgcaatggtgcaactttggctcacggcaacctccacctcccaggttcaagcaattctcgtgcctcagcctctcgagtagctggtactatgtttatgccaccacacctggctaatttttatatttttagtagagacggggttttgccatgttagccaggctggtctcaaactcctgacctcaggtgatctgcccacctcggcctcccaaagtgctgggattacaggcgtgagtcactgtgcgcggctagaactcctgttgtaccttcttctgataaccgtgtgtagaggattttgtggcagaatggtgatgattacatgccaagttttggagtcgggggtcaggggagggatccattctcattattattatttgaccttgatgtcaaagtactatgcactttgtattgtttgggcttcgcccaattctacatttggtggggaaaatggcccttctcttagctgtgcaattgtgatttaagaaaatcatttaggaatcatttgaattgtttagtaataatcttacatgtctgcatttttctggaaaatgtaattcagttagctgttttaaaaggaaacctatgggaatttagtgggcatattttataaaaatctattaacggcgtagatttgtatatagtcttaaagtagttccctatttctccacttctttcttttcaaggactttttggcatctgtatacaatttttttttttttttgagactaagttttgctcttgttgcccaggctagagtgcagtggcgtgatcttggctcactgcaacctccacctcctgggttcaagagattctcctgcctcagcctcccaagtagctgggattacggtgcacgccaccacgcctaatttttgtatttttagtagagacggggttttgtcatgttggccgggctggtctcgaactcctgacctcaagtgatccacccgcctcagcctcccaaagtgctgggattacaggcatgagccactgcgcccggcctgtatacattttttaattgtctataccttttggatgtctataccttcatcctagtagtcagtagttattgaacttaattcctagttctagacttgcctcattcaaaagtatgaatcatgacatctttgaaaggggcacgttgcaaggaatgaattgggtgataatagtgacttattatcaccatttaagagaaaatttaagccagttcagaaaattatagcaggtaggaaatggattagatcattcattgtcagagcgtggtccctagactagcagcatcagcatcatctgggaatttattagaaatacaaattctcaggccccaccccagacctactaactcagaaattctaggggtagagcccagcaatcagtttttaataagccctctaatggattctgatgcacacgaaagcttgagaatcattggattagaaccctcccccacccaaaaaaatgctcggaagagttattaagctattgcaagaaatggcatcttcctgagagacaaatttaagttgaaaccacctggttctgctcttgtcagagatagaaaatggaataaatggccactgataggtctttgtaaccatatgattcccctgaggttagttcctgcctaggtatttgtttccaaaataagtatcccaaataaataccagaacttcatgtaatagtcgaagaaatagaattcagtagtcaaaagggattaaaagcaatttgtacatttactggagactagaaaagtgtcaaaagatgaattcctaatatgcagctttttgcctcgtcctctggctcccagtattatttgtgcacacacacactgacacacccacacactgtaccttccaagagtcacacaaaacccttccctcactcaattcctagtcagaactctccccagaaacagtccaacatggctcatggcttcctagtccctcatctctctttcacttccttctctcttttattccccccatcccccacccccatgcagcatatttttcccctttccagtgtcgattaatgaaaactgattcatttctcacagtcctggaaatctacccacatacattctccatctgtgtaatgaaagcccaataactgattcatattggatgggtagaatggaaaaagccaagaacataaagacagagttctctttctggtggagagagagatggagcagtctcatctctggttgaatggggcctcagagctgttccacctgaaatttcatgatttgggattttgaaagtgccaatcatacattaaattgactttttagggttttctttttttgcacattgtatgctggtatgattaaaccttcattttaacactgtttttgtttgtttgtttgtttgttttgagatggagtctcattctgtcacccaggctagagtgcagtggcacgatcttggctcactgtaacctccacctcccaggttcaagtgattctcctgcctcagcctcctgagtagcagggactacaggcacacaccaccacacccagctaattttttgtatttttttgtagtgacggggtttcaccatgttggccaggcttgtcttgaactcctgacctcaggtgattcacctgtctcagcctcccaaagtgccgggattacaggagtaaaccaccgcgcctggcctcattttaacactgttaagggttgttttgttgatgttctcagagtgcctttaatggttatgaatttcattttgaagaaaaattaggttgctacacaatttcgctgttggttttcatcaaaagtccattgtattaaagcactcatcctgagttatggagagaattgagatttagccctacactgaaagaaatttaaatgggaagtttagtgaccttatgggattgtaattggttttgaggttttaaatgaaaaatatgaggcgggagtatgtgatgctttccgaacaaaaacaatataccctcatgcaataatgaaaaaggttctagattctgtcagttgattttcagtttccacttgcaagattgaaaagttcaattggatttcaggctttattattttctagcatatttttgcataaatcattacccttgcctggaatttccaactcctgcctttcactgatctgaatctgaccccacctcctctctcccaggagagcagcagagtccagaagaaatcacactggattaaaagtcagagagataattagactcctcccacttaataggacattggatgggtgggtcacttgatgttttaaagtctccatttctttcttttttttttttttttgagacggagtttcactctcgttgcccaggctggagtgcaatggcgcagtcatggctcaccgcagcctccgcctcccagattcaagtgattctcctgcctcagcctcccaagtagctgggattacaggcatgtgccaccatgcccggctaatttttctatttttagtagatggggtttctccatgttggtcaggttggtctcgaactccagacctcaggtgatccgcccgcctcggcctctcaaagtgctgggattacaggcgtgagccaccgcgcccggccggtgggttattttctagattaaagaaatgggccgggtgcagtggctcacgcctgtaatcccagcactttaggaggctgaggcaggcggatcacgaggtcaggagatcgagactatcctggctaacacggtgaaaccccatctctactaaaacaaaaaattagccaggcgtggtggcgggcatctgtagtcccagctactcaggaggctgaggcaggagaatggtgtgaacctgggaggtggagcttgcagtaagccaagattgtgccactgcactccagcctgggtgacagagcgagactccatctcaaaaaaaaaaaaaaagaaaagaaaagaacccctctaaaaataatggccagcaacatttaatgagcatttattatacgggaagttcttcccacacatttcatgtaaccatcacagcagctgtttatcacaacacatttatcatttattggcagtttttttcatccccttttaaaaataaacactcatttttcttccaacttgctaacatttatttttgctccccagttttacaaagtataattaataacaaagctgttgggattgtgtgacaaagatactttatagaaatatatatgatttttacatactcacatgtaccacataggtttgcctttggaaccagatatatcatctagatatttgggatgaaaaggaaaaacaggcaacctagaagatttgggagaaggccgcagataagatcaactaggctctggattttaagccttgttgtggaacactccctgatgtggtttttggtattttgctttttttggggtgggggggagcactacaaattcttttattgcaatataatttactaataataacattaatcattttgaagtgtaatctggtggcattttgtacattcgcaatgttgtgaaactgtcaccactgcctaaaataccatcacattttcatcactcccaaaagaaatcttgaacccattagtagtgtttcacaatgtctcccatccccttcattccttttttatggctgaacattatttcattgtatggatgtataacgccatattatatttatccagtgtgatggttaatttttagtgtcaacttgactggattggggaatacctagagagctggtaaagcattatttttgtgtgtgtctgtgagagtgttttcagaggaaattggtgtgtgagtctgagtggactaggtgggggaagatccaccctcaacgtgggtgggatcctccaatcccctggaggccaagacagaacaaaaactgaggtgctcagtatatgttactgcttccccttcatgaacttgacatttcttgagtgcttactgtgcacaaaacactgtgctaggccctttgggggctacaagaagaaatggaacatagccctgcccttaagaagcttgtatcctgatggatggactggaaagggagggttggcgagagagggcatcgggagggtagagtttcctgtgcctgagggtggtgaatgagagagggaaggacccgaatgtgaagtaaagaggaaaaaggtctgtgagaatcagagcactgatggaattcaatggaaagattaatctgtgtgtgtgttgggggtggggctatggggagcagctcatggagtgccttcctttctttacccttgtattcctcccacaactctagcagaaaaatgggtacaaagatgccttaaaatgttggttgtttttatagacacttctggtatgaggttaaaatattctgcaaattgggaggtttccatcaatgggacataatattcgtggccctttgattcagcaactttttgagtccctcccagtctttagggtgccagagattcagagataagacaagagtttagaggacaagggtcaaatgaaaagacccaaagcctggcagggtggtgcacacctgtaatcacagcgactggagaggctgaggcaggaggattgcttgaggccaggagttaaagatcaaccaggggcagcatagtaagacccagtccccctgcccctgccttccacctccacggaaaacaaaacaaaacaaaacaaaacaaacagacctagacagtagcatgtaggacagtaacaaccttggcaaaggtaaacactgtggaggaatgtggcaggtgatcagtcattccttctgcagactgttttggggctcactctgctgagctctgtcatacagagagtagccacagggagggccctgccctgtagaatcaccataatctagaacactggttctcaaggtgtgggccctggaccagtagtgtcagcctcacctggaagcttgttagaaaggcagattctctggctcaccccagacttactccatcagaagttctggaggtgatgtccagcagtcattttcacaagccctccaggtggttctgatgcatgctcaagtgtggtgagcagtgggctaggacagttgtcaggtctggatgcacattagaatcacacgcggggcttttaaagcaacagtgcctaaaccacacctaagactgactagatcagaatctgaagggagacccaggcatctatatttttgaaagctctccaggtgattccattgtatagccaaagttgagaagcggtggtctccacatgcttaaacagatcatcacagtgcaaccaagagtgaccattaaggtgggaaacagtgcctgtgagtccacagagcagaggatgcctggcaaccccttgaagggatcaggatggctccccagaggaggtgaggacccttcattgtatttcctattggatgagctcttcattcctccttccctttttttctggacattgcagttgcacaaatctgagtgtgatcggaaaggttattttaaaattcatttaatgtgattaatttttcaaagttgaacacagctggcttccctttaaaactttgtattttgatagtggttcttaccatgaataattgactaatatcaggtcattaatattctataggagagtacttcaagctaataaaattcattttaaaattagtttttaaaaatgtgttcctgcagcccagggatagtaggatctcagtcaagtatgagattttatgcttttctgttaacataagatagttgtttgactgctcagtatccctgttttattccaatttttttgtaggaattaattgcccaggaaaagacctctgtttcagagttgcaagtttgcctggatgctgttgccctgggaaacattattgcatcaacagtggggaaggggtggctctgacatgggtgctctttgtccttctcctgggtagggcatctctgagagggtatcccctttaggtccttcccagggcttcacatttgggccagatttttttaaaaaataattaaacttttgtattttgaggtcattgtcaatccacacgcagctataagaaatattataggctgggtgcagtggctaatgcctgtaatcccaacattttgggaggctgaggcaggaggaccacttgaggccaggagttcaagatcagcctgggcaacatagtgagactgcatctctacaaataaataaataaataaataaataaataaataaataaataagaaaaaaattgccgaggccaggcgcggtggctcatgcctttaatcccagcactttgggaggccgaggtgggcagattacgaggtcaggagtttgagactagcttgaccaacatggtgaaaccccgtctctactaaaaatacaaaagttaaccaggcgtggtggcgcatgcctataatcccagctcctcaggaggctgaggcaggacaatcgcttgagcccgggaggcggaggttgcagtgagccaagatcgcaccactgcactccagcctgggcaacagagcgagactccgtctcaaaaagaaaaaagagaaagaaaagaaaaagccaagcatggtgacacatgcctgtagtcccagctacatgggaggctgaggtgagaggattgcttgggcccaggagttcgaggctgcagtgagctgattgtgccactgcactccagcctgggtgacagagtgaaaccctgtctcaaaaaaaaaaaaaaaaaaattacagagagagcccatgtaccctttacctggtttcccccagtggtagtatcctacaaaactatagaacagtatcacaactaaaatgttaccactgatacaatcaagacagagtacatttcatgatgccttttatagacatccacttccctcccacccctaccctctcaacccctggcaagcatgtaggcatggatctgttctccataagttcttatggagttcaaaggtaaaactgggtccctggttttaaaaaaagaaagagatggccatagactgtggctcatgcctgtaatctcagcactttaggaggctgaggcaggaagattgctttagcctaggagttccaacatcagcctgggcaacatagggagaccttgtctctactgaaaaataaaaaaattagccaggcatggtggcacatacctgtggttccagctacgtgggaggctgaggtgggaggatcacttaagcccaagagttggaggctgcagtgagcaatgatcgtgccactgtactccagtttgggcaaccaacagagtgatatcctgtctcaaaaagataaaaaaaagatgataaatgcacacaaatagggcacatggacaaaggatgattgggtaggaaagttagacattttaggatttcaggccatacataaagactttcttttggaactgaattcagcactgtattagtctattttcacactgctgataaagacatatccaagactgggaagaaaaggaggtttaattggacttagagttccaaatggctggggaggcctcagaatcatggagggaggcgaaaggcatttcttacatggcagcggcaagagaaaatgaggaagatgcaaacgcagaaataaaatcatcagatctcgtgagacttattcactaccatgagaacagtatggggaatactgcccccatgattgaaattatctcccaccagttccctcccacaacacctgggaattatgggagtacaattcaagatgagatttgggtggggacacagagccaaaccatatcaagcattacttcttggatacactgtgtctttagagggcatctcctggtgttagtgttcacagtaatctacctcaattcctctggtttaaatctggctgtgttttggtaataactggtttatttgttagaggccatggtttgtgctccagccctccttacctcggaatgagctcaagggctttttgacagcctttgggagaaacatgtagagtcagaaggtggaagctggagatgagttaatttggcttctcttggaatggatattctcaaaatgtttgctcaacaattaagcagaagaagcagatgctgtgtggaagaagctttactcatccagtaaatctcaatcccgactgaactcagacttccttatccacatgtgccccagagcagctagacgtgcagagagagaatcacaggagggagctgccaggcttctcactgcagggtggtaaccgccagccacatgtggctattaagcgcctaaagtgtgcccagtgtgactaaagaactgaactgtaactgtacttaattttgatatgaaatttaaatagccatgtatagctcatggctaccaaatgaacacagagattccacattgcccatgttgggctgtttgagtcactccacccctttcagtgggataaaactgaatttaaaaaagaaagagacggccatgcattgtggcatgagcaaggagaggccttacagcttcccccagggtcctctgtaaccccttccccacccagcatcagccctaaaacattgctgagcaaacattttcaaaccactagtgtgaggaggaagctgctaattagcctgcctggacaggagccacatctgtgtccagctgggccagcgcttggctcacagtactgcttacttcatactgctctaatgagtcacacttgacttctctttagatttgcaagctcattcttggggccaggttaagatttgttccctgcatgcatcacttcgttacagcactaagactaaggtgttacatttcttcccgtgccagggaagcagcacagaaaagcggtaactgagaatgtgggtcctttccgccagatgtgagagattaggaaaaaaaaatttaatggtttttaaagtgggtcctgaagccagtttcttgcattggaatctggcttcaagtgcctctgtttctacacctgtaagacaaggatcatcacagcacctctgtcatcatagggtggttgggctgagaaagtctgagcagtgcactttgtccttgggaactgctcagttattacctcttattatgatgatgctggtgatgatgactgtgagcatgataataaagattttctggaaagatgatttgaaggtgtgactctcatgtgtgtccatgagagggcagcctaaaatcatgcatgtctgtggaacaagcagcctctgtaaagcctcaaggtaatgtgggcagtttcaagtgtgtttggccctttttcttctctgtttttcttttttccctctgtttgaagagcgctttcagccattttcaggcttactttagatacggagcaggcccatgaacacctagagggcagcatgggcagtacagagctaggttcaggccctgcctgggtgggtgagtttgtgtaggtgccaatgagagcgtctgtctaggcgtcctaggcttttctttgtaacttttcacacagaactaattcttattaatcagactcttgaggtagacactagaacctgactgtgtttagagaaaaaagaaacttgattttctatgcttgttccccttccactaacttcacacctgcctctgagcattgtgtgcatgcattggtgccaccatgtaaggggacagtggccggagctgtatagacccagagttgcatcagccacacatggctctggaacacaccaggggagactgagttacagagagagcagaataagagtcctcaaaccatgtgggagcacagagcatcatagggctgggggacagtgggggtcttgaagatgggcagggtttaaacagatggagcagggtagaataaaggatggcatgagctagaaggtgcatgggagaaagggcagtgctgaggtaaagttgggaaaagagtttggagtcagattgcggggtggctggaatgagctgaggagttggcctttaaatttttgatgacgttcatattgttgatagtgtcataatgattaagagatgaccaaaaacaaaatgaagaatggcacttggatttttctagtacttatctcattttaatatccctgatatttaatctaggctgcaaaaccagatgtatgtggggaatcatgacaatccagtgtttgtcacgccatcccccttcctcattcccactgcctacactgtgggccaggccttcaggcctccctcctggacagcagcaggaacctccttagaagaagcacaggttgctgtggcagcaaggcacactatgatgccaacttgtgatgctcccagagaggaaggcacagatgctggggaagtgaacctggttatattaacatgaaagctgacttctaaagaatggtgtgcttctttgggaggccgaggcgggtggatcatgaggtcaggagatcgagaccatcctggctaacaaggtgaaaccccgtctctactaaaaatacaaaaaattagccgggcgcggtggcgggcgcctgtagtcccagctactcgggaggctgaggcaggagaatggcgtgaacccgggaagcggagcttgcagtgagccgagattgcaccactgcagtccgcagtccggcctgggcgacagagcgagactccgtctcaaaaaaaaaaaaaaaagaatggtgtgcttaaatattatatacataatatactgggtccagttgtaacagagtgcagtaaattatttgtaatcctaaaatgatcatgaagatccatttaatcttttgtttagaaagccctttagggttctgcaggggttggttggagatgaaaagctccagggatatttctcagacattttcggggaagttgtcatttgttccatcttatttgttgtagatatttggatgattctaagatactaagattgacattggcacaaacttggcagaaccaaaattgaacttgagtgttgtctttcatagtgctcacccaaggagctcatacgttggctcctttcagaaagtaggccgggcatggtggctcacacctgtaatcccagcactttgggaggccaaggtgggcgaatcatctgaggtcaggagtttgagactagcctggccaacatgatgaaaccccatctctactaaaaatacaaaaattagccatgcgtggttgcacgcacctgtaatcccagctactcgagaggctgaggcaggagaatcgcttgaacctgggaggcagaggttgcagtgagccaaggtcgcgccaccgcattccagcccaggcgacagagtgagactctgtctcaaaaaaaaaaaaaaaaaaaagtaaaatgttcagtgtctgtgtaatgagcagtattcaaaattttgtccatttttgtgcttctcctctcccccaggtggtcctgcttcaggcttgggagcctgactagacgaggcctagtgggcttctctgcacactgccaggcccgtctgtcacttactgtactttctgaccccttgtctgcctgggggcaaaggattaaggaaggggctttgtcctctggggctgatgttggcccaactacaggacagcttggcaggtgcatgcgaaagtggtagctgctgcccctcagctgtgtgtgtcatggagagtgacagattggacttcctttggttgaagtgatggagatggatgatgtgcacgtgcagtcagactcgggtgccatgcccagttgcctatagtacttagcagatagggaaagagtgaagaactgaaacataatctagttttctcctttgtaggcatggagggatttttgaaatcagatgagaggcagagattggccaaagaaagacgagaagaaagagaaaaatgtctgggtaagttatgcactttggctattttggtccaagggagtggagatatggtggtgtcttttctgaagattcttagaaatttgtgaatgaatgggaactaggacagttgctagatgaacatgaagaatcaggcgtgaacctacactgcaactggcatgttcacaaataggtaattttcagaatagttcactcggcaaacattgaacctctgctgtgttctagccactgtgttagggtctgcagttacgatattgaagaaagagaaacagtcgctgcccctgatctaaggaagtcctaacaccttcaagtgtcaactgtgtacactccctcaggttctctcttgggaatctaaaagggccatcctcaggagaactgagaaaatcagcacttgagtcattttatattttaggacagagagccctggttgagaaaggccgtcttgcctcttgcaggctgtagacagattagtgcagagtgttcttcacaggatgctgagggagatagcgtttccccattgcattgagacaaatgaggagctttcaggttcttctcttcttcactgcctcctgctggtcggtacaagcattgcctcctccagggaacccttccctgccttggctaggtggaattaagggccccttagtaaatgccttgagggtaaggcaaattttgttcgtgtgttttaccccctgacttagctcagtgtctggtgcttggtgcacacacagttaaactgcttttgaatgaacatagccttataagcatcattgctcaacctagcatatagtttagccattatgcacaagtttgacttaatgacagccgtcatagtcatagctcccacgtggggaggcacttactgtgaacttcacggtcatcatcttgttcaatcttaacaacactgtgatgtggcaaacatgactgtccccacatcgtagaggaggaaaccgaggcagagagatgatctagctaacatgcttagggttacccagctagtggcagaggtaccagaaccctttatctcaatcactgcatgctaggatcctaccaggctctttttagggctctgctcttgcttccttgtttttggtcttaatccaaactgcatgggatgctctggtaatgacacctctcttctactttccttccccagctgctcgggagcaacagatcctggagaaacagaaaagagccaggctgcagtacgaaaagcaaatggaggagcgatggcgaaaactggaagagcagcggcagcgggaggaccaaaagagagctgctgtggaagagaaaaggaaacagaagctccgggaggaggaggtaaggcccaggtgcaccctccgccaccttccagccccctcagcaggctgctcagagtgcctgggcatcctgcccagctctggggtaggagagagacctgccgtgcaccttctccttggtggctcccatgccttctttcagcaacatgacatgaaactcgaagcagcactgacatagaaccgcagagacttatccattcaactcaggtgttaatttgctgtgtgatcttgggcaaactggttggcttctctgggccttgatttgtgtgtctgtgaagtgagggttggatttggcagtctccaatgcctcttttagtcataaccttttctgactctaagactcaaagggtccctggtggtctagtagataggggaaaaaaaaaaagactcagaggagattgtgggtagcggctgggtgaggtgaatctgaggattacagatgggagttcatgcctccagggcaggcacaaggccagaacaagagcttgtgaggttgagaacaatgtgatcctgtcagttgctactggcaaattagtctaccctcaaataccaagatgctaatatatttaaagtttaatgtagttcttcgctttaattgctctttccagttaccttttaaaaaagaaatggcacataattacccctacagagttctttattactaaattttgaaaatatatttagaaagcatatttggattatagattttcttcacgattatatttttaggaggtaataaaaaccttatgtcagttgatgataattttttattcataaggtataatgattcatcttttagtatgaacaatatagaggtttggtaatctccaaccctataggatatgaagatgtttgtacaaattcagtattttttaaaatctctgaacagttgcttatcactatatatatttaccccttccttcttttttttttaaagaacacatacgaaaacacacacatagtcagacccatctttgcccaagaagcaccctttcatggtgatttctttcctcctcttagaaaatgaggtctaagccagtgtcttagctatggttcaccgttattggctgcagtctgattgctgtgccttcatctgctcccagttcaaatgtcagctccaatgccagctctaccactgagcagctggtggccaggggcaagtcacatgcccctctaactctgtctccttagcccaaaacagaggtagttacaggaattaaaagaggtgacttttgtaaaagtgcccagcaaagcacctagcacagagtaatcgttcaggaatgttacattctgtttagttacttcagctgagcttggctaaagcaaggtcaagagggtgctacccacaaaagcttatgaaacagagtcagtagatgggaaaaagccacagtataataggctgttttggtaacttgggacagatttctcctttcctaacttctgtgttaagagttgctggactcacccattttcttcccatcctccattccttgatgacttagagcttgtcctcttcttccatgatctctccattttgaaagcttgtcactgctgcttccaggaaggggtactgtgaagtcacataagacacttcccatgctctgacatatgcattgtcactgggggctgcttttgaggcaatttctgtttataatttttctctacagaacattagtgctggaggcatgttaaattaagtagaacagctcccccttcttggaggtgagggagttttatgccatatggttggtcctgatgcagctgaatcttttgtggtttcccttctgggtaattttctatttgtgtgcttccttgcacccctaatgtggtggagggaagcaggaggctgcccgaccgacccttgtcagcccaagctgagcttggttccctcttctccctgggcacagcagggcagggctgagggctgggcctcctgtggttgtgtagcaacccaaggaaacagcagcctccttctgccacctgctcctgccctcagggtcccaggggacccaggtgtagcttagggacttgccacacacaggctggcttgttagctacattgggtcggtgctctgctggcacagaggcctttttggcattctcgtgggtgacatttagggagaagggatcagcctgcattacggaagcccctcttcaaaggaaaccctctgcactggcccctatgattcaaggggagctctgggagggctgcagcctgctcagtgcctggctgtggatgttctccattctcttctcagtgtcagattgaagtctttttttttttttttttttttttggtcatgttctgtctctgtcagccagagaaaagcctctgcaggaagatcattcatcctatgcaggccattttacttctctagcctgttggaaagtgtttgttgcccaccaaatcctgcctctctgggtctgatacttaggagctcatgagaggcctgttgaccccaccccagccctgccctggctctgtacccctatggttgccatgatgtcactcttgataacccctcatgtctgtgccagggcagaagtgggtaccaccaatggcctgtctctcagaggtcttaagagttggcagaggtcttaagagtagtcaggcctgtcccagggaggggtcccagggaggggtggggtggttctactgtccacttgacaccctgaccttaaactcattctcttgctggaggccacctactccttaagttcttagaaccttcacgtgccacacagctcccaggaaccaagctaccagaacaagttcctgtcacctgtgttagggctgacaacacagtatgccagcccattctcagggcagtatagcttcctgaccagtggccctggaaaattggatttggaaaagccaacttcatgttccttatgctaaacagaaaagagaaaggcctctttctctttctttctttctttctttctttctttctttctttctttctttctttctttctttctctctctctctctctcttttcttttcttttcttttctttcttttctgcacacatccctgctgaggaccgctgggggtgtgtccctgcagtgtcatccccagaacacatgtaatgggccgggcatggtggcttatgcctgtaatcccagcactttggggagccaaggcaggtggatcacctgaggtcaggagttcaagaccagcctggccaacatggtgaaaacccatctctactaaaaatacaaaaattagacagacttggtggtgctcacctgtaatcccagttacttaggaggctgaggtgagagaatcacttgaacctaggaggtggaggttgcagtgagcagagatcgcaccactgcactccagcctaggtgacaaagcaagactctgtctcaaaaaaaaaaaaaagaacacatataatggcagttgaaaaggcacagccaccccctaccacccattcctgccagagactgctgtctgagtaacagtgtctggaatgtgccctgctggcaacctttaatactgttcagccagttcagcggggtcaccttggtcgtgattctccaagttcatccagacagatctaaagccagacctcaaggcatcaagtgtgaggctcgctccttccttctttccttccttatctccctttccttcctttctatctttccttccttcctctctttccttccttctttttttccttccttctttccttccttccttcctatctatcctttcttccttcctgtctttcttccttcctatctttccttccttccttccttccttccttccttccacccttccttccttccttccttccttccttccttccttccacccttccactaagccctacctaatagaggagattctagggacgaggatttgccttgccctttccccatcctctgttgatcatcagatgatactcaggagaaccagaacttggcaggaattgcagtatgcagttctgatatttattaatactgtttttctaatgtgatggaactttctcatgctcactttctgttgctcagcctttcctctaaccagtggctcttgcttgggggtcccatgaccagcagcacctgggaacttgttagaaatgcagattctcagcaggctccaccccagacctattgactcagaaactctggggataaaccccaggattttaataattcctccaggggattctcctacctgatctctcagatttgagaactattgctctaaatggtcctgataagaatcttcctctttaaattcagattcacttagctttggttaaggacttactgcatactagtcattatcaaatagacttagagtgatctggtgatgtaggtaagctcatccccattttataggcaaggaaactgaagcccaggactgcaatgttagctcaaggtcacagggataaaaagtgtcaggcagaggtgggatttgaatccttacctcctgattccaaatctgagatcctttctgtttcgtcatatgaaggaacaaaaaggtacacacaaacacgaggcaatactgacctattcaggactaaccttaaataagacttgtgcactggacaagttttgttttctatatgtatgaatcaccccattctgactttttggggttccataaatcctcttctcttagaacttgcttatcatctatttctcatcatctctccaaaagtgggtgatacaaagtgagtgtgtctttctctcagggacaactgtgttttcatcggcctcctcaaggtctgaaggaatgaatctccagtggtgggatttggagcagctcagtggactggggatggatggcaggggtagtttttctagaggccattgaaaagtccaggggcaggtctggctttcagtgagcactcattcccttacaagggtgccccccagatagctgatcagtggtcaggctggttcagtgaagctcactattctttcttttcattggtcccctagtagagaagggaccactttgtgaggtccttctggcatgtaggaaatctaccgtaacccacccaatacttaattcactctaggatgaaaggtttcaacacttcagttaggtcattggttaaatactttacgttaaaccgtataatgaaatactattcagccccaatctcgagtggctgtacttcaggcatcacatggcagagaagttctcttccttccaagccccagcttttatcaggcagactgccagagttggccatcatcgtttaatgggccagggtcgtgaggactggactctgccaaggcatgcatactcacgattgtagagtctcaggccaaatacaagagcacagttaatagctaatacaaatctaagagttacaggaggtaaaaatccccctttctgcttacaggtccctggagaggcagtctcttagcaaagtgctattcagagaaaaattatgtagaggaggctgagatgtggagaagccagatcctcatctcatccctctggtatagacagaagggataaatccagatacctattaagtgacctttatatgtttctagtaagtgtgacataaaggagcctttcctgatctttaagtcatggttactcagttgatgatgtcctaaattaattttgcttctgtgtgtatttttttaagccatgacaattgtatctttttgttttagaatgggctatgattagcccagttcctggagcacctcggggttgggttttatgagggcaaaagggtgtcattataactgctagctcaggccttctccagtggagatagggagaggagttggtatttgcagtgtcacggaggtggtggggagtgcagaattagagcaccttcactgcagcagcaaggacaactttatgaaagtaacaatttgggtaatacaggagagtgtttttgataaatactgttacgagagaagccgaagcctaatggttgtttttctcttctggttaaaaattactgggttctgcctccctgcctcctccacctaagtaactctgggaacgcatggatgcttttttttttgtggccagaaggttctttactcttgcctcttgaaaattttgaaatatgcaatattatcccagattactatatagcagaaaagcgtcacactatgtaaaacagttggttcccctttaagaagttctaagatgaaaatgcagctttgcaaaatagatctcagtgtcatgtatcaccccaaaaactcaaattatatttgcattaaaattttctcaaagcaaaatgttttatgcttttaactagaaaggatgctcttggttctggagcagaattccagctctcctggttagggcaaaatgccttgagataggcctcaaggagttaatgcttattgggcattattcctagggcagcttctccccagggaggggaggggacaggacacacggtgtttaggttgagagccagtgctagcctagccgcattgtttactctccacctactcagaacacgctggtgtggcagagagagcacgtatgcctgggttttggatgctgagcacagaaagccccatttggtgactcacactgtgcactgaggcagcaggtagtgtggtggggctgggtagttaatcttgttaacacttgccttacacgaactgtgtaggaacggctggaggcgatgatgcgccggtccctggagcgcacacagcagctggagctgaaaaagaagtattcgtggggagcaccactggccattggacccggaggacatgatggtgagtgtagggttgcccctgtatttcaggtcctgggtgggaaataatggagcaggcaggggattatgggcaccactgggtgtctccaggatctgggggatgctttgcacagcttttcagaggcaccactttcagatgtgatgtttaaaactgccaagattcctacgcatgcatttgttatgaaggggatctgtgcattcttcttgatagcaaacagcagttgacacaaaaactgggttttgagggagagcaaaagagaagactttgaacgcagagcccagtgagctgggcccagctggcaagcccagggttgttctgacttcaggggagggaaacggcaggaggctctgtcactggtccagatgcgatcaggaaaagcacagtggcagttatcctccaaaaagggctggactatttcctgctgcattttaaatttttgttgctttttcgactttgtttcaaggtgacttatttcattaccagttcaaactcatctttaaattttcaaatgtgtaatttaatatatggattgttactagtctctggatggcttttccttcttttcagtgtctcactacatttcagcgatcttagcattctattatgcaggaggtgtgtactagctctatctgagagcaaatggatttgtgtttacaggacagttcttgactttgctgtattgtgcttttcacctttgggcagtaaatatactttattttttcttttttgaaaagtcaacaacccatttcagttactttttctaatttcctaattagaaactaagaagcaacaagaaattgggacttttttcttttacctctctttgctctgattttttgctgtgtaggtgaatcagaaaataccccaccccctcctctaggtttagcagccagcaccctccctccggatgcagggaccactgccgcagctgccgagtccaccaacggtatatccgagcatcactgtgccatagcattttgtgataactgttctgatcatcctcccccatcaccatgtctgcgtcaagcacttttacaattggtttcttagtctggcctgtcacaatttttttttcctagcaatgtgaatgacatgcccatatttctttgttcctctgtcattatagagcggtgcatgccttacatcttagtgccccggagacatttcatcctcaactcactaacgtctgccttgaaaatcttgtcagtgttggatttttgcacactcagatctttaacaatctcttcatcatctgttgtagacattaagaagcagggcatttctgattacttctggttaccaaaacctgtaatcacccggagttctgaatggagaacttgggcttagtgttaaagtgatagattcctggagaggtgtttgagagggagtggtaggaattttatcagtgctaacactggtaatccaaataattagataatttggctttgtgcttgattttatttaataggctgtctgttttgtatacaggcctgggaaactcctctggtctagatcaagaacagaactagccaaactttgtttccatttaataatgactttagaaattcaatccatcttcaactggcaaagaaaaaaaaaaaaagctgtaaaagggatgcaatatttaccaacaatgcggaaggtcatattagcagtaggaatcaatatccttggtttctgacattcctttgacaatgaataatccttactgggggtgcttcgtaacagcagttttgctgcacaagcagagttacctctagtgtgggcactggctttccccctaagaaaggtgcaggggggctgggcgtggtggcttgtgcctgtaatcccagcactttgggaggctgaggcaggcggattgcttgatgtcagtagttcgagaccagcctggccaacatggtaaaaccccgcctctactaaaaatacaaaaattagtcaagtgtggtggcgggtgcctggagccccagctactcaggaggctgaggcaagagaattgcttgaacccgggaggcagaggttgcagtgagatcgtaccagtgccctccagcctgggcaacggagcaagactctgtcttgaaaaaaaaagaaaaaagaaaggtgcagagaggtggagtaatcacccactgggaatcagcacccagggcccgggccagggtgaaatgagtgcagtacttgactagagcatacaatttaagggagtgccaaaaatctcagtaataaagataaaataatatcttaatgtgatattttttaaaatccaaattaatgcaaaacaatccataataaacaacaaatttctaaagactggtgccatgctgagcacatcagagcctgaagcaaaagggaaaatgtgtactcctatatacgtggttttatgtaatttctaatgtttagttttatcaaaacattaaagtagtttaaaatatggaaaaattgaaaagagtattaaaactcatataatttcaactttaaatagttttatttctacacaaatcaaatttattgtacttttacttcagctttagttaattaaaaattaccgggccaggtgcagtggctcacgcctgtaatcccagcactttgggaggctgaggcagatcacgaggtcaagagatcgagaccatcctggccaacatggtgaaacactgtctctactaaaaatacaaaaattagctgggcgtggtggcatgcacctgtagtcccagctactcaggaggttgaggcaggagaatcacttgaacccgggaggcggaggttgcagtgagccgagatcgtgccactgcactctagcctgggagacagagcaagactctgtctcaaaaaaaaaattatttaagattgtcatttggtcagcagaaattatagaacatcgcagttcttatggcagttctcatgggaaaacacgatgagcagaggagtagattttgaaaatattattgatgagtttgcttttttacaaccaagagcacacatttttcttttggcctcaggctctaacttagcttggcagggcactgtcagcatctctttgtttgccgtctgaaataatgactggaacgtaagaacaccaaactcagggtcgcctgttaaaatgctaacctcaaacagttaaagcatttgcaaaaggaccattttgatctgtctcttactaagtaagaaaaggaaaaccaactgctaaagaggccgttctgctttaaatacaactctgagaggacggatttcatctctctccaacctgagctacagataaccttcataaaagagtcggtttcagcaagcggtgacagtcagaccatagggcgttttccagtggtgatttgtctctgggtccaagttggttttgtttttgtgtgatgtgagcatgctcaaaaatccctagacaaaagaaaatgatttgttggtgggattaacacggcttcagttgaacagttgagtgaggttgaacatttgaaattgaagatgacaacacagtgaagaagttgcagagattttgctgcagaccaagggctgctgtagcctggtcatttctagagtaggataatgagatgccaggatgatgaaagcagagcatgctgtgccacagcatttaggaggtgcgtggatgaggacaggaaggacacttcgggatatgtgtttcttggttctacagtagtgtgatgaataccaatgtctttaatgcatttctctgcagcatgtgacaaactttcaacatcaactatgagtttgccaaagccaacggagcctcccatgaataaacgcctgtcttcatccaccgtggcaatatcctattccccagaccgaggcaagtgaacatgtagacttggtctctctagtttgtttcttttctggtgtgagcatcttaacgtttgtctttgtgagagtctcctcttgagccttctgcagataccgtcattgtcctagtcttgtggtctgaatgtgggagctctagggccttgtcagtgggactttggaacgtggcacggctctttagagccaggtcgttgttgaatagaggtaggaattaatgcagtctcccagtctgaaagagactgttctgttttccacattgcatgtaggagttatcctgcccaggaattaattaaccagtgggcagatgtgaccattaaagtaactgcctggtcaatgatggaatacagttgattagccagaaagagcagaattgataagttatagttatatgggaggcttagatatgtgaaaaaatggggttctgcagtcatctgtggtttataggcctgcccattttgtagatgaaaagagaagcacagaactaatgaggcctctaaaagaggaaaaggttgggtggcgctctgttttgagttaggagatgatgtgtatgggacgtgtgccagttccagaacctgagtagatttaacagggtctgcattctcacaaaggctcagataagtcactgaaagtctgtttatacctttcagagtatacaggttaaggaaatgacggaagctctccatgcactaaatgtttattctaaagcaacattgaagaagtatcaggtgccagtggagtgtttagcacaagttatcaccaagggcagagcaaaaggctggttgcgacttggcagaggctggtgtgccttcctggttgtttccactgacattgaccttgtacctctatcccagaggcatattatgtgtgtcagagaccctataaggttcataatgctactgatctgtgatgcagttcatggtaagcaccaggaacctggaagtgatgaagagctgaatacagagtgagggaaaagttaattcattgccatatataatacattcaaaactgatctaaatattttggtcattgacttccagattatgaatactactatttgtctttcattaaagctgataatcagttggctgtttgtatttttgtgcctctcacttaatttttacccttattgacatgtaaaaagtatgaaaagatatatttttatactattacaagatgacattttatttaaaaatcagtgtgttatgaaatgcttcttagcgcaggacctaaaacaagtgttttataggcataatttgttttctacttggagtaaaggtttttttgttgttgttttttttgttttttttttgtttgttttttttttgagacaggctctctgttgcacaggctagagtgcagtgatacagtcttggctcactgcaaactctgcctcccgggctcaagccatcctctcacttcagcctcaagtagctgggactacaggcgcatgtcaccatgcccagctaatttttttgtattttttgtagagacgaggtttcgccacgttgcccagggtggtctcaaattcttgagttcaagtgacccgactgccttggcctcccaaagtgctgggataacaagcatgagccaccatgcctggccataaatgatttcctgagtccatattacatctgggaggtgggctaattctctgagtgatacaggttactgtactgcaatagcatattgaatggattttggtacctagtgacaattaatgcactctcccaaactctaaaggacacattatttgttttattttacgatgacaaattccaaatccatcctttgttcaaatatttttattttccatgttctgccacccaaaagttaatttgcaccatgcattgtgttgtttaaatgttttattttgttttgttttaattttgctttttaaaattttcatttgattccatccctcagctcatcacatgcaccttagtccaatggaagccattcttgtttcgcgactgttgacacccacacagtcttctttagccagaagcagagcttcagtcatgctctctgggcaggccaatgattcaggtaaaagaggctaagctggtaacaccaaggaaaatgcccgaagaggtgttggtcagcctaggatttactcctgaatttttggattttgcttcctatttgctggctttgtgaaaagtcttcattggttaataacgtcttataccagtgttttgctgttttatgtttcttttgagtgtcacagaggtgagtaaattatcttatgagtgagagcatgttctttaggggaagaaaaccccacttgatgaactctggaggttagtagacttttcttaagagacggtgtggcaaaacagcctgtagaccagtctggggtgtcccatagccagctctaccactcactagctctcaccattgggggtaagttaattaacttctttaagcctcagttttctcatctataagatggagctattttaaattattttgaagattaaatgagagagtgcatgcaaatgagatagcacaatgattagcacagaatgaaagctagaaactttgagaagtttctagcctcactactcaaaaggtggtccatggaccagcaatggcagcagcatctaggagcttggttggaaggccccacctagcctgcacactgaagtctgagaaacactggaccagaccatcaaagccctgcctttatcaaagcagatcaagtcgtcatgtcaggatttgtggcggctggcattctctttgtttccagatgagcagcactgtgtccacctaaggtcaggtctactctctgttctccagatagtgtactcagttgtgatgatacataaatgagataaaacttctgcctagttgtagctgcttccaaacagttatactgtttctgcaaataagttgtacagatagctaataggttcataagatgctcaacatcattaatcattagggaaatgcaaatcaaaaccatagtgggatgccactttacacccactaggatgactagaatttttttaaaaggggaaataaccacgtgttggtggaggtgtggagacactcttccctcacacactgctggtgggaatgtaaaatgatgcagctactgtagaacacagtctgaccgttgctcaaaaacttaagcatagagttcccatacgacccagcaattccactcctaggtatacagccaaggaaattaaaaacatatgtttgcacaaaaacttattcacaatagccacaaagtggaaagaaaatatgatatacccataaagtagaatattattcagctataaaaagaaatacaggccaggcatggtggctcacacctgtaatctcagcactatgggaggccaaggtgggcagttcacttgaggtagggagttcgagaccagcatggccaacatagtgaaaccccatctctactaaaaatacaaaaattagctgggtgtggtggtgcacacctgtaatcccagctactcgggaggctaagacaggagaatcacttgagcccaggaggtggagactgtagtgagccgagattgcaccactgtactccagcttgggtgacacagcgagactccatctcaaaaaaaaaaaaaaaaaaatacagatacatgccacaagatggatgaaccttgaaaatgtgctaagtgaaagaaaccagttgcaaaaggccacatattgtgtgcttctatttatgtgaaatgtctgaaataggaaaatccatggagatggacaatagatggtggttatcagagactggaggagggaaggaaggggagtgactgcttaacggacgaagtttctttggggaatcttgaaaatgtttttagaagtagactgtggttatggttccacaaccttgcaaatgtagcaaaacctccaaattgtatgtgtatatgtatacgtatacatatacgtatacatatatgtatatatatgtatatgtatttaaagacagggtcttgctcttttaccctggctagaatgcagtgatgtgatcatagctcactgcagcctcgaactccaagccctcctctcacctcagcttcccaagtagctgggactacaggcacacaccaccatgcctggctaattttttgggttctttggagggacaaggtctcactatgttgctcaggctggtctcaaactcttgggctcaagcgcgacccatctactttggcctcccaaagttctaggattacaggtatgagccaccatgcctgtcctgtatactttttaaagggtgaattttatggtatatgaattatgtatcaaaaaaccctagcaagtaggaagtaccccattttgagaataaggaatatgttggggttccctaagagcaactccaggatcagtgatttgctaggaagactcacaggatccccagtgaaaggatgcaagcaaagtcagcaaaggagaaagacacatgggacaaagtcctgggaagaccaggcacaagcttgcagagtcctctctggtggagtcactcaggacgcctttcaccccagcaatgagttacgacaacatgtatgaaatgttgccaaccagggaagctttttagagactcagtgccaacggtttttacagagggctggtcacatgtactccatgcccagcacatacccaaattccaggttcccagaaggaaagcaggtattcaacatacaccatgttgtttgtttatgccctgtgagccactcaacagttaaagggggatcgtcctaaaatgtacgttcccaggtgctggctaaaggctaaccttgtaagcaggccttagtagggacagcagtcaggcttgctatgttaactcatttttgcacagctcacccacttgacccttggccaaggtgtctttacagaaaatttttcagtagggccccacatagcagggggtgagaccatcctgcagtattgatctcagttatgtcctttaggggttctgggacttagcagttaaagcaaatctcattaaccagaaggtctgtcttttttttctctctttcttttctttttctttttcttatttatttatttatttatttattttggagacaaggtcttgctctgttgctcttagccacgctggagtgcagtggcatgatcatggctcactgtggcctcaacctcctaggcttaagtgatcatcccacctaagtctcctgagtagctaggactataggtgtgtgctaccacacttagctaattttttttttttttttttgtagagatagggtcttcctatgttgcccaagttggtctcaaactctgggactcaagcgatcctcccacctcggcctcccaaagtgctgggattacaggcttaagccactgcacctggccttagaaaggtctgtttgaggcagccaggtggcctcctccatcagttgctgtatgaatctttttacctggcctgtggcatcagctcaggcccagaacagctctggccagtaagttgaaactgatctgaatgccttccaggcctgacgccgtgtcatgataatcgtggcacgcacataggaactatgatccccaagggctcatgtggttccctggaaaaaaagagttgaagatgttagggcacactagcagggtatcattggtcagtcagttcccagtgtggcctcccactgtggtgactggtgcctcagggtgctcagtccagtgcaggtaattcagctcagtcccaggttttatggcggctgcctgaggccatcagtcccaaacagttctaccagtgaccctacttcatcttcctggcaagtgcagatggcatctggagctgttctgtggggacatgtaggaactggccccactcctgccggctcatagtcatgctgtcacatgccatctaggctcagccatgggtctgagtccaaggtgctttcagcacaaggagttttccttcaggaaggagagcgcttccaggagcagttatggaaaacagaacacaaatgtccttccgtatccctgtatcatttttaccccaggtgttggattatgttgtttttctccatgtcctattcaataatcaaaactttacattttcttaatcatcccctactctcacccagacctttcaaagaaaggacaaaagcatttcttaaaacccatttttatccaacttaaccagaaagatatattgtgttcaggtattaggctaaaatcctaagttttcgaaacattttaaagtaggtttgtatcacctctgagccctttcatcttgatcattttatccagtgagcagcctagaaaagatcaatccctttccagtgacagctgcatttaacaaattgctttactgacgtgtgtagtgagagaaaggtagaggaaatatagtcaggatctcagtctattacaaactgcagctactccagaaaattaaacacaaagcatcaacagcagtgacactttccccagagggaatggagttcagtctgtcagggatggctgaaagagtcacattgcctgtggtgtgacttggagcttttgtaggaatcatgtgttgggaatataatcagactctgcatcagaaataatagagccaatgagcagcttgattgtggatggtcccatcagagaacaagccctgtcttgtgggcacttgtatgtgacccagtctagcagcatccagaatctttttacagttttgggccccatgaagggcattctatatttgtagtggtccctactcgatttttaaaactccagaagcatgtcttttcctagaaattgcctgtcttttcatatctccccttttcaagaggctccattagacaaaagtcatagcagaaaaatctactacagagacttgttctggttctaatatttggagtttaaattccagcctacccactgctggcaaaaagcaaggaggttgtgtctaactctcacttggaggagaaaacaaaaaccaaaggcatcacttgggctgtgctttttccctcactttagctagcatgctacagtcaaaagcagccagggggatccatcaagccaactctcttggagctgtattggtcatctttaaattccgtaggtcacttttacctctcaaaacagctcagctgctgttttataccatggataacttcatagccacccaggcatcacaagtttgttctccacccttttgtccttttcccaaaatgtgattttaccacgtttcagcaaatcagggtcattccagcaattcccatttctgacactagttgtgccagagttccccaagaccaccccaggtttgatgattggctaggagaacttggaagaatcagcatagttccacgcatggctgtgacttattttttctttcttagctttttttttttttttttttttttttcgagatggggtctttctctgtcacccaggttggagtgtagtggcgcgatcttgactcactgcagcctcaactttccaggctcaagcgatcctcctgcctcagcctccagagtagttgggactacaggagtgtgcccccatgccaagctaatttttgtattttttgaagggctgtggtttcaccatgttgccaaggctggtctcaacctcctaagctcaggtgagccaccatgcccggcccatggctatgatttattatagcaggaggaaacatgaaaaaactagcaaatggaggaggtgcatgggactaagttcagaagtaaccaggtgtggatttccaagagtcttcttccagtggagtcacatgggacgagcttaattcctctaccaacacattgtgacaacatgtatgaaatgttgccaggctgggaagttggctagaaactcagtgcccagggtttttactgggggctagatatgtaggcatcccctcccaggcacatacccagattccacactcccacaagaaaagcagatgcttagcataaaccatactgtttgtataaacagtttagacacccatcagttaatggtgggaaccctcctgaaatctaagttctcagatgccagccaagggccacccttataagcaggcctttccaagcacagcagtcagatctgctatgttaacccttttgtgcacaaggaaatcgatgtttagagaggttaagtaacctgcccaaggtgatccagctattaggtggcagtgctaggtctctgtggctccaaagtacagacttttaacccctgaaataaacttgaataaacttgactcttgagtatgggagcctttttagggtaagatccatcctgtgtacaatagaaaagtatgatattgattgcccaggtcatattttaacagaaatgtgttcttcccaactctctgctctactttttccatctgtactctctgtccttctggctgttatactgtaactttctagtattccatgtctgtcctcgtttagctcctcttggccctcttaacccttcttacaagtcttcacccactcgaaacattgagaagaagaaagctacatctacgtctacatctggtgcaggagatgttgggaaagaagccctttcaggaggagaggcctctctggtaggtttaaaaccacccacccactcactcctctagactgtgttctgtctgatggtgtgattacttctgtgcttgacctgggctgtctgtttccatcaatctcctgggactgctcaaagcaggaaagggtagatttagttcaaaattttacccaacctttgaaaatcatttaactttttgcaccctcttaagtcttagtaccttggagcaaattcttaatgatgtccttgtcacagcctgccctccagaggacaggagtcagaaggaatgttctaaatatcctctgtcttcctcgttacggatatctgattctgggtcagtcttgcccgtgcatctaagtggaactgaggatctacgtcaacttttacctacaaaagtaatcattaaatattcttttgagatgaagtctttttatgttgcccaggctgaccttgaattcctaggctcaagtaatcctcctgcctcagcctcctgagtagctgggactacaggcacatgttactatgccaagcttaaacatttttgatggcatactggcactatcagtaaattaaatgttgagaaggcacccccaattgtgtctatttatttagaaattacacagtgccatactacttttgttagttattgattgctacttaacaaatcacctcaaaccttggcagcttaaaataacaaatatctattaattcatgggttctttgggtcagaaattcagagtgacttagtggttctggtacaaggtctttcatgaggtgtggtcaagatgttggccagggctgcatcatctgaaagcatggctgggcctcatctgagacggctcattcatggctgttggcaggaggcctcggttcctcactgcatgggcctgtccataaagctgcttgagtatccaaatgatgccacagctggcttccctccaagcaagctatcgggaagctgcagtgtcctttaagtaagtcactaagatcaacccacactcaagaggagaggaattaagcctcacctgtcgaagggaggaatatcaaataatgtcaggacttatttcaaaactacttcattttataatgccatattttcttttcaaatctgttgtggctcttagaagtgcatgttttagactctcggattttactatacagtggattagtgttgaaagggattgatggatgtgagtgtgggggccaattgaggacttgctgcagaaaagtgtgatagggagagaagggagctaacccttgtggagcactttctgcaggctgggcactgatgtctgttcccttctgccaaaggaggtaatgggaagacctacaggactagatggggttgcagacccattataccatgtataccatcaggggccacagctcactgtcttggatgttgtaaccacattttcacccacctgtaatttttttgtagtgattttacatttttatactcttttcagttcctatatgtctaagaccgtaatatggttcagttgttaactctttgaaagacaacaaggagaaggaaatctttgcattttgaggctgattttttttaactggataatgcaaatgtgatgacctcatcctgcctccccgcaaagatgcctgtcatgtgaagcgttatagcttcatatcgatccctctgaaagaaagctgtgcattgttccatctggggtattagtcttataaattgtggaagtagtgccagtcatggactgtggctatcctgtgtcccctacaggtggagaaggtgaagcgggggcaacgaacagcaacttctcttcctgttgtgaacttcgggtcccctctgagaagatgtgagttttctggaggcattcctaagagaccatcttctcctgtgatatccaagtaagcatctctcccctttgccagacagtctgactgtcatgagtcagtttgctagggctttgtgccatccagtgttgcagctcctgctcccccgtgaggcgtggccagccagaagtggtaagtgggagaaatgctggccttggagttacgtggcttgactctctgtgtatcttctgggtgaaagatcctttgctaagggaccccagtgcgtaacagggcttttatttaccaagatgatgcattcagcattttctctttaggtccatgaattccattctgcttttctggtattctttttccagttgcatttggatttaagtgattgcattgggcttgggctcctcctgacattctcccccaccttgttgtctctctctttaatagagagacaataataacttgtcagccatgatcaacagtattttaatgaagcaaatatatatgtgtgtgtgtttttaagaaatggggtcttgttgggttgcccaggcctggagtacagtgactgttcacaggcataatcacagcacgctatagcctccaactcctgggctcaagtgatccccccgcctcagactcccaagtagctgggaccactatgcccatgcaccataacaccaccatgcctaatttttgttaggaactaggtaaactcaccaaggaaaccatgtaactgaaaaatttacaataactttgtgaccaccaaggtcttaagtcattaaaatattttactgacagtaactgacaaaagactcagtaaataactcagtccagtaggacagtggaaaccatctttagtaggacagagaaagaaagagaaatatgatttaatttgggaatataggaaagtttttatatggagagaatcatataaaccttattcagtgtatcagtttagttcagagaatgttggataaacacaagtttaatgaaaacttgcgaatttgtcaaaaatatttaaagatgacatcagctcttaaatttccaatgtgttgctttctaatagagactttttcactactattaataattttttttagagatcactatggttttgatacactactaatacctgccattgatgtgtttgtcctccataaggaaaatctttccatagcacatcactgaattaaaagcctacttttctttctttctttatttttagttcattgcaacctttctgtgctagtattgcccatctttggttatggtgttgttatcctaccacctctttaaatttattatgtggactctacgatccgtttccctctgtcttatatctgagcctttttcagcttccacccatgcatcattactctggtgttaattttggacatttgcattaacagaaagaaaagcctagtttacgctgagacttttacaggctccaccctctctctgtcttgctggaatttggactcatggtccctgcagggatactagcttgcaagtttcatcattattattgtaaatggtagtatcttctatagaaatgagaattataggtatacctagttttgttgtactttgcacttcgcaaatactggttttttttgttgttgttgttgtttgttttacaaattgaaggtttgtggcaaccctgcattgagcatgtctgtcgatgccatttttccaatagtgtgtgctcacttcttgtctctgtgtcacattttggcaattctcaaaatatccaaacttcattattattattatatccattatggtgatctgtgatcaatgatctttgatgttactgttataattgttttggggtgccatgaattgcacccatataagatgacaaacttaatgtgtgtgttctgacagctccactgacaggccattcccccatctccctctccttggatctgtctacaccctgagacagagtaatattgaaatgaggccaattgataacccaacaatggcctcttagtgtccaagtaaaaggaagtgccacagatctctccctttaaatcaaaagctagaaatgattgagctcagtgaggaaggcacatcaaatctgacatgggctgaaggctaggcctctggcaccagttagccaagtcatgaatgcaaaggaaaagttattgaaggaaattaaaagtgctactccagtgaacacacaaaccataagaaagggaaacagcctgtgttagtcagggttctccagagggacagaactaataggatagatgtatatataaaggggagtttattaaggagtattaactcacacgatcacaaggtaaagtcccacaatagaccatctgcaagctgaggagcaaggaagccagtccgagtcccaaaacctcaaaagtagggaagccgacagtgcagcctttagtctgtggtcgaaggtccaagagtccaaaagctgaagaacttagagtccagtgtttgagggcaggaagcacccagcatgggagaagtaggccagaagactaagccagtctagtcgtccttccacactcttccacctgctttttttttttttttttttttttgagatggagtcttgctctgtcaccaggctggagtgcagtggcgcaatctcggctcactgcaacctctgcctcccaggttcaagcgattcccctgcctcagcctcccgagtagctgggattacaggcatgcactaccatgcccagctaattttttatattttagtagagacggggtttcaccacattggccaggatggtctccatctcctgaccttgtgatccgcccaccttggcctcccaaagtgctgggattacaggtgtgagccaccttcacctgcttttatcctagccatgctggcagctgattagatggtacccacccagattgagggtgggtctgcctcttccagtccactgactcaaatgttaatcttcttggcaacaccctcacagacacacccaggaacaatactttgcatccttcaatccaatccagttgaaactcaatattaaccatcacaagtccacctcttgtcgacttgaacccatacacatctcctgagatcatacataatcttcaaataaagacaaataataaggtcgtaattacgcctatccttcctacaactggaagcataccaatccccaacccaaatgctattacataaagttaacacttaaatgctgatatgacatcaataaatcttatgtcacatgataaaggaaagagaaaggaaatgacaatagtttcttcatccaccatgaaggtggataaggcattccatgggtccacagatggtagtcttggcagaagcattgcatgcaggatagacaaacctatatccagagtaagggtatacatgcacaaacatgttcttaacaaaataaggaagaaatactcatgcaattacagtcctcgtttctgcaactggtcctgtgatcgtagctggtactgatgactcccttcttctactacccattctgtattctctttgccttcagcaaacacctcagcaggtcgttgtcttttacctggtggagtgacccaaagtttcactcctgaagggtctgggccatttgtagtcctgccaggattgggctcttgtagttttccattgaccttaatcacagggcatggtaaaactaagagatgccctaagggatctcctgtattccacgcatactctttcttacctccattgtggagtagtaaactgatttcatcttgatagtctgggtcaatcaccccagtcaacactaactgtcttcttagcctgttgagttagaggtaggaggagcttaaagtgtccagggggcaatctttgttgtatctcctggtggcagcattcctccctctggaactaagacctctaggccagcagaacgtaatgttgcgggaacaggaagcaaaaattttgctaatgggtcactaggggtgatggtgagtggtgccacttccatttccaccccttgattcctggacccgtgaatcctggctgtgggagaaacagtaccatgtataggacgttgattcagaacatacacagccttgtgaagaactttgccccagccttgcaaagtattgttacctaattggcattgtaattgtgacttcaaaaggccattccactgttctatcaatccagctgcttcaagataatggggaatatgttaagaccagtgaattccatgagcatgagcccactgctgcacttctttagccgtaaagtgagtgccttgttcagaggcaatgctatgtggaataccatgaaggtggataaggcattccatgggtctacagacagtagtcttggcagaagcattgcgtgcaggatagacaaacctatatccagagtaagtatctattccagcgagtacaaactgctgcccttttcatgatggaagaggtccagtataatcaacctgccaccaagtagttggctgatcaccttgaggaatggtgcatatcgagggctcagagttggtctctgctgctggcagattgggcactcagcagtggccgtagctaggtcagccttggtgagtggaaatctgtgttgctgagcccatgtgtaacctctatccctgccaccgtggccactttgttcatggacccattgtgcaatgacagaggtggctggggaaagaggctgagtggtgtccacagaacgagtcatcctatccacttgattattaaaatcctcctctactgaggtcacccgttggtgagcattcacatgggatacaaatgtcctcagtttttgaccactcagagaggtccatccacatatctcttccccaaatttctttgtcaccaattttccaatcatgcttcttccaagtccctaaccgtccagccaaaccattggctacagcccatgaatcagtatataatcacatatctgaccatttctccttccaagtaaagcgcataaccaggtgcagtgctcggagttgtgcccactgggaagatttcccttcaccactgtccttcaggaatgtcccagaaaggggctgtagtgccgtagctgtccactttcaggtggtgcctgcatatcatccacagccatctgtaaatcaggccctagtcttctcttcctctgtcaactgatcatagggaaccgcccaccaccacccatgaggccatcggtgcgggctgggggagagaaggcagggtgacagggcatttgagccacttcctcatgtaatttgcttgtgccctcaggacctgctcgagcccgatcatgtatataccatttccacttgatgatagaatgctgctgtgcacaccccactttatggctagataggtcagaaagcacccagttcatgataggcagttcagatcacaaggaatggcttccttgctcctcagcttgcagatggcctattgtgggacttcaccttgtggttgtgagtcagtactccttaataaactcccctttatatatacatctatcctattacttctgtccctctagaagtattttggtaccaggagtagttctagaggaacagaatattaaggatggagttctttcgttggttttggggtttctggagttggcttctcagaagcaaggtcacaactggctcactggctctgtgctgcttctttgaagttgaaaatccttttttttttttttttttttttgagatggagtctcacactgtcacccaggctggagtgcagtggtgcgatctcagctcactgcaacctctgcctccagggttcaagtgattctcctgcctcagcctcccaagtagctgggattacaggggtgcgccaccacgcccggctaatttttgtatgtttcgtagagatggggtttcaccatgttggccaggctggtctcgaattcctgacctcgtgatccgcccaccttggcctcccaaagtgctgggattacaggcatgagccaccgcgcctggccgaaaatctttttttaaaaaacttttattttagtttcaggggcacatgtgcaggtttgttctatagatgaattgtgtgtcacaggccaggcgcggtggctcacacctatagtcccagcactttgagaggccaaggtgggtggatcacaaggtcaggtgtttgagaccagcctggccaacatagtgaaaccccgtctctacaaaaaatacaaaaaattagccaggcgtggtggcacgcacctgtaatcccagctactcgggaggctgaggcaggagaatcgcttgaacccgggaggcggaggttgcagtgagctgagatcgcgccacttccagcccaggcaacagtgcaagactccgtctcaaaaaataaaaaataaaataaattgcctgtcacaggggtttggtgtacatattattttgccacccaggtaataagcatagtacccagtgggtagttttttgattctcaccctcctcccacgctccaccctcaagtaggccccaatatctgttgttcccttcttcacgtgcaagtgtactcattgtttagctcccattaataagtgagaatatacagtgtctggttttctgtttctgcattagttcacttagaataatgtgaagtcgaaaatgttgaagaagattgtgtttctagaactattttatacacacacacacacacacacacacacacacacatatatattttttttgagacggagtcttgctctgtcgcccaggctggagtgcaacggtgcaatctcggcccactgcaacctctgcctcccaggttcaagcgattctcctgcctcagcctcccaaatagctgggactactggtgcgcgccaccacacccacctaattttttgtggggtttttttgtttttgtttttgtttttagtagagatggggtttcaccatgttagccaggatggtctcaatctcctgaccttgtgatatgcctgcctcagcctcccaaagtgctgagattacaggtgtgagcaaccacgcctggccaactattttatattttaaaggacacatcatctgagttttgtaaaagctgtccctgatcaaagggacttggttaaaattccagacttttttatgcagtttaatttagagaaaaaaaatttaatttccactctgtctagaacactagtaggcacatagtaggtgctataaatatttgtggaatgaatgaatgcaggtcactatgcccagtgcctcagagaatccccaaatgagtgagaacagtccctatttcaaggaacctccagcaaggtgcggggagccttgtacacagttgagcacagtacaggccctaatccaaagagccgcccatctgctcaggactctgctcagccatcatcctctccatagccagccaaagctgaattcacccccttctctgtgttgacagagcatcatgtgcagccctctttcattcactcacttaacatccagccctcttctaagggctgaggatgcaaaagtccctaccctcctggagcttatgtgacagtgaacagcatggataagatcaggtggcgataagcactatggaaaaaaaattaaaccggttcagatgacagaggggtggaagggagtagctggataaggtggtcaggaaaggattctctgagaaggtgacattatagcagagccatgcaggaaactagggcataggcggggttggtctatgcctcattgcttggtgttagtattttatacttagcaatctcctgctagactgctatgaggttgggaactgtcttgatttattgttgcacagtaggtgctcagtatgtgtgtgtgttagtctgtttggctgctaaactgactggcttataaacaacagagatgtatttctcacagttccggaggctgggaagtccatgatcaaggtatggccagagtcagtgtcaattgagggcccatttcttgattcatgaacaaccatcttctcagtgtgtcctcacatgatggaaggggcgcaagggagctctctggggtctcttttataagggcactgatgccattcaggaggattccaccttcatgacctaatcacctcccaaaggccccacctcctaataccaccaccatggggttagggtttcaactcacatgttttgaggagacagaaacattcagacatagcagtggtatgggatgcaactaagaagggaaggagaagctggggggcaagggcagggtcacctggcagatagggaaaatgttgagaccaaacctgctcaaggactttgccctttgttcactcctgagctcaaatgacccacctgcccctgcctcccaaagtgctcaggttacaggtgcgagccactgcacctggccagttatatcattctgtttttttttttttttttttttttttttggagacagggtctcactctgtcgcccagtctggagtgcagtggctcagtctctgctcacagcaacctttgcctggcaggttcaagcaattttcctgcctcagcctcccaaatagctgggattacaggcatgcaccaccacgtctggctaatttttgtatatttagtagagacagggtttcactatattggccaggccggttttgaactcctgacctcaagtgatccacccgccttggcctcccaaagtgctgtgattacaggtgtgagccaccgcgcccggccatttatatcattctttataccttacaagttttgtaaatattctcttgcatactcattgttggaaaaacataataaaaaagacttacttgatttttagaatgatgccacacacaaaacaaacccccaccaaaactggtatttttgacattccttctgtgcagaccaagtgtgtgatttttaaaacgcactggaaatgatgtggctttgaaaaggggcttaattagccctatgaactcacccatccagaatcccaggcaggtcatgtgattaatgataccttttcctgtgacctcctaagctctgacagtgcattgttctcctgcctgatgtcagataaactaagccactgttgggtggctgtgcatgttaatagcattgctcttttaagcgttcaagtttatttttattgttttcatcattgggtacttgcatgggttttagaaaactagattcaacaacactctgaaagacatagatggagcatagctttgttcccataacctagagaaaagaaatccagtgtggccaagtggatttgtccagcccatctctacctcttgagtgttgatgctgcctgtacttccaggtcttcagtgtgaaatattctctaatggttttatattcttagaaatatattctaagtcagtttggtcattacgataggtaatatttcagctatctattactgctgttacaaagcccccaaaattgagttgcttaaacagtaatttattattcattttcacagttctgtgacttgggcttactgggaggttctctctttggatcttttgtgcagttgctctgtgggttgacttgggttactcagggtcttccatgccattgcagtccagtgttgactggagctgcagttacctagagctcagatgagctgaaggttcaagatgggccattttcctacctggcagttgatgatggctattggctgggagctcagctgagtctgtcaaaccagagtgcctactatggcttctctgtatggcttaggcttctcacagtgactgggttccaacaagaaatggccccaagattgagcatcttttgggtcaggaagcggaagctgtcaggccagtgaaggactatgctctcaattggcacagccttacttgtctgctgtattttataggtcaaagcagtcgggccaacctagattcaatgggatggagagataaactcaaaagataagatcttgtgggatgggagatattattgtggccaactttggaaaattcagtgtgccaaagataatcacttccagaggtagatcatagctgagatcagttttgtttcagggacctagtttaatttcactttatcatgtgttgaaaacaaaacatattccatatgagggaaaaaattaggataaaggtgtctggatggcccaaaacaagtacctcccactttactccaaatcacaggcccgtggaaggctccctcccagacccaggctatccctttggtggctgaggacatttaatggatcctggccaagtgcccttcccataagcttctctgggagatgtgtggcttggttatcctctcccacagataagcatctacagcacactaggctcccacaagggcgacttaactgctgtttttgccaccacatcattctctagtaggcttttacattcttacctgaaattcttcctgaagagggtaattgaaaatgtcaagtgatgtcccctccttgcagccatatctatatactcactcagtcctgtatttttgagtcttatcagaggatcatttgaatttagaccaattttttcagcttttaaatttcgaaatcatttcaaccttgcaaaagaatcacaagactagaacacagaactctttcttccccaccttttatcctgtattaatgtgtagccacatttctgtcatccttcccatcccctatcaccctcactcagtcttgcacagtctctcacattcatcctccatagatgcacacacagacatacatacccagatttctcccagaaccgtttgagagtaacttgcagacatcatacccctttgcccctaagaacgaagacattattttccattgttatggaaatcagaaagtttaacttggtactgttacttaatttctaatgtatgtgcaacttttgccaggtgtcccagtaagattctgggtttttttgagacagactcttgctctgtggcccatgctggagtgccgtgctgtgatctcggcttactgcaacctccgcctcccaggttcaagtgattctcctgcctcagcctcccgagtagctgggattacaggggcacaccaccatacctggctaatttttgtgtttttattagagatggggtttcaccatgttggccaggctggtctcaaactcctgacctcaagtgatctgcctgcctcgccctctcctttgtactgggagtacaggcatgagccaccaggtctggcccaataagattttttatatcattttttttttcatggtccagggtccaacccagggtcccacattgcatttaattgtctcaccttcttagtcttctttcaactgaaacagttcctcagccattctttttcctgaccttgacattattttattttattttattttattttattttattttattttattttatttttcgagatggtgactccctctgtcactgaggctggagtgcagtggtgcaatctcggctcactgcaacctccgcctcccgggttcaagtgattctcctgcctcagcctcccgagtagctgggactacaggcacatgccaccacacccggctaattttttgtatttttagtagagacggggtttcaccatgttagccaggatggtctcgatctcctgacctcgtgatccacccgcctcagcctcccaaagtgctgggattacaggcgtgagccactgcacccggctgaccttgacatttttaaagaatataggctagtcgtcttgaggactgccttcagtttggataggcctgacgtttcctctgattgcattcaggttgtgttctttgggcaggaatctcgtggcagaggtgttgggtccttctcagtacctcttatcaggaggctatgatgtcagtttgtttaattactggtgatattaactttgattactggattaaggtggtgttcccaggtttctccggtataaaactgctgctctttcttatctaggaagtaacaaacttttctgaatgttggctgagctgtgctgatgaagccaagacccctcccatgcagtgagtgggccgtgttcactcactgtgcatggagtcaagtggttttggagaacatggaactagattccaagattggaggaaaaaagtcttttgggggttccactttgcagtcaactcacattcagaggcatgacaaccctctccagagagttattcttgccactgtgtttacagaggtgtttgttcgtattttctgccagtcatggaacctaaaaggttatatcatactgccttatgttcctagaaggtctagtttaccatcctaaacacaccttgtgaatcccctttgttatatttttattggaccttaaaaaattaaagtggaagagctaaaaaagtgagacaatgaacaaatgccttgagtgccagccctggtactcttgtctgtttgcatttctttgggaaaggttgtttaaactcttaggactttggttttcttctgtaaaatatggttaatagcaatttcctacgtacctcactggattactgtggcaatcaaatagacccttgttaaatagatgagaaggtacttcagaataaacctccatacaagcacagtgagttcccctaattaattcatatttcttaaatcagccaaaatacctatttccaggaaattgaaaaatagcttgccagactttctttggctttcagcaatgtgagcagggctggccagagagccgtgcagtctgacataccagccttgtggtttagtttcttccggatacctgtgcttagcacttttgcagggcagctgacagggtacaaagtccatgtaagcaagtggcaaagcaggatgagcaggaaacttgacagattgtagataacattgggaacttcttttttttaattctgtattttgttcactcactgtaaaaaaaaaaaaaatctatgacttgcccacacttttctaatttgaaggtcatgtttgtgtgtgcatacaagtgtgtgtgttttctaacttactctgtttattgggcaggggctggggtcggggactgtaaacagacttcttaatgagctttatcccaaagaatccacccttacttctcaggtagaagttatttttaaatgtgtgctcatgggtaattggtccagttttatttagaatggaacctcgcagtctgtggcgtgaactgaacctacatgtgaccattctcttaaaacaagcaaggctgttcagggctatgccaacttgaggctgtcagaacctcccccacctaggccaccctggccttttctccctaggattaggatcttgtcctgcatttccatttacttagatgggtctgacatagccaacaggctcctgccacactgactgagtgtgtgagccatttaagcagacacagaggttgtgctggaactcagatgctggctatggctgctgaggctgcagccagttcaggcctcccacccactccccccagtccagccctggagacccttgtggtcggagtcatgtctgcaggaaggcttcttgtctgcctacccattcatgggcagaagtgccagcacacttcagggacccccgaagcagagcccaactctttctatactgcttagagaagcccagagtgtgggctcgcaggccagttccagggagagaacaagaacaggcagggttgtgcacacccagcagctttgctcattctcaccaatcagagaaatcgtacctcattccacggggaggagggtgagggcaagcaagaagatcaggtgagatttgccaggccttccaatgccagaaagtcctcctcaacaggtcaaggtaggaatgcttatgggatgagaaagtgtttccatctgttatcatctaccacgagatagtctttcctacagcctctatcgccaagtttcaaatccactccctgcccttgtactgttgttggatcaaaggacacatatcattcacgtgacaatccagtggagagataatgtgctttgatcttggcaaggcactagaccaagtcttttgagacaccctcgtggtggttgggtggcgggtatacagctctactgtgggcgccactcaccttagataacagcgtgaaaggaagacgtggccaagcaaaagaccaccagctgtatctttatacatattaactgagactaaatgcaggctcagctaatgtgtacagttagtacacattgtgtaactcattggaaaaccatgctcaatggagcactgtcagtgtgagcaagcaggacatgggctcccctgttattacagttcatcttcctggttttggttcattcttgtctgtgaggattatttggatttttagtttatcatctaattgatcaacaccaatacctaacagctattgagtgcctactctatgccagttctataaagaacatcttggggtcttggtgaccccaaactcagacttagctgcgctggcaacacaggaagtagagcagagctgtaagaaggctctgtggcttagttcactgtgggaagccatttcacctctctaagcctagttttctcatctgtaaagaggccatgataatagtacctgtgtcataccatttacacacatatgtacacaaatatgtgtctgtagacatttagcagcctagtggctggtgtgtagacagcactcagtaaacatggacacaactgcagagagtgtgaatggaggtctgagctccaaatggccagggtaaggacctggtctgactgtgtcagaacacatgaggactcaacgtgctgaatcgtagaggcactcacacattacctctcaagccaaggctctcaggagcctcaaggtcaccatggggattggacactacccctccaagcagaacagctccactcttacctactgggtacagacagagtgtgtgtgcatctgtctctgtctctgtctgtctctgtctctctctctctctctctctctctctctctctccccccgccttctctctccctctctccctctctttctctctccctctctccctctctttctctctccctctctccctccccgccctaccccatgtctcagggattctcagttgagggagatcttgtccctaaggggacgtttagcaatgtctgaaggcatttttggttgtcataacctgcgtggggagcggactgctgctggcatctagtgaatggaggccagggatgctgctaaacatcccacagtgcccaggacaaccccacaacaaagcactatccagccccaaatgtcagtgatgccaggttgaggaagcctgctctgcgggcgtatatgtatggcggggcagggggattctctgcatggcttttatttggtaaaagtctaggaaaaaatagaagatcagcgttatatagtgtacctggaaaaaaccacctgattgctaagcactctgaaaaaccacatcccttaggagaacccgagtgtggggcctgagcccaaggccagaggggagaatagtctgcagagagtcgaagcaccatccacaaagacaaggtgtcttgggagttctgagttgctccaggcctaatggcatgaggacacagggaagccacttggccaatatgaaagtccacatgccacttgaggattcttttctccttcaagaccaagtttaatattgatctgatcatatttccccttattagcaggatctgatttggtaactctaagcctctggtgaaaaatcgtctttgaatatcagggtgatttgccatttttattgctgtttttatagatcaaaaaagtcagatattagcaattcatggttcaacctgctgaggattgagggtgatgacttgtaatttctgtatacattactttatatccttcctagaggaactctgtacaaatgcccacatccctgttcaaacctctagggaaactgggcatctcaagctaagctgttacccctgtcctgaacaagcagcactcaccaggagcccagcctaggctggcgtacctgtaacggaccctttcccagcagacataagacgagctcctgtgttttaaccaagtggcttgtcctcaccttttgcatctgcccagttgggagaagagagattcttttaaacctgagaccctccaaaaaacaccccccatccccatctcttggctgtgttccttggcatttaaaaagaaatggggaaccttgaagacttgctaagtaaaataagccagacataaaaggacaaatactgtgtcattccatttatacgagtcacctggaagaggcacattcacagagacaggaagtagaagggtgattgccaggggctgaggggaggggaatggagagttgaacgccactgaactgtacacttaaaaatggttaaaatggtaaatttggtgttatatatgttttgtcacaatttttttaaaaggagccagcatgttcattgccatatgctgaaaccagattcaaccctgatgttcacctaaaaagagggagtagggaagtgcctaatactccatctttacattgtcatgaaacctaagtgagattaggacatggcatcatcagctgggcttcttaaaatgtttccctttccaccagggccgtcttagagagaccgtatattcctgttgggctgagagcactttagtgacttttgagtgtgtgctaagccctattttccttcctctggaaggatgaaattgttcagcttgttggaactaggtgtcttaggaacagagagctctgtgttcaggcccagtaatcatcctctggcatattttttgttttccaggacagctactaaagcttatccacagtctccaaagacaacgaaacctccctacccagggtctcctgtgaagtaccgcttacctgccctttctggccaagacatgcccaagaggaaagcggagaaagagaagagcaacaaggaaagggaaggtaccttggctcagcaggctgctggcccgcaaggagaggaagccctagagaagcatgtagtggacaagcatgccagcgagaagcatgctgctgccgcaggagggaaagccgaaaacagcgcaggtagatgctgccaccgtgccttggctttcccaagacggttctcctcagacccaatccacgtgccattctctcatgttttggggagggaaagggatttttctctggggacaagtgcatcccctcgtgcagctttcttgggtttgcacgttgctcctgagttctttccttcagtcttctgagggtcccctggaggaaatctagaggctgactccactcatggctgtggaagctcacggggatgctgagtaaaacaggcctgcatctgcacctcacgcaaaagaagatcttcctttagactttcaggcttctatgatgcagtgagttcacccagatggtggctgctgtggcacttgctagtgaccttgtctttcctcctcatgtttctattgtcttccactgtaaaatgcgtccagggttccagccagcccatgacagcttctcttgcttggtggtcgattgtgctagtctggacggcatttcccatcaccacactgggttggattttttttcacttccaactggcagctgctgtgtgagtggaatcattatattcgtttcccttgatcttttcctcttgatgcctctcctctggtgcagccttggggaagcccacagcaggcaccactgatgcaggagaggctgcgaagatcttggctgaaaagagaagacaggcccggctgcagaaggaacaggaggagcaagaacgactggagaaggaagaacaagataggtatgctagtgctcagaatttcggtgtgatctcatgtaactgttgtgttggaaagagcagcttgcctttctttttacagcgttggtattgataaaacttgaacagaagtatgggaacctagaatgtctgaactacatggaaggtgttcaggagactgagtcttatattagatgtaattattaataacaatggaactttgttcttttcggaggacctggaaactcatagctcttggatctaaatggcacaggcatcttcccattctcctcttggactttggggccaggcaggcctcctagagctatcagggaagtctgaactttgtttaaaaaatgagattctccctgggaaaacaagaggttcaagattctggttttggtcttgattctgatttccaaattgtttcctccgtcaaattatcctaactcacaccccaaagtgagagacagaggggagggttgagcagtgtcccctaggcatagggttgtgtgtaggggcaaccgcatagtctaagaacagtgaggtatggggagtcccatctgggagcaagacaaaagacatcattgcagtggtccctacaccttgaagagcatcagaatcatccggggaatgcagtaaaaacacatggactcagccctgttctgttttagtagcttgccagggtttgagaaccactgtgatgttagtaccagggtactttgtcacaatacagacagaccttccttttctgatctttttatttagagaggaaagcatgttgaaggacaaggtcgattttatcattaaattgataaaggaagccgttaggctcatcacagagtacaatccaatactgtttagagaattatcatgacaggaagcaggcaatgctgtagcacttcaaggccagcaccgaatttagagtaataaataatagaatattattgatcctttagtgaccttggtaagtctttgtggtctctgattacaggtttgctgatctattttttaaaagggacagtggggtaggtctcgacagtcccttcttgaaatttgggacttctttgattgttttcctgtttccaacattttggtcaatacagacgtgttttgtttgtttgtttgtttgttttgtcgagtggcatgtttgggctggtttgggtgggccttaaggtgtgtgaagggaggtcacaagagataaagatgaatcacaggacctcagatgacaggccttgataattgcaggccatggagataccatgtaggctctgagctggtgagtaacatgatcgtagtcgtgtgctaaagaaggtgatgttctttactttccagctaccaccgtctgtatctcccattttcttcacagcccagctcctgaaagacttgattgaacattctgtctttattttctcaactcacattcagtcttcaaacctcacacctaccactcctcctcgttgcctaactactaatcagtttcttggttggctttggccttgtcaagcttgcccttgcttctctggcctctccttcatagcctcctctgtctgcccctcatccccttaaatgttgcctgggctttcagcccttagtcctggaccagcttctctcccaacaagctctcccgaacagcactgctcccgcctgttctgccagtgtccctgccatcctgccagtttcctatggcgtcaaaagatttagggcccacattttacacaacagctttctgttgagcctttgttgtgctaaaccagctctgctctcatctcacttcccaccttcattttccctttgtcttgttttattgtccgtttctgaagctaactgcagcttgctttctaaaccttccatactttctggaacaagggaggcactaataacacatgtgtactgatgactcctaaaactatgcctgtggcccaagctctgtctagggctgcattgtccactatcagaccctctaggcacatgtggccaccaaaatatacattcagtaaaattcatttccccagccacacccgccacatttccgtgctcaagagctgcatctgagtagatgtggatccacaccacattgggcagcacaaatctatagattgttttcctactcaacagaaggttctattggatagcactggtctagaacctagagactgtatttccagctgcaataagttttcgtttgagtgtgtcccatatacatctcaaatccagcatttccaaagcagaacttagtattttttccccaaacttcccttctctttcatgagctctgtgttcccatctcctcagacacccaagtgaaaagtctcagtgctactctcagctctttcctttccttcttcttcccaatggttgtcaggtccagtcttcatcagctgtcacattggcatctctgttctctcccttcccttcccgtccctcctctccttcctcagctccagcccccatcgcttctcacctggactgtatctgttatatcccaactgagctccctgctctaggtctcctagagtttgtcccctgtccacgctgggcccacactgacctttctcaaataaatgtgattgttctcctgtcctttaacaagccagtgactcccctgcccactggatccacccgaacctgtcaacaggccttcaaggcctgccgtgaactgaccactacctgcctcttactccttgctttcctccagacaccagtgtgcaaagctccctgacattcacccatcacacggctccacacctccaaagctgtgcttttactttgcccccacgtggacttgtgctccttcctgccagacacctcttcatttctcaaaatgcaggtcaagtcttgctccctccctgtaccttttctggccctgtgcctgggacagaactgaccaccccccactcttcacccatactgagcccagctgttcagttgactaacatagcttcatttgtttacaggcctcctttccccagttagcaccttaaaaggctgggacatagtctttggatcactggtgcctggcgctcagtaaatgtacaagaaaggaacagaaggaggaagaatcctgactaagaaaccatcgtagtagtaggttaagagaacagaagggctaaagtagtatggtgaaggcagacatgcaaaagccagtctctgtggacttacacaatgccaaagaaatgggcagatttgaagttgatgctgaggtttgattctaaggtcttaggagaatggtacacccaataacaggtaaagaaaggacataaggaattggttttaaaagataaaaattattcatttgattttaggtgaggttatggtgtctacagtacgtccagatgattggagatggaattgaaggttgggggtgtaggtaaaaattagagcaatacactcgaccccaaatgagttttcctctctcttgccagaatgtgaagctttgcatagtgccacgtgggaggtgaggagtgaggaaggaaagtaccagacaacctggggctggaacacagcggccacctcttggaataagatcatcctcacatctgttttatgtttacagttaatagttaaagccacagaaatgttgccagataaaataatttagagaaaaataaagttacttgagtcaaaccgtggaaagcccaattattgtcacaaactggtaagggaaacaccatccaagtcaaggatgggggaaccagaacagaagggccaaccaggagtccagacaagcaggccctaagcagaagaacaaaagttggtccattcccaaacacaacagggcccagcccccaggctgtggatggcccaagatataaagtgagattcttagaggtggggcaggaaaccttagacgccgggtccaccctggggaaggcactggcaggaactagtaagcaggagatcttaatgggattcctagacggatcactttaagtcatgttaaaaagctaaaatagctactaggggttcacatgaaagaatattccagccagacgcaatggcttgtacctgtagtcccagctacttgaaaggctgaggtgggaggatcactagaggccaggagttcgagttgagcctgggcaacgtagagagaccccatctttttaaaaaattgaaggaaagagaatattccagttagacagctccctacgagcaaggtcacgtaggcaggctaaagtttcttgtcgaagcaagagttagcccaggccaggaaccacaggcagaggtcttcgaggctgctcagacctggctttttgctgctgagcctacaggtggcaggtggttttggtgagagctagggcaggtgggggcacatgcgatgtggggcagcaggatgtagcagcagctgaggcaggaagggaaagccaagagaggtaggagagagccagggtcatgcagccttatgtagcacagggctgtagggagagccacatgggcaggacttttgataagacataggcttatcaaagacgaaggctgttggtcttgggatttaggagatgaaaagagattttggagggaaattgttgagaagtaggatagagacaaagcagcctgaagagatgagtggatacaggcccagaatataagctggctgttaagcagtcatgaatgagaagcagctgagagaggactgaggagggttgcttgtgattcccgagacatgagcatttttccagggcatggaaaacatgcatgcagaaggttgaaactgacaaatgaagggaagaggggctagtgggagggacacatagctgtggaggatgtggaattcacagcacaagtggtggcatttccatctaagcagaggaacaaatggggacatttctgagcagtaatgtcatagaggagagtttaagaagctcagatcaggtggcctcagtcttctctgtatagcagttggtgataagcatcaactaaggaagatgacgaagattgagaaaagtggtaattgggactgtgtccataagggatccaggggatgaggattaaaaggccggaatgcaattgccagcaggcagataaccagccagcctcgtttacacctctctctaaccagtgattggcagcccaggagtggtcctggaaaccacccaagcctggagttgggcagcagagtgacctccatgccatctctgaaatgctcacaagggtacctaaggcctggggaacactgagagagagggaagcagacgcaagtagactgcacagcgctaaccagggcaggtcaggagagaaaaaggcagaaggatggggtgtgatcagatcaaagaagattaatgttgaaggttaggcttgttttaaaatgaaaacttttaagcacgtaagaatagagaccagtgaaacccacatactcgtccctcagattgaacaattcaagtttaagtttgtgtcagtgacatgaggaaggttaacagggagcgacagaaaagggggcgaggtgctggagtttccaacagacaggagccaatatatgaagatcctcctcaaatggccagtgacagggacaagggatgatgcatccactgaatgccaaatgatgacagtaatgcacagttttctggtactttgtacatagtgaggaaagggagagggacttgggtgaatgacaagaacaaggatggagagggtgacaggactacacacagggccaggcactggctcacacctgtaatcccagtgctttgggagaatggggtgggcggatcacttgagcccaggagtttgagaccagcctgggcaacaaaatgagacctgtctctattaaaaaaaaattcaaaaatgatccaggcatggtggcactcacccgtggtcctggctacttgggagctgaggtgggaggatcgcttgagcctgagaggttggggctgcagtaagctgtgatggcagcactgcactccaacttgggcaacagcacgaaaccctgcctctacaaagaaaaaaaaaaaaggactacacacagagctgatgaactttggaggtttagtaatgacggcaagggcggtaggctcggggtagcccacggcagagggcggtggggaaaatgatgaaatctaatgtgctgtctggttctttgagcagagacagaaggaatgctcatcctcggagaggattgtgagggacctggtttcacacaggggaagccagggttgtttgttttgttgaattttacctactttagggaagcaaagtgtggttaagggagagaacttggtatataagaggatgaaggggctgggcacagtggctcaaacctgtaatcccagcactttgggaggccaaggcaggcagatcacttgaggtcaggagttcgagaccagcctggccaacatggtgaaaccccatctctactaaaactacaaaaattagctgggcatagcggcgcatgcctgtagtcccggctacttgggaggctgaggcacaagaatcacttgaacccaggaggcagaggttgtagtgagccaagatcacaccactgtactccagcctgggcaacagagtgagactccatctcaaaaaaaaaaaaaaaaaaaaggacaagatttccctggaggtgctatggaaaggacaagcggggtctcatgggcttgtggggatttatattttgggtgataatgaggattatggaggttcaggggccataaggatgttcttacatgtgtgcatctgggcacttctgaagtcctgatggtaaaaaacaagaaacagaggccaagtgcagcggctcatgcctataatcctagcactttgggaggccgaggcaggcagatcacctgaggtcaggagtttgagaccagcctgaccaacatggtgaaaccccgtctctactaaaaatacaaaattagccagacatggtggcgcatacctgtaatcccagctagttgggaggctgaggcaggagaatcacttgcacctgggaggcagaggttgtggtgagccaaggttgcaccattgcactccaacctgggcaacaacagtgaaacgccatcaaaaaaaaaaaaaaaaaaaagagaatggattttcaggtcctggagatgaagacggcaggtcctttatgaagtagcttatacattaattaatacacaatgtatcctttgtgtgttaacttctctgggacaatcataattggctcgttaataaagggtaagaaatgaaatggtacttcagttaacctttagatacatcttgttattaacacatccattttggataatcctgtgttggacatagtatttcattgaggaatctaagaaaatgggagcttctttctgataggttctataatgctcctctccagaatatctgttaataatttgagttgtttcacaatggtttataggcattgtgacctaatttagtgttatcacgtattgttacagtctcaggctaatatatttaagtatttgtttatctttcttttaaaatatttctttgaatgaataaacaaaatatttcctttggtcatacataggctgttagcctgcacaagttctgaagctgaccattaggatggatggatgctctttttaagtcttgacctttttataacaacagcatcccagtaagtcattggcacatgcttccaaatgaaggtaatttctaaaggacatacagatttataggtgcactttaaaggacattggggcttggagagaggattcattttaaattgtaaaacaaactaacgtttgagaaccttctagggccaggcattttcattctcacagtaaagccatagaacaatagtatagcttttcccattttttaaatgggcatcaagaacattgagtgactttccaggtgtcacacagtgagtggcataatcagagtacaatttgagtcatgcccatacatcacattgccagtgattacccaaggaaagtgacgtacatgtgaggaggaggaacattagaaaggttaaaacaagctcttggactttacaggattttcccttactgcttcgagctctttaccattacaccatgaaccattcatctgactgtggatgaaaatgtctaaatgccacttaattttcatatagcaaagaaagctaaaatagatttctaaagattgccaaaataaatggaaatagaggttttaatttattaaatgtcaagtttctgttgagcattttcttccatttgctgcttcataagtcacataccaattagaaccaaattggtatgactttttgagttcgtagtcactgctcttaaattgctgactggcacatttgtggccattgagacacttcccatttttcctagctttcattggttttaaatattctgcttaggttttaaaagaattgtcattcaataagaatgatggcttggctttctgtcaccgtggtcatttgttcattgactgaggagcatctgttttcaatacagtatgcgttacacatcaacacatcattcattgctgtattacagaatttaaagtcaagcctggttaatactttttggtaaatatatggaccagagtggatttccaggaaggatgaatcatgttattaaatgaatgctcgttgaaaggtatgtgtgtgtgttaccatgtggagcattattctcggctgtcagcacacagttctctggcagtttgcttttcgagcatgtcatcttctaacaacagttgtattctcaaaaggctggagagagaggaattgaaaagaaaggcagaggaggaaaggcttcgcctagaagaggaagcccgaaagcaggaagaagaaaggaagcggcaggaagaggaaaagaaaaaacaggaaggggaagagaaaagaaaggcaggcgaggaggccaagcggaaggctgaggaggagctgttgttgaaagaaaagcaagaacaagaaaaacaagagaaagccatgattgaaaagcaggtactgtatgagtcctcagatggactttacttgttttttaaggaccttgatagtaggtacaattagttaaatttcaatgactcataatgtttacttgaagtttcttcttaaactgtctgggctggttattaaatataagttggggcagttgcagtgaagttggtaatgtttgccatctgtgagttagggtttccccaaaggcaaaccctgggctaagaatttgagtgccagcagttttttttgcaagcgaatcccaggaagctggtagaggaataggagaaaagccaatgtaagtgcattgatgcatgtgttactgtgggtgactggaacacagtcccattgggaacctctgacagactgtggatcatgctttagaattgtccagctgagggatgaggaaactgaactacttatctaccacatcctgcccttcacggtagtagaaggtcactccctggggaattaactctctgatctggccacatgcacacttcatggcccaagcctgcccacagacacagaaaagccttggccatgtgtgagaactgtctgcaggtgatttgcatggtgagccaggggtatatgaatgaggtccaaccatgtttgctgtgtcatgcagtggtttgtataaatccacattgaatattggagcagcatccactttagggcagatgatgagatgaaggaacatgtgcaaagccagggaattaccacactgttttcttagcttattaaagctttgccttgatttacctgtttctgttagaaagaagcagcagaaacaaaggcccgggaggtagctgaacagatgcgtctcgagagagaacagattatgctgcagattgagcaggagagactggagagaaagaaggtaagggctgagggtcaggaagacctagggtaagtgaacaggaagtaaatccagttctcttctgcagtgattggatagaatgatcctaggattgtcagttaggtcaagttcattgataccactgttcaaatcttttatgtctttattagttttttgccatctcgttccatcagtgattgagaaagattgttaaaaactccatctgtagcgaggcatggtggctcacacctgtaatcccagcatttagggaggcagaggcgggaggatcacttgagcccagaagttccagaccagcttgagtaatacagtgaaaccctgtctctactaaaaatacaaaaaatagctgggtgtgatggcatgtgtctgtagtcccagctacgtaggaggttgaggtgggaagatgacctgaactcgggaagttaagcctgcagtgagccgagatcatgccactgcagtccagcctggggaacaggagtgagaccctgtcccaaataatagaaaaaagaataactccatctgtgattatggatttgtccatttttcctttcagttctgtcaggttttgttttatatatatttatcgtgatatgcctttgtctctagtgatatttcttgtcttaaagtctactttgacagccccctgccttttatttttttgagacagtctcactctattgcccatgctggagtgcagtggtgtgatctcggctcaccacaacctccacctcccaggttcaagcgattctcctgcctcagcctcccaactagctgggattacaggcgcacaccaccacacctggctaatttttgtatttttagtagagatgggatttcaccatgttggccaggctggtctcgaactcctggactcaagggatcctcctgcctcggccttccaaagtgctgggattatagacgtgagccactgtgcttggcctgacagcccttttatgattagtgtctgtatgtcaaatctttttcacccttctacttaaaacttcttctgtgtgtttttataagtaaagagcatatagccaggaattgttattttaattctgtttgacagtctttgtcttttaattggagtgtttagtccatttacactaactatacttatgggtaaaattgggtttaagcagactgattataaaggagtattctcatggtgtcctaggcccaacctgggctttgtattgctgtaggcctgggatccaggagaccagcctgtggccttctctcctgagatgcacctcagcctcagcctcactttctgtagggtggtgctctttaatggcaggtggtaatttgttgatttatacagagcctaaggagaagaaggagaaatatgggatataaatcgaatattgattctagatacgtactagttaacttctcaagcatttgaccttgtccatggggccggaggtgtacatctccaaaactagtggaaaacctttctatacttgttatcctcttctgacttttgccttttacaagttttctgagaaatgtgacattgcatgtaaaccaagctacttttatgtttttggtcttattgtcctcttacttgattttgttttttgttttttgtttttagagaatagatgaaatcatgaagagaacaaggaaaagtgatgtgtctccacaagtgaaggtaggaattcaaatgaccattttaatagtttatgtactaagtagaaaagaacagcagaatacactcagtgaaattgtaggtcttggcgacgattagccagaaaaaaatgcagttttcctgctttgttcctggctaggttaaggagggttaggtacctgaaaagaaagaggggcttcagaggtgggatgggtaagagatttccttagagtcatgggaggtgggatgaagagagaggcatagtagtccatgaataaaaaagagaatcctgacataaaaatacgtaagaataagggaaacacagctgaagatttaaagaattaccacagaacaggcagatggtccaggctcaaaatatcatcggatgcttttaaaaagtactttttttctgtgtgatgtcagccttccctcatttcattcaccttccatttgttttcagaaagaagaccccaaagtgggggtccagcctgctgtgtgtgtggaaaagaagacaaaactggttgtccccaacaaaatgggtgagtgtgacatctggttcttgggttcttccttttagtagcaaaagctcgtaagacttggtgtagggtaaacagacccatggatcccaagagggtgactgctggcaggggcctgtgcagtttcccttccctgggaatgtgtctccagcacagggactgtcagctccacttgggaacccactgggttccttggttactcccataatcccagcataggaggcactctggctgctggctcacagtgctttccagggagcttaactgctggtcaggttttattactgttaggacctgactctgctcttctccagaggttctgcacagacactgataatgtgatttgtcttctcttctcctgtgtgaaggtgattatatgggtttatttgtggctctttccacaaaagatgctgcagtatcagtgaagcagagcattaaattaattgccttgatctatatttctctgttactttatttagacattttatgattaacacaagggactttgtgttctcgatcagaaatcaatggattgaacacctgccaggaagttaatggtgtggatcacgctgccccagaaacttatccccaagacattttctctaatgggcttaagccagctgggggactcattcatctggatgcccttgatgggaaatcaaatagcctggatgattcaactgaagaagttcagtctatggatgtgaggtatattcatttcttttgcatttaagcctcatcacttctcgaaacactaccctttcttttagttggtttcttcgtcttttatacaaccaaatcacctaaagcaggtttgattgacattacaggaaagctctcagtggtataacattctagtgtcttgcgtcaggttccctagaagcagagcctggaacagagtttctagggcatgtgatttgttagaggaaagctcttgggagtttttcaggagaaaggggaaggagggaattcgctaagcaaggatgccttctcagctgaccccatgggagctctggaggatgaatttccaccagagacagttcctctgagcttctgcagttctggtttttctagattcttctctaagatctcacaaggaagaaaaagaagaacctggcagcagctttactctggctgttaagagattcctggtgacaggccctcagcccaccactcttcagagcctggatttgttcctttgctaggccttacagctggcgcaattatgaaactcctccttccatctctagggagaggaagagagagagagaaagaaaaccagccttggctgggctggagctggataagtcagagtggattggaagcctcactttagagaggaagcagagcgtgagattggctttgccagtgatgacgtgggctgtggtgggatcctttcattatgggccccccaaccttaactgagcacttcaggcgtttccacatgaactcttctcagcacgatcagattcacactcacaggagccctggcagagagaaacaattgttcccattttactggcgaagaaactgaggctgcaggaaggaaaagcaattcgcccaaggtggcactactagaaaggcagcactgggagccccactgttaattagggttcttcttcaacttgctttgaacttttggcattggctttctgtctgaatgtcccatttagaaagttctggaatgccttgcttctttgtggtagaatgctggtgcctgtgggtttttgtcctttcaccctttgggcaatgtgaccttggccatcacagccctgctcaatctgcttccctgttctcatacatggggcctcgtgtccaccatctgtcctcctcagatttgagcccacttgtattttttacagtgtgttacacaaaaactctgactctaaatccttcttctttagaagagtagtaaaacaaaatattgcaaatagaattaatatattgtgccatgttgtctgtctgtctctttctgcctctctccctctcgttcatctcttctagtcctgtttcaaaagaagagcttatctctatcccggaattttcaccagtgagtgaaatgattcctggggtgtctctggaccaaaatggaactggtaatgcccgagcacttcaagatctcttagatttcactggtcccccgacattccccaagagatccagtgaaaatctcagcctggacgactgtaacaaaaaccttatcgaaggatttaacagtcctggccaagaaactcctctcaacaccttctgttgacaaatacagcatccctttaataaaaggtacagtcttttgattatattctaacttcataaccctttaactggggtttgtgaagataggatgtatatcactcagcctcttggatggtcaaattttatttgaaaaacgcaaacatgaatatattatggtatactacaacacacacaagaattgagacagatttcaattaattcatctgcgagccttcagcgccgagccgccttgtcctaaccctgctatttagggtgtgtagatgggaaagttgagaacactggctaaaggtttgactaccagtccagcctgagtagcttttttagggggcaaggaaagaatactctagtagtgttgcaaggtgatatgaataagatgaatttccccacctctagttttgctcagtgacatcccacattctatctagaatcattcatatacagggccacaggatttgctattctcttgacccattctggattcttccaaagcagacagctattcttggatcatacctgagggagagagaactgcagtttttgtgtcttgaaggttttttccccacctttggcctttttttatttttgccaaagtgcttccagaagctattctcatttgagcaagaatgtctatgagttatatacactctgtagtaaggtatacttagttacatatacctcacattttatttacttcagtttggggcttgtttttgaataaggaaaacataattagagtctgtcaccaaatcctttaataatttaataattccaattgctcctcccacttcagattctgtttttgttttcaagagaagtgatctcactctgttgtccaggctggtgtgcagtggcgcaatcacagctcactgagacttcaaactcctgggctcaggagatccccttgcctcagcctcctgagtagttggatcataggcacatgccaccaggcccagctaattttttttagtttttgtagaggttgggtcttgctatgttgcccggctggtcttgaacccctggcctcaagtgatcctctctccttggcctcccaagtacttactgggattacagccatgagctaccatgccttgcatccatttatccattttagattctttttttttttttttttttttttttgagatggaatctcactctgtcacccaggctggagtgcagtggcatgatctccactcacagccacttctacctcccaggttcaagccattctcctgcctcagcctcccgagtagctgggactacaggtgcacgccgccatgcctggctaattttttgtattttagtagagacagggtttcactgtgttgcccaagctggtctcgaactcctgagctcaggtaatctgcctgccttggcttcccaaagtgctaggattacaggcgtgagccaccgcgcccggccattttagattcttaaaagcatttttatattctcggcattttctcagtcactttattttttatacttcactcccataacaaattcactggccaaaataacagtccagtgtttttatttttcaaatgaggaaacaggtgggagaggctacagagctgaggtcactgtgttttttgtatacttgtttctacctgacctcagctcttgcctataagacaagtttgagagcccatttctcttggttcttggtgtgtggtgggtcacttttagagtaaactgtatcactggtttggaaaagcagctgccttcttggacacttaaaacactaaatcacctgagcattctatttccctgacagttacgtggcttaatatttattaagaggttttttgtgtttttaacatactttgactttaaaattagtttcccttcagttcacttacctcactatacagtaaggaacagagaatccacaaaatttattagagtattcataggtcctcaaatttatttcttacatctctaaaagaaatgcaaaacccctgtccaaaaagaaaaatctcaaattattttattcacactgcttgtatatttttaattatgattgggtctagttctcaaattcttctctaccaaaagtggtaccacccccaccaggagacgtttggacatacgttgatggtttttgttgccagagtggctgggggcatttgaaagacaaagcttgagacattaaatatctgcaggttttagaaaagttccatacaaggaaaatttgacccatctaaaagaatagtcctatgtaaaatactctatcacttctgttgagaaatactgtataagcccaggaggaaaatataattgccaagaaggtagaaagtgccacagtgtgttgtgatcgttttagtgagagaatagtgctacaaactgcacaatacttggttttccctttgatctcatctggttttgtttctgaattgacacaggtgtttggagaacccgtaaagctgctgatagtcaaatccgagctactagctgcttgaagaagcttctgtcacccttaccgctggatcccaaattattagctcggaatgtaactgtattcctaggtagtatgtcaaacactggccactcttggtagaaaccttgaaactttcaccttgctgggctttagcaaagtttccttttacagttctgtttatgagcttcagctactgataaagcacttcctgaacttctctattatcatagtgaccctctgaataacctgagtgactggctcggcaattcgctttataaccattcttattcccaaagttggagcacataaacatttagatgtcttttcctgtaaaatattctagacatttacccaaactctagttcaacatatactcaacttgcactgtatatctccctgtcttttttgagacagagaagaaattcaggaggttccccatctccagagtttctctgttggaaagcagtatcaagaagcctttaaaaaattgttgttaagctttgccacctgcagaaatgcattgccccacattattcttctggggttaaagtagtaagtttggttgaggaaggaagtcaaaacagtcagtaatgatttctgttctcttatgcatattcgtgtatacatgggcaactgaatctagcaaggactctttcgtgtcacaccttaaaatcttcatgctgtagtcactccagaccatggagtggctttccagctgaatgaatcctatgtctcgcgtgcaggtggttggttttcaatgttcttgctaattttttttctattggatcttgggagttttctttgtttgctcctgtgtttgcccagctttaataaaaccaggcgcaaacaaaaaccatagcattctgaaacaatagggggcccacattggacccagtatgtcactttaatggacttcaagaaaaaatctgaatgggaaaaatgacactagaatgtatactccacacattttatgccatataatggtgtgttttcttaattttgtttcttgtggcgaaatgtggctttcaaattaaaatgaccttttcttctttgaaactttttgttttgacttgtataattaagggtttggaaagattcataattctgagagaggtttgcaaccaggagatacaaagaagtctcagtagtaatcttgttcatgtgcttttacagccagctacatttaagaatgtattagttacagaaattatatgtctgtgtatgtgtctctactcaataaagtacatgcctccacataatgcggtgctgtccatctcggcaaatactggccaagtccctttatgacaggcacacagaaaccatagcatggtctggctttcagaaaatgcctctcatctttcctggaaccttattttgctaaatgtctgttttcttgtgatttgttgtacctcacagcaccattgtgaccatggtgatgcctcatttgcatgatatgtaccttgtgtttaatgtgaaatacattttcattgaagagtctgatgacttgctagcgttttattttttctgtaagctcaatgtgctgaaaccaaaccaggcttttaaaaacctgtgtagaagaaaaccaaaaaatcctgtgtgggtgtcctttccctgtcaaactcattaaaaattcctttgttgccagtgccaa
